United States Patent Application Publication US 2018/0126003 A1 - sequence listing, part 153

SEQ ID NO: 268623 - DNA, 378 bp, Artificial Sequence
  derived and/or modified sequence
tgaaagtactacgacaagaacgccatcgccatcaccaacatcagcagctccgacgctccgctgcaaccgctcgtgtcgtctccatcccttcaagcagctgtcgataagaacaagctggaaaaagaaaaagagaaaaaaaaggaggaaaagaagcgtgaaaaagagcccgagaaacccgctaaaccgcttactgcggaaaagctccagaagaaggaccaacaactagagccgaagaaatccacatctcctaaaaaagccgctgaacccactgtagatcttctgggtttggtgtggaggaaaattgaaaaagaaaagtccgagcggcagctcgttgaggttgaggaattgaccttcatgtactgttttcccaagaattag

SEQ ID NO: 268624 - DNA, 189 bp, Artificial Sequence
  derived and/or modified sequence
atgctgttcctgaagctgagcgtgttccgggccgtggagttcttcatcagagataagtatgagaaaaaaaaatactatgacaagaatgccatcgccatcaccaatatctcatcatcagacgccccccttcagcctctagtcagtagtccctccctccaggcggcggtagataaaaataagttagagtag

SEQ ID NO: 268625 - DNA, 489 bp, Artificial Sequence
  derived and/or modified sequence
atgggaaatactaaagcacgcctgttgtacgaggcgaacctgccggagaattttcgcaggcctcaaacggaccaggcagtagagttttttatcagagataaatacgaaaagaaaaagtattatgacaagaacgctatcgctatcactaacatctccagctctgacgcgccacttcagcccctggtgtcaagcccatccctccaggccgctgtggataaaaataagcttgaaaaagaaaaagagaagaagaaggaagagaagaagagagagaaggagcctgagaagcccgcaaagcctttaacggcagaaaagctgcagaagaaagaccagcagctcgaaccaaaaaagagtaccagccctaagaaggccgctgagcctactgtggatcttcttggcctggtctggcggaaaatcgagaaagaaaaaagtgagaggcagctggttgaggtggaggagctcactttcatgtattgctttccaaagaactag

SEQ ID NO: 268626 - DNA, 414 bp, Artificial Sequence
  derived and/or modified sequence
atggccacgagatcttgtagagaaaaagcgcagaagctgaatgagcagcatcagttgattttgagcaaacttctccgcgaagaggataacaagtactgtgccgattgtgaggccaagggcccacgatgggcctcctggaatatcggggtctttatatgtatccggtgcgctggcatccacagaaatcttggggtgcatatctccagagtaaagtctgtgaatctggaccagtggaccgcagagcagatacaatgtatgcaagacatgggaaatacgaaagcccgactcctgtatgaggctaacttacccgagaacttcagaagaccgcagactgatcacgaagacataattctcgagactaccgcggtaattacactgctgcttaacaaatgccttccgtacgcaaagccgtag

SEQ ID NO: 268627 - DNA, 378 bp, Artificial Sequence
  derived and/or modified sequence
taaaagtactatgataagaacgctatagctataactaatatttcttcttccgatgccccactccaacctctggtttcttcaccgtcactgcaggccgcagtggataagaacaaacttgagaaagaaaaggaaaaaaagaaggaggaaaaaaagcgggagaaagaaccagaaaagcccgctaagccactcacagctgagaagctgcaaaaaaaagatcagcagctggaacccaaaaaatccacctcacctaaaaaagctgctgagcctaccgttgatttactggggctcgtgtggcggaaaattgaaaaagagaagagcgagcggcagctcgtagaggttgaggagttgactttcatgtattgcttccctaagaattag

SEQ ID NO: 268628 - DNA, 189 bp, Artificial Sequence
  derived and/or modified sequence
atgctttttctcaaattatcagtgtttagggccgtggaattctttattagggacaagtacgaaaagaagaaatattatgataagaatgccattgcaatcacgaacatctcatcctcagacgcccctttgcaacccctcgttagctcaccctccctacaggctgcagtcgacaagaacaagcttgagtag

SEQ ID NO: 268629 - DNA, 1001 bp, Artificial Sequence
  derived and/or modified sequence
agtccccctccccctcccctcgccggctagggtggtgcgtgccggcaggccggtcaaggaggcgggacacgtcggcgctaccaccgccaccgccgccgccgcccctcctcccgttccagctgccgctgccgcttcctgggctgagtccgcccgcggtcccggcggcgccaggtgcgttcactctgcccggctccagccagcgtccgccgccgccgtagctgccccaggctccccgccccgctgccgagatggcgacgcgctcctgtcgggagaaggctcagaagctgaacgagcagcaccagctcatcctatccaagcttctgagggaggaggacaacaagtactgcgccgactgcgaggccaaaggtcctcgatgggcttcctggaatattggtgtgtttatttgcatcagatgtgctggaattcatagaaatcttggggttcatatatccagggtcaaatcagtcaacctagaccaatggacagcagaacagatacagtgcatgcaagatatgggaaatactaaagcaagactactctatgaagccaatcttccagagaactttcgaagaccacagacagatcaagcagtggaatttttcatcagagataaatatgaaaagaagaaatactacgataaaaatgccatagctattacaaatatttcctcctctgatgctcctcttcagcctttggtatcctctccttctctgcaagctgctgttgacaaaaataaattggagaaagaaaaggaaaaaaaaaaggaagagaaaaagagagaaaaggagccagaaaagccggcaaaaccacttacagctgaaaagctgcagaagaaagatcagcaactggagcctaaaaaaagtaccagccctaaaaaagctgcggagcccactgtggatcttttaggacttgtttggagaaagattgagaaggaaaagagtgaaaggcagttagttgaagtggaagagttgaccttcatgtactgctttccaaaaaattga

SEQ ID NO: 268630 - DNA, 1310 bp, Artificial Sequence
  derived and/or modified sequence
gagtccgcccgcggtcccggcggcgccaggtgcgttcactctgcccggctccagccagcgtccgccgccgccgtagctgccccaggctccccgccccgctgccgagatggcgacgcgctcctgtcgggagaaggctcagaagctgaacgagcagcaccagctcatcctatccaagcttctgagggaggaggacaacaagtactgcgccgactgcgaggccaaaggtcctcgatgggcttcctggaatattggtgtgtttatttgcatcagatgtgctggaattcatagaaatcttggggttcatatatccagggtcaaatcagtcaacctagaccaatggacagcagaacagatacagtgcatgcaagatatgggaaatactaaagcaagactactctatgaagccaatcttccagagaactttcgaagaccacagacagatcatgaagatataatactggaaacaacagctgtaataactttactgcttaataagtgtttgccctatgccaagccctgaccatggcattttatgtaagatgagtccagacaacttcaagaatttaaagaagactaacgttggctttatcatcttgacttttccatttctcaactttgcaaggataaaattggccactgttcttctaatacatgtggaatcctatatgatgtgcccagggacagcatatatagtggaaaagaacatagatgttggaatcacaagtgcttaatctttccaagttgctgtttcttcatctatgatatggaactaataatatgcacattcgtggggtgtgggaggaattaaaggacccaaagtatgtacagcatatatagtataggatgtctggctcagtgtgggtacttgcatagatgttaatttcttataccaaaaaccccaaatgaacctgaattgaatttaaagtgtggtgatgcattgatagtggtggtggtgatgtaggaattaagaattgtcatttacttttctttctagaattagtttggatgagttttgttcagtgagaaaatttcctgaaagaggtagacttctttaagagaaagaaaagtagtttacagaatgtagttgcagaaataatgtgaaagagagcacagattgaggagtaggaaaattaaatttagagtcccagctttgtggagtggcgtgaataaagggaagtgtacatatcactgaattcatgcttttccttaagttatctgttttcagagcagtggaatttttcatcagagataaatatgaaaagaagaaatactacgataaaaatgccatagctattacaaatgtaagtaaa

SEQ ID NO: 268631 - DNA, 419 bp, Artificial Sequence
  derived and/or modified sequence
gaaatactacgataaaaatgccatagctattacaaatatttcctcctctgatgctcctcttcagcctttggtatcctctccttctctgcaagctgctgttgacaaaaataaattggagaaagaaaaggaaaaaaaaaaggaagagaaaaagagagaaaaggagccagaaaagccggcaaaaccacttacagctgaaaagctgcagaagaaagatcagcaactggagcctaaaaaaagtaccagccctaaaaaagctgcggagcccactgtggatcttttaggacttgtttggagaaagattgagaaggaaaagagtgaaaggcagttagttgaagtggaagagttgaccttcatgtactgctttccaaaaaattgatcctagttgttattgaataaattgttgtctgttttaagaatta

SEQ ID NO: 268632 - DNA, 578 bp, Artificial Sequence
  derived and/or modified sequence
ttaaaggacccaaagtatgtacagcatatatagtataggatgtctggctcagtgtgggtacttgcatagatgttaatttcttataccaaaaaccccaaatgaacctgaattgaatttaaagtgtggtgatgcattgatagtggtggtggtgatgtaggaattaagaattgtcatttacttttctttctagaattagtttggatgagttttgttcagtgagaaaatttcctgaaagaggtagacttctttaagagaaagaaaagtagtttacagaatgtagttgcagaaataatgtgaaagagagcacagattgaggagtaggaaaattaaatttagagtcccagctttgtggagtggcgtgaataaagggaagtgtacatatcactgaattcatgcttttccttaagttatctgttttcagagcagtggaatttttcatcagagataaatatgaaaagaagaaatactacgataaaaatgccatagctattacaaatatttcctcctctgatgctcctcttcagcctttggtatcctctccttctctgcaagctgctgttgacaaaaataaattggag

SEQ ID NO: 268633 - DNA, 489 bp, Artificial Sequence
  derived and/or modified sequence
atgggcaacaccaaggccagactgctgtacgaggccaacctgcccgagaacttcagaagaccccagaccgaccaggccgtggagttcttcatcagagacaagtacgagaagaagaagtactacgacaagaacgccatcgccatcaccaacatcagcagcagcgacgcccccctgcagcccctggtgagcagccccagcctgcaggccgccgtggacaagaacaagctggagaaggagaaggagaagaagaaggaggagaagaagagagagaaggagcccgagaagcccgccaagcccctgaccgccgagaagctgcagaagaaggaccagcagctggagcccaagaagagcaccagccccaagaaggccgccgagcccaccgtggacctgctgggcctggtgtggagaaagatcgagaaggagaagagcgagagacagctggtggaggtggaggagctgaccttcatgtactgcttccccaagaactag

SEQ ID NO: 268634 - DNA, 414 bp, Artificial Sequence
  derived and/or modified sequence
atggccaccagaagctgcagagagaaggcccagaagctgaacgagcagcaccagctgatcctgagcaagctgctgagagaggaggacaacaagtactgcgccgactgcgaggccaagggccccagatgggccagctggaacatcggcgtgttcatctgcatcagatgcgccggcatccacagaaacctgggcgtgcacatcagcagagtgaagagcgtgaacctggaccagtggaccgccgagcagatccagtgcatgcaggacatgggcaacaccaaggccagactgctgtacgaggccaacctgcccgagaacttcagaagaccccagaccgaccacgaggacatcatcctggagaccaccgccgtgatcaccctgctgctgaacaagtgcctgccctacgccaagccctag

SEQ ID NO: 268635 - DNA, 378 bp, Artificial Sequence
  derived and/or modified sequence
tgaaagtactacgacaagaacgccatcgccatcaccaacatcagcagcagcgacgcccccctgcagcccctggtgagcagccccagcctgcaggccgccgtggacaagaacaagctggagaaggagaaggagaagaagaaggaggagaagaagagagagaaggagcccgagaagcccgccaagcccctgaccgccgagaagctgcagaagaaggaccagcagctggagcccaagaagagcaccagccccaagaaggccgccgagcccaccgtggacctgctgggcctggtgtggagaaagatcgagaaggagaagagcgagagacagctggtggaggtggaggagctgaccttcatgtactgcttccccaagaactag

SEQ ID NO: 268636 - DNA, 189 bp, Artificial Sequence
  derived and/or modified sequence
atgctgttcctgaagctgagcgtgttcagagccgtggagttcttcatcagagacaagtacgagaagaagaagtactacgacaagaacgccatcgccatcaccaacatcagcagcagcgacgcccccctgcagcccctggtgagcagccccagcctgcaggccgccgtggacaagaacaagctggagtag

SEQ ID NO: 268637 - protein, 379 aa, Artificial Sequence
  derived and/or modified sequence
MFFTCGPNEAMVVSGFCRSPPVMVAGGRVFVLPCIQQIQRISLNTLTLNVKSEKVYTRHGVPISVTGIAQEIYKDRQKFSEQVFKVASSDLVNMGISVVSYTLKDIHDDQDYLHSLGKARTAQVQKDARIGEAEAKRDAGIREAKAKQEKVSAQYLSEIEMAKAQRDYELKKAAYDIEVNTRRAQADLAYQLQVAKTKQQIEEQRVQVQVVERAQQVAVQEQEIARREKELEARVRKPAEAERYKLERLAEAEKSQLIMQAEAEAASVRMRGEAEAFAIGARARAEAEQMAKKAEAFQLYQEAAQLDMLLEKLPQVAEEISGPLTSANKITLVSSGSGTMGAAKVTGEVLDILTRLPESVERLTGVSISQVNHKPLRTA

SEQ ID NO: 268638 - DNA, 1380 bp, Artificial Sequence
  derived and/or modified sequence
gtctgccgcagcaacggggtgcggcagggtggggaacgcgggagcggggccagctcccaggaaagctggtctgcgagcggcccctgcccggctcccaggtccctgcgcgaccccgcccttcccgagaccccagccgggctgccgcccgcgtcccggaagctccagcctgaaccatgtttttcacttgtggcccaaatgaggccatggtggtctccgggttctgccgaagccccccagtcatggtggctggagggcgtgtctttgtcctgccctgcatccaacagatccagaggatctctctcaacacactgaccctcaatgtcaagagtgaaaaggtttacactcgccatggggtccccatctcagtcactggcattgcccaggagatctataaggacaggcagaaattctcagaacaggttttcaaagtggcctcctcagacctggtcaacatgggcatcagtgtggttagctacactctgaaggacattcacgatgaccaggactatttgcactctttggggaaggctcgaacagctcaagtccaaaaagatgcacggattggagaagcagaggccaagagagatgctgggatccgggaagctaaagccaagcaggaaaaggtgtctgctcagtacctgagtgagatcgagatggccaaggcacagagagattacgaactgaagaaggccgcctatgacatcgaggtcaacacccgccgagcacaggctgacctggcctatcagcttcaggtggccaagactaagcagcagattgaggagcagcgggtgcaggtgcaggtggtggagcgggcccagcaggtggcagtgcaggagcaggagatcgcccggcgggagaaggagctggaggcccgggtgcggaagccagcggaagcggagcgctacaagctggagcgcctagccgaggcagagaagtcccaactaattatgcaggcggaggcagaagccgcgtctgtgcggatgcgtggggaagctgaggcctttgccataggggcccgagcccgagccgaggctgagcagatggccaagaaggcagaagccttccagctgtaccaagaggctgctcagctggacatgctgctagagaagctgccccaggtggcagaggagatcagtggtcccttgacttcagccaataagatcacactggtgtccagcggcagtgggaccatgggggcagccaaagtgactggggaagtactggacattctaactcgcctgccagagagtgtggaaagactcacaggcgtgagcatctcccaggtgaatcacaagcctttgagaacagcctgagccttcagccctcacagatgcccagcctcatagctgaagttgcctgaatgatcctcctgttgcatgt

SEQ ID NO: 268639 - DNA, 1140 bp, Artificial Sequence
  derived and/or modified sequence
atgttcttcacctgtggtcctaatgaagcaatggtagtgtccggattttgtaggagtccccctgtgatggtggccggcgggcgcgtgttcgttttaccatgcattcagcaaatccagcgaatttcactgaacaccctgaccttgaatgttaaatccgagaaagtgtataccaggcatggcgtgcccatcagcgttaccggcattgcacaggaaatatataaggacaggcagaagttctccgagcaggtgttcaaggtggcctctagtgacctggtgaacatgggcatctctgtggtatcttatactttaaaggatatccatgacgatcaagactatctgcattccttgggaaaggccaggactgctcaggtgcagaaggacgcaaggatcggcgaggccgaggcaaaacgggacgctggtattagagaggcaaaggctaagcaggagaaggtgtctgcccaatatctgagcgagatcgaaatggccaaagcccaaagggactacgagcttaaaaaggcagcttacgacatcgaagtgaacacccggcgagcccaagctgatctggcctatcagctccaagtggccaagaccaaacagcagattgaggaacagcgcgtccaagttcaagtcgtagagagggcgcagcaggtcgccgtacaggagcaggaaatcgctcgaagggagaaggagcttgaggcaagagttagaaagccagccgaggccgaacgctataaacttgagcgtctcgccgaggccgaaaagagtcagctaattatgcaggctgaggcggaggccgctagcgtgagaatgcggggggaggcggaggcgttcgcgatcggcgcacgcgccagagctgaagctgaacaaatggccaagaaagcagaagccttccagctgtaccaagaggctgctcagcttgacatgctgctggagaagctcccccaggtggccgaggaaatatcaggcccactgacatctgctaataaaattaccctggtgagctccggatccggaaccatgggcgctgcaaaggtgaccggagaagtactggatattctcactagattacccgaaagcgtcgagcgactgactggagtcagtattagtcaggttaaccataagccgctgcggaccgcctag

SEQ ID NO: 268640 - DNA, 1140 bp, Artificial Sequence
  derived and/or modified sequence
atgttctttacctgtggccccaatgaagccatggtggtctccgggttttgccggtcacctcctgtgatggtggcaggaggtcgcgtctttgtgctgccctgtatccagcaaatacagcggatctccctgaataccttaacactcaatgtcaaatctgagaaggtctatactcggcacggagttccgatttctgtcaccgggatcgcccaggagatatataaggatagacaaaagttctcagaacaagtgttcaaagtggcctcaagcgacttagtaaatatggggatatcggtggtgtcctatacactgaaagacatacatgatgatcaagactacttgcactctctcggtaaggcaaggacagcccaggtccagaaggacgctcggataggagaagctgaagcaaaacgcgacgctggaattcgtgaagctaaagcaaaacaggagaaggtttccgctcagtacctgtcagaaatcgagatggccaaggcacagagagactatgaactcaagaaagctgcatacgacatagaggttaacactaggcgagctcaggccgatcttgcttaccagctgcaggtcgccaaaaccaagcagcagattgaggaacagcgcgtgcaagtacaggtcgtagaaagagcccagcaggttgccgtccaggagcaggagattgcccggcgagaaaaggagcttgaagcccgggtgagaaaacccgccgaggctgagcggtataagttggagcgactggcggaagcagaaaaatctcagctgatcatgcaggctgaggccgaggctgcttctgtgcgcatgcgaggcgaagctgaggcctttgccatcggggccagggcccgggctgaggctgaacagatggcaaagaaagcagaggctttccagctgtatcaggaagcagcacagctggacatgctgttggaaaaactgccacaggtggcggaggaaattagcggacccctgactagcgctaataagattacactcgttagtagtggtagcggcacgatgggcgctgccaaggtgacgggggaagtgctggacattttaacacgactcccggaatcagtggaacgcttgacgggtgtgtccataagccaggtaaatcacaaaccgctgcgcactgcctag

SEQ ID NO: 268641 - DNA, 1140 bp, Artificial Sequence
  derived and/or modified sequence
atgtttttcacatgcggacctaatgaagcgatggtcgtgagtggcttctgccggtctccccctgtgatggtggccggcggacgtgtgttcgtcttaccctgtattcagcagattcagagaatatccttgaacacactgacactgaacgtgaagtctgaaaaggtgtatacccggcacggggtccctatctcggtaaccggtatagcccaggagatctacaaggatagacagaagttttctgagcaggtgttcaaggtggccagttcggatcttgtaaatatgggcatttctgtggtcagctacactctgaaggacatccatgatgatcaggactatttacatagcctcggcaaggcgcggacagcacaggtccagaaagatgcccggatcggcgaagccgaagctaaacgggacgccggtatccgcgaggctaaggcaaagcaggaaaaagtgagtgcgcagtatctgagcgagatcgaaatggcaaaagcccagagagattatgaactgaagaaagctgcgtatgatatagaagtcaacacccgaagagcacaagcagatttagcctaccagctccaagtagctaaaacgaagcagcagatcgaagagcagcgcgtccaggtccaagtcgtcgaaagggctcagcaagtcgctgtccaggaacaagagatcgcgagacgagagaaggagttggaagcaagggtacgaaagcccgccgaggcagaaaggtacaagctggagaggttggccgaggctgaaaaaagccagctgataatgcaggccgaggccgaagctgcaagcgtccgtatgcggggagaagccgaggccttcgctattggcgcacgcgccagagccgaagccgagcagatggcgaaaaaggcggaggcctttcagctgtaccaggaagcggcccagttggacatgttgctggagaaactgccccaggtagcagaagaaattagtgggccgcttaccagcgccaataagataacattagtgtcctctggatccggcaccatgggcgcagccaaggtgaccggcgaggttcttgacattctcacaagactgcccgagtcagtggagagactgacaggagttagcataagtcaggtgaatcataagccccttaggacggcttag

SEQ ID NO: 268642 - DNA, 1140 bp, Artificial Sequence
  derived and/or modified sequence
atgttctttacctgcgggcctaatgaagccatggtagtgtcaggcttctgtcggtcgcctcctgtgatggtggcaggggggagagtattcgtcttaccctgcattcagcagatacagagaatctcactgaacacacttacattgaatgtgaaatcagaaaaggtgtacacacgtcatggagtgcccatatccgtaaccggcatcgcacaggagatttataaggaccggcagaagttcagtgagcaggtctttaaggtagcctcatccgacctagtgaatatggggatcagcgtcgtcagctacacactcaaggatatacacgatgaccaagattaccttcacagcctggggaaggcccgtaccgctcaggtccaaaaggacgcacgaatcggagaggcggaggccaaacgggatgctggcatcagggaagccaaagccaaacaagagaaggttagcgctcagtatctcagtgaaattgaaatggccaaggcccagagagattacgagctcaagaaagcggcttacgatatcgaggtgaatacccgacgggcccaggcagacctggcctatcagctccaagtggctaagactaagcagcaaatcgaagagcaacgagttcaagttcaggtggttgagcgtgctcagcaggttgctgtgcaggaacaggaaatcgctaggcgggagaaagaattagaagcccgtgtgaggaagccggctgaagctgagcgatataaactggagcgccttgccgaagcagaaaagtcacaactaatcatgcaggcagaagccgaggccgcctccgtcaggatgcgtggtgaggctgaggctttcgctattggagcaagagccagggccgaggccgaacaaatggctaagaaagccgaggcattccagttataccaggaggcggcacagctggacatgttgcttgagaagctgccgcaggtcgccgaggagatcagcggtcctctaacaagtgccaataagattactctggtttcctctggaagtggtacaatgggtgctgcgaaagtgacaggcgaagtgctcgatatcctgaccaggttgccagagtccgttgaacgtctgaccggagtcagcatcagtcaggtcaatcacaagccactgcggacagcatag

SEQ ID NO: 268643 - DNA, 1140 bp, Artificial Sequence
  derived and/or modified sequence
atgttttttacatgtggccccaatgaggccatggttgtatcggggttttgccggagcccccctgtgatggtggccggtggtagggtgtttgtgctgccatgcattcagcaaatccagcgaatttccctcaatacgttgactcttaatgtgaagtcagagaaggtatatacacgtcatggcgtccctatatctgtgactgggatcgcacaggagatatacaaggacaggcagaaattttccgaacaggtgttcaaggtggcctctagcgatttggttaatatgggcattagcgtcgtgtcgtacactttgaaggacatccacgatgatcaagactacctgcactctttgggaaaggctcgtaccgcacaggtccaaaaggatgcacgcattggcgaagcggaggctaaacgcgacgcaggaattagggaggcaaaggcgaagcaggaaaaggtatccgctcaatacctgagcgagatcgagatggccaaagcccaacgggactacgaactgaaaaaggccgcttatgatatcgaagtgaacacaagacgggcacaagccgatctggcctatcagcttcaggtggcgaaaactaagcagcagatcgaggagcaacgcgtgcaggttcaggtcgtggagcgggctcagcaggtggcagttcaggagcaggaaatcgcccggagggagaaggaattggaggccagggtacgaaagcctgctgaagctgagagatataaacttgaacgactcgccgaggctgagaagtcacaactgattatgcaggcagaggccgaggccgcatcggtccgtatgcgcggcgaggcagaggcgttcgcaatcggcgcacgagcccgcgctgaagcagagcagatggcaaaaaaggctgaagcattccagttataccaggaagctgcacaactggacatgctcctcgaaaaattgcctcaagtagccgaggagatttctggccctttgacatctgctaacaaaattacactggtcagctctggaagcggaacaatgggcgcagccaaggtgaccggggaagtcctggacatcctcacccggttgcccgagtccgtggagaggttgacgggtgtcagtatttcccaagtcaaccacaaacctctaaggaccgcctag

SEQ ID NO: 268644 - DNA, 1140 bp, Artificial Sequence
  derived and/or modified sequence
atgttcttcacctgtggccccaatgaggccatggtggtgtctggcttctgccgcagcccccctgtgatggtggccggcggccgggtgtttgtgctgccctgcatccagcagatccagaggatcagcctgaacaccctgaccctgaatgtgaagtctgagaaggtgtacaccaggcatggagtgcccatctctgtgacaggcatcgcccaggagatctacaaggaccggcagaagttcagcgagcaggtgttcaaggtggccagcagtgacctggtgaacatgggcatctctgtggtgtcctacaccctgaaggacatccatgatgaccaggactacctgcacagcctgggcaaggccaggacagcccaggtgcagaaggatgcccgcatcggggaggccgaggccaagagagatgctggcatccgggaggccaaggccaagcaggagaaggtgtctgcccagtacctgtctgaaattgagatggccaaggcccagagggactatgagctgaagaaggccgcctatgacatcgaggtgaacacccggcgggcccaggccgacctggcctaccagctgcaggtggccaagaccaagcagcagatcgaggagcagagggtgcaggtgcaggtggtggagcgggcccagcaggtggccgtgcaggagcaggagatcgcccggcgggagaaggagctggaggcccgggtgaggaagccagctgaggccgagcgctacaagctggagcggctggccgaggccgagaagagccagctgatcatgcaggccgaggccgaggccgcctctgtgaggatgagaggagaggccgaggcctttgccatcggggcccgggcccgggcagaggccgagcagatggccaagaaggccgaggccttccagctgtaccaggaggccgcccagctggacatgctgctggagaagctgccccaggtggccgaggagatcagcggccccctgaccagcgccaacaagatcaccctggtgagcagcggcagcggcaccatgggcgccgccaaggtgactggagaggtgctggacatcctgacccggctgcctgagagcgtggagcggctgactggagtgtccatcagccaggtgaaccacaagcccctgaggacagcctag

SEQ ID NO: 268645 - DNA, 1140 bp, Artificial Sequence
  derived and/or modified sequence
atgttcttcacctgcggccccaacgaggccatggtggtgagcggcttctgtaggagccctcccgttatggttgcaggcgggcgggttttcgtcttaccctgtatacagcagattcaacgcatctctcttaacacccttacactgaacgtgaaaagtgaaaaggtctacactcggcacggggtgcctatttcggtcaccggaattgcccaggagatttataaagatcgccagaaattcagtgaacaggtgtttaaggtagcctcatccgatctggtgaatatgggcatatcagtcgtcagttacaccctcaaggatattcacgacgatcaggattacctccactccctcggaaaagctcgcacagcacaggtgcagaaggacgcacgaataggtgaggctgaggctaaaagggacgccggcattagggaagctaaggccaagcaagaaaaagtttccgcccaatatttgagtgagatagaaatggccaaggcccagcgggactacgagttgaagaaagccgcttacgacattgaggttaataccagacgggcacaggcagacctggcctatcaactccaagtggcaaagacaaagcagcagattgaggaacagcgcgtgcaggttcaggtggtggaacgcgcccagcaggtagccgtgcaagaacaggaaatagctcgccgggagaaggaattggaggcgcgggttcgtaaacctgccgaagccgaaagatacaagctagagcggttggctgaagccgagaagagccagctgatcatgcaggccgaggcggaagctgcctcggtccgtatgagaggggaagccgaggcctttgctatcggagcaagggcccgcgcggaggcagagcaaatggctaagaaagctgaagcttttcagctgtaccaggaggctgcacagttggacatgctgcttgagaaactcccacaggtggctgaagaaatctccggccctttaaccagtgccaacaagataactctagtgtcgtccgggtcgggaactatgggagctgcaaaggtaaccggagaggtgctggacatcttgacgcgacttcctgaatcggtggagagactgacaggtgtctcaatatctcaggtcaaccataagcctctgaggaccgcctag

SEQ ID NO: 268646 - DNA, 1140 bp, Artificial Sequence
  derived and/or modified sequence
atgttcttcacctgcggccccaacgaggccatggtggtgagcggcttctgcagatcaccccccgtgatggtagccggaggtcgggtctttgttctcccatgtattcaacagatccaacgcatcagtctgaacacactcacgctgaacgtgaagtcagagaaagtgtacactagacatggcgtgccaatttccgttactggaatcgcccaggaaatatataaggaccgccagaaattctctgagcaagtcttcaaggtggcctcttctgatttagtgaatatggggatcagtgtcgtgtcatacacactcaaggatatccacgatgatcaggactatcttcattcactgggtaaagctcggacagcccaggtacagaaggatgcccgtattggcgaagccgaggccaagagagatgctggtatccgagaggctaaggcaaaacaggagaaggtgagcgcccagtacctatcagaaattgagatggcgaaagcccagcgggactacgagctgaagaaagccgcgtacgatattgaagttaatacacgacgtgctcaagccgatctggcttaccagctccaggttgccaagactaaacagcagattgaagaacagcgcgtccaagtccaggtggtggagcgcgcccagcaggtcgctgtccaggagcaagagattgcacgccgggagaaagagctagaagccagggtacgcaagcccgcagaggctgagcgttacaaactggaaaggctggcggaggccgaaaagtctcagctgatcatgcaggctgaggccgaggccgcttccgtgagaatgcggggcgaggcggaagccttcgccataggagccagagccagagccgaagcagaacagatggctaaaaaggctgaggcatttcagctatatcaggaagctgcccagctcgatatgctactggaaaaattgcctcaggtagccgaggaaatctcaggccctttgacgtccgccaacaagatcaccctcgtgtcctctggaagcgggactatgggcgccgctaaggtaacaggagaagtactcgatatattgaccaggctgcccgagagtgtggagcgtctcactggggtttccatctcccaagtgaatcacaaacctctgcgaacagcatag

SEQ ID NO: 268647 - DNA, 1140 bp, Artificial Sequence
  derived and/or modified sequence
atgttcttcacctgcggccccaacgaggccatggtggtgagcggcttttgtaggagccctcccgtcatggtcgccggtgggagggtatttgtgctgccctgcattcagcagatccagagaatctccctgaatactttgaccctgaatgttaaaagcgagaaagtgtatactcgccacggggtgccgatctccgtcacaggtatcgctcaggaaatttataaggatcgacaaaagttctcagaacaagtgttcaaagttgctagtagcgacctggtcaatatgggcataagcgtggttagttacacgttaaaggacattcatgatgatcaggattacctccactcccttgggaaagccaggaccgcacaggtccagaaggatgcgaggattggcgaagcggaggcaaaaagagatgctggcataagagaggctaaggccaaacaggagaaggtgagcgcacaatacctctcagaaattgagatggcaaaagcacaaagagattatgagttaaagaaggcagcatatgacattgaggttaatacacgccgagcgcaggcggatttagcttaccaacttcaggtggctaagactaagcagcagatagaagagcagagggtgcaagttcaggtggtcgagagggcgcaacaggtggcagtgcaggagcaggaaatcgcacggagagaaaaggaactcgaagcaagggtgagaaagcccgccgaggcagagcgatacaagttggaacgactcgccgaggccgaaaagtcccagctgattatgcaggcggaggccgaagctgcttccgttcggatgcgaggagaagccgaagcattcgccattggggccagagcacgagccgaggctgagcagatggcgaagaaagcagaagcatttcaattgtaccaggaagccgctcaattggacatgctcctagagaagcttccacaggtggccgaagaaatatcaggtcccctgacatctgctaataaaattacgttggtgtcatccggtagtggaaccatgggggctgccaaagtgactggagaggtgctggatatcctgaccagattaccagaaagcgtcgagcgactgaccggcgtttccatcagccaggtgaatcacaagcccctgcgaaccgcctag

SEQ ID NO: 268648 - DNA, 1140 bp, Artificial Sequence
  derived and/or modified sequence
atgttcttcacctgcggccccaacgaggccatggtggtgagcggcttttgcaggtcaccgcctgtcatggtcgctggagggcgagtgttcgtgcttccctgcatccagcagatacaaagaatttcattgaacacactaacactgaatgtgaagtctgaaaaggtgtacacgaggcacggcgtgcccatctctgtgaccgggattgcccaggaaatctacaaggaccggcagaagttctccgagcaggttttcaaggtggctagctctgaccttgttaatatgggaatatctgttgtgtcttataccttgaaggacattcacgatgaccaggattatttacattcgctgggaaaggctcggacagcccaggtacagaaggacgcccgcatcggcgaggctgaggctaaaagggacgccggtattagggaggctaaggcaaagcaggaaaaagtatctgcgcaatacctgtctgaaatagaaatggctaaggctcaacgcgactacgaactgaagaaggccgcttatgatattgaagtgaacacccgaagggcccaggccgatctggcatatcaactgcaggtagcaaaaacgaagcagcagattgaagaacagcgagtgcaggtgcaggtagtggaaagagcccagcaggttgcagttcaagagcaggagatcgcaagaagggagaaagaactggaagctcgtgttcgcaaacctgcggaggctgagagatacaagctcgaaagactagctgaggctgaaaaaagtcaactgatcatgcaggctgaggccgaggctgcaagtgttcgcatgcgcggcgaggccgaggcttttgcaatcggagctagggcgcgcgcagaagctgagcagatggctaaaaaggccgaggcctttcagctctaccaggaggctgcccagctggacatgttattagaaaagcttccacaggtcgcagaggagatatcaggaccactcacttccgccaataagatcaccctggtgagcagtggctccggcaccatgggagcggcaaaggttaccggtgaggtcctggacatattgacccgcctgcccgagtctgtggaacgcctgactggagtcagtatctcacaagtgaaccataagcctcttcgtaccgcctag

SEQ ID NO: 268649 - DNA, 1140 bp, Artificial Sequence
  derived and/or modified sequence
atgttcttcacctgcggccccaacgaggccatggtggtgagcggcttctgccgttcacctccggtcatggtggccggcggccgagtcttcgtgctgccatgtattcagcagattcagaggatcagcctgaacaccttgactctgaacgtgaaatccgaaaaggtgtataccagacacggggttccaatcagcgtgaccggcattgctcaagagatctacaaggatcggcaaaaattctctgagcaggtgtttaaagtggcaagctccgacctcgtgaatatggggatcagcgtcgtgagctacaccctgaaagatatccacgacgaccaggattatcttcacagtctggggaaagccagaaccgcccaggtgcagaaggacgctagaatcggtgaagcagaagcgaagcgggacgcaggcatcagagaggctaaggccaaacaggagaaagtttctgcacagtatctgtctgagatcgagatggctaaagcccagcgcgattacgaactgaagaaagcggcctatgatatcgaagttaatacacgacgtgcccaggccgacctcgcttaccagctccaggtggctaagacgaaacaacaaatcgaggagcagagggtgcaagtgcaggtggtggaaagggcacagcaggttgccgtgcaggagcaggaaatcgcaaggagagaaaaggagctggaagcaagggtgagaaagcccgccgaagcagagcggtacaaactggaacgcctggccgaggccgagaagtcgcagctgattatgcaggctgaagctgaggccgcctctgtgcggatgagaggagaggcagaggccttcgccataggagcacgagcaagagccgaggctgaacagatggccaaaaaagccgaagccttccaactttaccaggaggcggcacaattggacatgttgcttgagaagctgccacaagtggccgaggagatctctgggcctctcactagcgccaacaaaattacactcgtgtccagtgggagcgggacaatgggcgcggctaaggtgaccggggaggtgctagacattctaacacggttgccagagagcgtggaaagactgaccggcgtcagtattagtcaggtgaatcacaaacctctgaggacagcctag

SEQ ID NO: 268650 - DNA, 1140 bp, Artificial Sequence
  derived and/or modified sequence
atgttttttacttgcggccctaacgaagcaatggtcgtgtcaggcttctgccggtccccacctgtcatggttgccggtggtagggtgttcgtgctcccatgtatccagcagatccagcgaatttcattgaacacacttactttgaatgtaaagtcagaaaaagtttacactcggcacggcgtccctattagcgttacagggatagcgcaggaaatttacaaggataggcaaaaattttccgagcaagtctttaaagtcgcctctagcgatctagttaacatgggaatctcagttgtttcttatactctgaaggacatccacgacgaccaggattatctgcattcgctcggtaaagcccgaaccgcacaggtgcagaaagacgcacgaattggcgaggctgaggctaagagggacgctggcatccgcgaggccaaagcaaagcaagagaaggtgagtgcccagtacctttccgagatcgaaatggcgaaagcacaacgggactacgagctaaagaaagccgcttatgacatcgaagtgaacacgcgaagagctcaggctgaccttgcctatcaactgcaagtggccaaaacgaagcagcagatcgaggagcaacgtgttcaggtccaagtcgtcgagagagcccaacaggttgccgtccaggaacaggagatcgctagacgcgaaaaagagctggaagctagggtaagaaagccagccgaggcggagcgatacaagcttgaaagacttgcagaagccgaaaaaagtcagctcatcatgcaggctgaagcagaagctgcaagcgtgaggatgcggggagaggcagaggcattcgcaattggggctagggcaagagctgaggccgaacagatggcaaagaaggcggaagcttttcaactgtatcaggaggcggctcagctggatatgctacttgaaaagttgccccaagtagcagaggagatctctggcccactgacctctgcgaacaagattaccctggtctccagtgggtccggtactatgggcgcagctaaggttaccggtgaggtcttggatatcttgacacgcctgccggaatcagtcgaacgcctgactggggtttcaatcagtcaggtgaatcataagcccttgcgcactgcctag

SEQ ID NO: 268651 - DNA, 1140 bp, Artificial Sequence
  derived and/or modified sequence
atgtttttcacttgcggcccaaacgaggcaatggtggtctctggcttttgtagatctcctccagtgatggtagcagggggacgcgtgttcgtgctgccttgtattcaacagatccagaggatctcccttaatacactgacgctcaatgtaaagagcgagaaagtctatactcgccatggtgtgcccatctccgtgacagggatcgcccaggagatctacaaggaccgccagaagttcagcgagcaggtctttaaggtggcctccagtgacctcgtaaatatgggaatttctgtcgtcagctataccttgaaagatatccacgacgaccaggattatttgcactccctcggaaaagccaggacggcacaagtccagaaggacgcgaggatcggcgaggccgaggccaagcgggatgcaggtatcagagaagcgaaagccaaacaggagaaagtttctgctcagtacctgagcgagatcgagatggcaaaagcccagagagactatgaactgaaaaaagctgcctacgacatcgaagtgaacacgcggcgtgcacaggctgacctggcgtaccagctacaggtcgccaagaccaagcaacagatcgaggaacagcgggttcaggtgcaggtggtggaacgggcacagcaggtggcggttcaggagcaggagatagccagacgggaaaaagaactcgaggcccgagtgcggaaacctgcagaagccgagcgctacaaacttgaacggctggcggaggccgaaaaatctcaattgatcatgcaagcagaggctgaagccgctagcgtgagaatgcgcggagaagcagaagcatttgcgattggcgctagggctcgggctgaggcggagcaaatggccaaaaaggctgaggcctttcagctttaccaggaagccgcacagttggacatgttactggaaaaactgccccaggtggccgaagaaattagcggcccattaacaagtgctaacaagattacccttgtcagcagcggttccggcactatgggcgctgccaaagtgacaggtgaggttctagacattctgacccgtctgcccgaaagtgtcgagaggctgaccggagtatccatctcgcaggtcaaccacaagcctctgcgaactgcctag

SEQ ID NO: 268652 - DNA, 1140 bp, Artificial Sequence
  derived and/or modified sequence
atgttttttacctgcggccctaacgaagctatggtggtcagcgggttttgcaggagtcctccagtcatggttgccggtggacgtgtgttcgtactgccatgtattcaacaaattcagcggatctcactcaacaccctgactcttaacgtcaaaagcgagaaagtgtacacacgccacggcgttcccatttccgtaacgggtatcgcacaggaaatttacaaggatcgccagaaattttctgaacaggtctttaaagttgccagctccgacctggtgaacatgggtatatcagtggtgagctacacactgaaggacatccacgacgaccaagactacctgcatagtttgggcaaggctcgaaccgctcaagtccagaaagacgccagaattggagaagcagaggccaagcgggatgctggcatacgcgaagcaaaagccaagcaggagaaagtgtcagctcagtatctaagtgagatagagatggctaaagctcagagagactatgagttgaagaaagcggcttacgatatcgaggttaacacacgacgcgctcaagctgatcttgcataccaactgcaggtcgctaagaccaagcagcaaatcgaggagcaaagggtgcaggtgcaggtggtggagcgggcacagcaggtcgctgttcaggagcaggaaattgctaggcgcgagaaagaacttgaagcaagggttcgcaagccagcagaggccgagcgctacaagctcgaacgactggcagaggcggagaaatctcagttaatcatgcaggccgaggccgaagccgcatccgtgaggatgaggggggaagccgaggcctttgcgattggagcgagggcacgggcagaggctgaacaaatggccaagaaagcagaggcctttcaactttaccaggaagccgctcagctggacatgctcttggaaaaactgcctcaggttgcagaggagatttccggtccccttacaagcgcaaataagatcaccctggtgagctcagggagtggaactatgggagccgctaaggtaactggtgaggttctggacatcctcactagactgccggagtcagttgagcgtttaaccggcgtatccatctctcaggtgaaccataaaccccttaggactgcttag

SEQ ID NO: 268653 - DNA, 1140 bp, Artificial Sequence
  derived and/or modified sequence
atgtttttcacatgcgggcctaacgaggctatggttgtgagcggtttttgccggagtcctcctgtgatggtagcaggcggaagggtgttcgtgctgccatgtatacagcaaatccaacggataagccttaacacactcactctcaacgtgaaaagcgagaaagtgtataccaggcatggagtccccatatcggttacaggaatagcccaggagatatacaaagatcggcagaaattcagcgaacaagtatttaaagtcgcgtctagtgacctggttaacatggggataagcgtagtctcctatactctgaaagatatccacgatgaccaggattatcttcacagtcttggcaaagcaagaacagctcaagtccagaaggacgcacggataggagaagctgaggccaaacgtgatgcgggtattcgcgaggccaaagccaaacaagagaaggtgtctgcccaatatctgtctgaaatcgaaatggctaaggcccaacgggactatgaactgaaaaaagctgcgtatgatatcgaagtcaacactaggcgggcacaggccgatctggcataccagctgcaggttgctaaaaccaaacagcaaatagaggagcagcgcgtacaggtccaggtcgtggaacgcgctcaacaagtggccgttcaggaacaggaaatcgctcggagagagaaggaactggaggcacgggtcagaaagcccgctgaggctgaaaggtataaactcgagcggttggccgaggccgagaagtcgcagttaatcatgcaagccgaggctgaagccgcttcagtacggatgaggggcgaagcggaggcctttgctatcggtgcacgggctagagctgaggcggagcagatggctaagaaagcagaggccttccaactctatcaagaggcggcacaactagacatgctgctggagaaattgccacaggtggcagaggagatctcaggcccactgacctcggctaataaaattacactggtgtccagcgggagcggcacaatgggcgctgctaaggtgacgggcgaggttctcgatatcctcaccaggctacctgagagcgtggagagactgaccggggtttcaatatcgcaagtgaatcataagcccctccggacggcttag

SEQ ID NO: 268654 - DNA, 1140 bp, Artificial Sequence
  derived and/or modified sequence
atgtttttcacatgtggacccaatgaagccatggtggtgagcggtttctgcagatccccacccgtaatggtggctggcggacgcgtgtttgtactgccttgcattcagcagatccagagaataagcctcaacactctgactctgaatgtgaaatctgagaaggtttacacccggcatggagttcctatctcagtgactgggattgcacaagagatctacaaggatagacagaagttttctgaacaggtattcaaggtggcttccagcgatctcgtgaatatgggaattagcgtggtttcctatacattgaaagatatccacgatgaccaggattaccttcactctctcgggaaagctcgtaccgcccaggtccagaaggacgctcgtattggtgaagccgaagctaaacgtgacgctgggattcgggaagcaaaagcaaagcaagaaaaggtaagcgctcaatacctcagtgagatcgagatggccaaggcacagagagattacgaactaaaaaaagcagcttatgatatcgaagttaacacacgacgagcacaggccgacctggcctatcagctccaggtggcaaagacgaaacagcagatcgaagagcagagggtccaggtgcaggtcgtggagcgcgctcagcaggtcgcggtgcaagagcaggagatcgcccgaagagagaaggagcttgaagcaagagtgcggaagccagcagaagcagagaggtataagctggagagactcgccgaggcggaaaagtctcagctgatcatgcaggctgaagctgaagctgcgtcagtgagaatgaggggggaggccgaggccttcgcgattggcgctcgcgcaagggcagaagccgaacaaatggctaagaaggcagaggcattccagctgtaccaggaggccgctcagctcgacatgctcctggagaagctgcctcaagttgctgaagagataagcgggccacttacttccgccaataaaattaccctggtgagctcgggcagtggcacaatgggtgccgctaaggtcacaggcgaagtgctagatatcctgaccaggctgccagagtccgtagagcgcttaacgggcgtttcgatatcgcaggtcaatcataagcccctgaggacggcctag

SEQ ID NO: 268655 - DNA, 1140 bp, Artificial Sequence
  derived and/or modified sequence
atgttcttcacctgcggccccaacgaggccatggtggtgagcggcttctgcagaagcccccccgtgatggtggccggcggcagagtgttcgtgctgccctgcatccagcagatccagagaatcagcctgaacaccctgaccctgaacgtgaagagcgagaaggtgtacaccagacacggcgtgcccatcagcgtgaccggcatcgcccaggagatctacaaggacagacagaagttcagcgagcaggtgttcaaggtggccagcagcgacctggtgaacatgggcatcagcgtggtgagctacaccctgaaggacatccacgacgaccaggactacctgcacagcctgggcaaggccagaaccgcccaggtgcagaaggacgccagaatcggcgaggccgaggccaagagagacgccggcatcagagaggccaaggccaagcaggagaaggtgagcgcccagtacctgagcgagatcgagatggccaaggcccagagagactacgagctgaagaaggccgcctacgacatcgaggtgaacaccagaagagcccaggccgacctggcctaccagctgcaggtggccaagaccaagcagcagatcgaggagcagagagtgcaggtgcaggtggtggagagagcccagcaggtggccgtgcaggagcaggagatcgccagaagagagaaggagctggaggccagagtgagaaagcccgccgaggccgagagatacaagctggagagactggccgaggccgagaagagccagctgatcatgcaggccgaggccgaggccgccagcgtgagaatgagaggcgaggccgaggccttcgccatcggcgccagagccagagccgaggccgagcagatggccaagaaggccgaggccttccagctgtaccaggaggccgcccagctggacatgctgctggagaagctgccccaggtggccgaggagatcagcggccccctgaccagcgccaacaagatcaccctggtgagcagcggcagcggcaccatgggcgccgccaaggtgaccggcgaggtgctggacatcctgaccagactgcccgagagcgtggagagactgaccggcgtgagcatcagccaggtgaaccacaagcccctgagaaccgcctag

SEQ ID NO: 268656 - protein, 465 aa, Artificial Sequence
  derived and/or modified sequence
MASTTSTKKMMEEATCSICLSLMTNPVSINCGHSYCHLCITDFFKNPSQKQLRQETFCCPQCRAPFHMDSLRPNKQLGSLIEALKETDQEMSCEEHGEQFHLFCEDEGQLICWRCERAPQHKGHTTALVEDVCQGYKEKLQKAVTKLKQLEDRCTEQKLSTAMRITKWKEKVQIQRQKIRSDFKNLQCFLHEEEKSYLWRLEKEEQQTLSRLRDYEAGLGLKSNELKSHILELEEKCQGSAQKLLQNVNDTLSRSWAVKLETSEAVSLELHTMCNVSKLYFDVKKMLRSHQVSVTLDPDTAHHELILSEDRRQVTRGYTQENQDTSSRRFTAFPCVLGCEGFTSGRRYFEVDVGEGTGWDLGVCMENVQRGTGMKQEPQSGFWTLRLCKKKGYVALTSPPTSLHLHEQPLLVGIFLDYEAGVVSFYNGNTGCHIFTFPKASFSDTLRPYFQVYQYSPLFLPPPGD

SEQ ID NO: 268657 - DNA, 3286 bp, Artificial Sequence
  derived and/or modified sequence
tagcagcgaatatactttacaccaaatctcagaagattcagaacttagatgagtggggcccaggacaggaaccctggagccttggaaggaggggagccccatctccccagaagagcagtgaccccagcagagaggggcctggtgtatcactggaggaaatagcctgccaaggaatacacgtcttcagaagaaattctgtgtggcttcaagagactgatcaaattgtgagaggaaaacagcctacccggtcctcttttcttcaatacaaaatgagataataggggttggaaggaaaaccttcaagacctatggaagtcagttgcagccagctcatcacatagaggtgcaggtgaggtgtattttcatcacggtggaaaattctggctgcttcatctccatctctagagccaatattggagcttttcaataaaagctatggcctcaaccaccagcaccaagaagatgatggaggaagccacctgctccatctgcctgagcctgatgacgaacccagtaagcatcaactgtggacacagctactgccacttgtgtataacagacttctttaaaaacccaagccaaaagcaactgaggcaggagacattctgctgtccccagtgtcgggctccatttcatatggatagcctccgacccaacaagcagctgggaagcctcattgaagccctcaaagagacggatcaagaaatgtcatgtgaggaacacggagagcagttccacctgttctgcgaagacgaggggcagctcatctgctggcgctgtgagcgggcaccacagcacaaagggcacaccacagctcttgttgaagacgtatgccagggctacaaggaaaagctccagaaagctgtgacaaaactgaagcaacttgaagacagatgtacggagcagaagctgtccacagcaatgcgaataactaaatggaaagagaaggtacagattcagagacaaaaaatccggtctgactttaagaatctccagtgtttcctacatgaggaagagaagtcttatctctggaggctggagaaagaagaacaacagactctgagtagactgagggactatgaggctggtctggggctgaagagcaatgaactcaagagccacatcctggaactggaggaaaaatgtcagggctcagcccagaaattgctgcagaatgtgaatgacactttgagcaggagttgggctgtgaagctggaaacatcagaggctgtctccttggaacttcatactatgtgcaatgtttccaagctttacttcgatgtgaagaaaatgttaaggagtcatcaagttagtgtgactctggatccagatacagctcatcacgaactaattctctctgaggatcggagacaagtgactcgtggatacacccaggagaatcaggacacatcttccaggagatttactgccttcccctgtgtcttgggttgtgaaggcttcacctcaggaagacgttactttgaagtggatgttggcgaaggaaccggatgggatttaggagtttgtatggaaaatgtgcagaggggcactggcatgaagcaagagcctcagtctggattctggaccctcaggctgtgcaaaaagaaaggctatgtagcacttacttctcccccaacttcccttcatctgcatgagcagcccctgcttgtgggaatttttctggactatgaggccggagttgtatccttttataacgggaatactggctgccacatctttactttcccgaaggcttccttctctgatactctccggccctatttccaggtttatcaatattctcctttgtttctgcctcccccaggtgactaaggaaaagagcagaagctccttggtttaaccagcacagagaaaataatataaatcccataagggcagacgtttggtctgttttcttcgctgtcatttccttagtagttagactagtgctgagattttagtggatatataattgatttatgttgaatatatggacttagcaactaaaaataccacagatggttaacctggactggggcaaagcaagataatagtgatgatcgtatgttgctgtctccatccgtctttaatgggtcagggctttgatttccaagggtcttcaggtgatgagtaggggtacccacaagtcagaaggtctgcgttctcctagtttgtttgctgccatttgaactcatgtagggaatgaaagaaagctgcaattatccgccaactgcatttaaaacaaaacaaaacagaaaaatcaaaataacattgactcttccaaccactgacatgttgtttaataatctaagcggcagtcctggaggctaccagacttactgagttctacctgagaaacagccaagcaaagtgtgagagaagggttaagactggcttacaatgagatgcttcaaatgaaaagggaattatgagtaaaattgaactttgatgggggattcagttctggaaaagaatttggtattttccagtctgctaggaccaattaccttgaaatattttaaaatctcagtaaatagttattgctgaaatggctgttggcagttcttattatgattcagagaagagcaaatagaccttaacttcattttgaaaaagaccaaattaccatacccgagtgagtaatgacaggactacaactaaaacataaacaacattaatgatgaccataaaaagtcacaaaattgctaaatgttataatttagagttgacataaaaattgatggccaggcatggtggctcacgcctgtaatcccagaactatgtgaggctgaggcaggtggatcacttgaggtcaggagttcaacaccagcctggccaacatggtgaaaccctgtctctactaaaaatacaaaaattagccgggcatggtggtaggggcctgtaacccagctactcgtgaggccaaggcaggagaattgcttgagcctgcagcagctgcagtaagccaagatcatgctgtgcctcaaggaaaaaaaaaattaatgtttactgatatttgttgaagtcctacaacatcacctctgagaataggagaaatgaagcaacagttgtgtctagatgtcagaggcatggctgggcctccatctctgcctaagggagatataaaagagttcaaactattgcccatgttccccagggtcagaagttctaattatgatgatagaggctgggttgtaagtagtaagtgaagggtagcagaatatgccatctttggcataagaagtattttgagttgaagacaattgagaaaaaaaaaaaaaaaaaa

SEQ ID NO: 268658 - DNA, 1398 bp, Artificial Sequence
  derived and/or modified sequence
atggccagcaccaccagcaccaagaagatgatggaggaggccacctgcagcatctgcctgagcctgatgaccaaccccgtgagcatcaactgcggccacagctactgccacctgtgcatcaccgacttcttcaagaaccccagccagaagcagctgagacaggagaccttctgctgcccccagtgcagagcccccttccacatggacagcctgagacccaacaagcagctgggcagcctgatcgaggccctgaaggagaccgaccaggagatgagctgcgaggagcacggcgagcagttccacctgttctgcgaggacgagggccagctgatctgctggagatgcgagagagccccccagcacaagggccacaccaccgccctggtggaggacgtgtgccagggctacaaggagaagctgcagaaggccgtgaccaagctgaagcagctggaggacagatgcaccgagcagaagctgagcaccgccatgagaatcaccaagtggaaggagaaggtgcagatccagagacagaagatcagaagcgacttcaagaacctgcagtgcttcctgcacgaggaggagaagagctacctgtggagactggagaaggaggagcagcagaccctgagcagactgagagactacgaggccggcctgggcctgaagagcaacgagctgaagagccacatcctggagctggaggagaagtgccagggcagcgcccagaagctgctgcagaacgtgaacgacaccctgagcagaagctgggccgtgaagctggagaccagcgaggccgtgagcctggagctgcacaccatgtgcaacgtgagcaagctgtacttcgacgtgaagaagatgctgagaagccaccaggtgagcgtgaccctggaccccgacaccgcccaccacgagctgatcctgagcgaggacagaagacaggtgaccagaggctacacccaggagaaccaggacaccagcagcagaagattcaccgccttcccctgcgtgctgggctgcgagggcttcaccagcggcagaagatacttcgaggtggacgtgggcgagggcaccggctgggacctgggcgtgtgcatggagaacgtgcagagaggcaccggcatgaagcaggagccccagagcggcttctggaccctgagactgtgcaagaagaagggctacgtggccctgaccagcccccccaccagcctgcacctgcacgagcagcccctgctggtgggcatcttcctggactacgaggccggcgtggtgagcttctacaacggcaacaccggctgccacatcttcaccttccccaaggccagcttcagcgacaccctgagaccctacttccaggtgtaccagtacagccccctgttcctgcccccccccggcgactag

SEQ ID NO: 268659 - DNA, 1398 bp, Artificial Sequence
  derived and/or modified sequence
atggcatcaactacttccactaagaaaatgatggaagaagctacctgctccatttgcctgtcactgatgactaaccccgtgagcattaattgtgggcacagctactgtcatttgtgcattacagacttcttcaagaacccatcccagaaacagctgcggcaagagacattttgctgtccgcaatgccgagcaccatttcatatggactccctcaggcccaacaaacagctcggttctttgatagaagcccttaaagaaaccgaccaggagatgtcttgcgaggagcacggggagcagttccacttgttctgtgaagatgaggggcagctaatctgctggagatgcgaacgggcgccccagcataagggccacaccactgcacttgtggaggatgtatgccagggctataaggagaaattgcagaaggcagtgacgaagctaaagcagctggaagatcgctgcaccgaacagaagctcagcacggctatgcggataactaagtggaaggagaaggtacagatccaaagacagaagattcgctcagatttcaagaatcttcagtgctttttgcatgaggaggaaaaatcctacctctggagactcgagaaggaagaacagcagactcttagccgtttacgggactatgaggccggccttggcctcaaaagcaatgaactgaaatctcatatcctagagctcgaggagaagtgccagggaagcgcccagaagcttctgcagaacgtcaacgacaccttgtcccggtcatgggctgtgaagcttgagacctctgaggctgtgagcctcgagctccacacaatgtgcaacgtttcaaaattgtatttcgatgtgaagaagatgctgcgatcccaccaggtctccgtgaccctcgatccagacaccgcacatcacgagctgatcctgtccgaggatcgccgacaagtgacaaggggctatacgcaggagaaccaggacacctctagcagacggtttactgccttcccctgtgtgttgggttgcgagggcttcactagcggccgaagatactttgaggtggatgtgggggaggggacagggtgggatttaggcgtttgtatggaaaatgtccagagagggacagggatgaaacaggaaccccagagcgggttttggacactccgcctgtgtaaaaagaaaggatacgtcgccctgaccagtcctcctacttccctccacctgcatgaacagccactattagtcgggatcttcctcgattacgaagcaggcgttgtgagcttctataatggaaatacggggtgccatatcttcacttttcccaaggcatctttctccgacacattgagaccctatttccaggtatatcaatacagccctctgtttctccccccccctggcgattag

SEQ ID NO: 268660 - DNA, 1398 bp, Artificial Sequence
  derived and/or modified sequence
atggccagtaccacttcaactaaaaagatgatggaggaggctacttgtagtatctgtctgagtcttatgacgaatcctgtgtctataaattgtgggcatagttactgtcatctgtgcatcaccgatttctttaagaacccttcacagaaacagctccggcaagagaccttctgttgcccccagtgtcgagcaccctttcacatggactctctcagacccaacaaacagttgggttcacttattgaggctcttaaagaaactgaccaagagatgtcctgcgaagagcatggcgaacagttccacctcttctgtgaggacgaggggcagttgatctgttggcgctgcgagcgagccccccagcataagggccataccacagccctggtggaggacgtgtgccagggctacaaggagaagctccagaaggcagtcacaaaacttaagcaactggaggataggtgtactgagcaaaagctctctactgctatgagaatcaccaagtggaaggagaaggtgcagatccaaagacaaaaaatccgaagcgactttaagaacctgcagtgtttcctccacgaggaggagaagtcttatctttggcgcctggagaaggaagagcagcagactctgagccggttgagggactacgaagctggcctggggctcaagtccaacgaactgaagtcacacatcctcgagctggaggagaagtgccagggttccgcccagaagctgttacagaacgtcaatgacacactcagccgcagctgggccgtcaaactagaaaccagcgaggccgtatctctggagcttcatacaatgtgtaacgtcagtaagctttactttgatgtgaagaaaatgctacgatcccatcaggtgagcgtaacgctggatccagataccgcccaccatgagctgatcctgagcgaggaccgccggcaggttacaagagggtacacccaagagaaccaggataccagtagccggaggttcactgcgttcccctgcgtcctgggctgcgagggctttacatctgggagacgctatttcgaggttgatgtcggtgaagggacaggctgggacctgggagtgtgcatggaaaacgtccagcgcggcaccggcatgaaacaggagccccagagcgggttctggacactgagactgtgtaagaagaagggatacgtagctctcacgtccccacccacctctctgcacctacatgagcagccactcctcgtcggcatattcctcgactatgaggctggagtagtgagtttttacaacggcaacacaggatgccacattttcaccttcccaaaggcttccttttccgataccctccgcccatattttcaggtgtatcaatatagtccccttttcttgcctcctcctggggactag

SEQ ID NO: 268661 - DNA, 1398 bp, Artificial Sequence
  derived and/or modified sequence
atggctagcactacatccacgaagaaaatgatggaagaagctacatgcagcatctgtctatctctgatgacaaacccagtgtcaattaactgtggtcacagttactgtcatttatgcatcactgacttcttcaagaacccttctcagaaacagctacgacaagagacattttgttgcccccagtgtcgtgctccattccatatggattctctgcgacctaataagcagctggggagtctcatagaggctctgaaagaaacagaccaagagatgagctgtgaggagcacggtgagcaattccacctcttctgtgaggatgagggtcagttgatctgttggcggtgtgagagggctcctcagcacaagggccacacaacagccctggtggaagatgtctgtcagggatacaaggaaaagctccagaaggctgtcacgaaacttaaacagctggaagaccggtgtacagagcagaagctgtccacagccatgcggattaccaagtggaaagagaaagtccagatccaacggcagaaaataaggtcagacttcaaaaatctgcagtgctttttacatgaagaggaaaagagctatctgtggcgcctggaaaaggaagaacagcaaactttgtctcggctgagagactatgaagctggccttggtctgaagtctaatgaactcaaatcccacattctggagctcgaggaaaaatgccagggttcagcacagaagctgctgcagaatgtgaacgatacactgtcaaggtcctgggccgtcaagcttgagacctctgaagcggtcagcctggagttgcatacaatgtgtaacgtctctaagctgtatttcgatgtgaaaaagatgctgcgcagtcaccaggtcagcgtaaccctggatccggacacagcacaccacgagctcattctgagtgaagatcggaggcaggtcacccgcggctacacacaggagaatcaggatacctcttccaggagattcacagcctttccctgtgtgctcggatgtgaggggttcacatcaggacggcgttattttgaggttgatgtgggtgaaggcactggttgggatttgggagtatgcatggagaatgtgcaacgggggactggcatgaagcaggaaccccagtctggattctggaccctcaggctatgcaagaagaaagggtatgtcgcattaacatcacccccgaccagcctccatcttcacgagcagcccctgttggttggcatattcttggactacgaagcaggtgtcgtatccttctataatggcaatacaggctgccatatttttacattccccaaggctagcttttccgacacccttaggccatattttcaagtgtatcagtactctcccctatttctccccccccctggggattag

SEQ ID NO: 268662 - DNA, 1398 bp, Artificial Sequence
  derived and/or modified sequence
atggccagcaccaccagcaccaagaagatgatggaggaggccacctgcagcatctgcctgagcctgatgaccaaccctgtgtccatcaactgtggccacagctactgccacctgtgcatcacagacttcttcaagaaccccagccagaagcagctgcggcaggagaccttctgctgcccccagtgccgggcccccttccacatggacagcctgcggcccaacaagcagctgggcagcctgattgaggccctgaaggagacagaccaggagatgagctgtgaggagcacggggagcagttccacctgttctgtgaagatgagggccagctgatctgctggaggtgtgagcgggccccccagcacaagggccacaccacagccctggtggaggatgtgtgccagggctacaaggagaagctgcagaaggctgtgaccaagctgaagcagctggaggaccgctgcacagagcagaagctgagcacagccatgaggatcaccaagtggaaggagaaggtgcagatccagaggcagaagatccgcagtgacttcaagaacctgcagtgcttcctgcacgaggaggagaagagctacctgtggaggctggagaaggaggagcagcagaccctgagccggctgcgggactatgaagctggcctgggcctgaagagcaatgagctgaagagccacatcctggagctggaggagaagtgccagggcagcgcccagaagctgctgcagaatgtgaatgacaccctgagccgctcctgggccgtgaagctggagaccagcgaggccgtgtccctggagctgcacaccatgtgcaatgtgtccaagctgtactttgatgtgaagaagatgctgcggagccaccaggtgtctgtgaccctggaccctgacacagcccaccacgagctgatcctgtctgaagatcggcggcaggtgacccggggctacacccaggagaaccaggacaccagcagccgccgcttcaccgccttcccctgtgtgctgggctgtgagggcttcaccagcggccgccgctactttgaggtggatgtgggggagggcaccggctgggacctgggcgtgtgcatggagaatgtgcagaggggcaccggcatgaagcaggagccccagagcggcttctggaccctgcggctgtgcaagaagaagggctacgtggccctgaccagcccccccaccagcctgcacctgcacgagcagcccctgctggtgggcatcttcctggactatgaggccggcgtggtgtccttctacaatggaaacacaggctgccacatcttcaccttccccaaggccagcttcagtgacaccctgcggccctacttccaggtgtaccagtacagccccctcttcctgcccccacctggggactag

SEQ ID NO: 268663 - DNA, 1398 bp, Artificial Sequence
  derived and/or modified sequence
atggccagcaccaccagcaccaagaagatgatggaggaggccacctgtagcatctgcctaagcttaatgaccaacccagtttctattaactgtggacattcttactgccacctttgcatcacggacttcttcaagaacccctctcaaaagcagttaaggcaggaaacgttttgttgtccgcagtgtagggctccttttcatatggatagtctgcgcccaaacaagcagttaggctctctgattgaggctctcaaggagacggaccaagaaatgtcatgtgaggagcatggggagcaatttcacttgttctgcgaagatgagggccaactcatatgctggcgatgtgagagggctcctcaacacaaggggcacactactgccttggtcgaggatgtgtgtcagggctacaaagagaagctgcagaaagcggttactaaactgaagcaattggaagaccgctgcacagaacagaagctctctaccgctatgcgcatcacaaagtggaaggaaaaagttcagatacagagacagaagatccggtccgattttaagaacctccaatgctttctgcacgaagaggagaagtcctatttgtggcgactggaaaaagaagagcagcagaccctgtcgcggctgcgtgattatgaagccggactaggcctgaaaagcaacgagttaaagagccatatccttgagctggaagaaaagtgtcaggggtccgcccagaagctactccaaaacgtaaacgatacgctgtctcgatcatgggccgtgaaactcgagactagcgaagccgtgtctctggagctgcatactatgtgcaacgttagcaaactgtatttcgatgtgaagaagatgctgcggtctcaccaggtatccgtcaccctcgatcccgacactgcccaccatgagctgatactgagcgaggatcggcgacaggtgacgagagggtacacccaggaaaatcaggataccagctcgcgacggtttaccgcgttcccatgtgtgctgggatgcgaaggattcaccagcggacgaaggtactttgaagtagatgttggtgaaggaactggttgggatctcggagtttgtatggagaatgtgcagagagggactgggatgaagcaggaaccccagtcgggattctggactttaaggctgtgtaagaaaaaaggatacgtggcgttaacgagtccacccacatctcttcacctgcacgaacagcctttactcgtggggatcttcctggattatgaagctggggtagtttccttctataacgggaataccggatgccacatctttacgttcccaaaggcttcttttagcgacacgctgagaccatactttcaggtttaccagtattcgccactgtttcttcccccgcccggcgactag

SEQ ID NO: 268664 - DNA, 1398 bp, Artificial Sequence
  derived and/or modified sequence
atggccagcaccaccagcaccaagaagatgatggaggaggccacctgtagcatttgcttaagcttaatgaccaacccagtcagtatcaactgcggccattcctactgtcacttgtgcattactgacttctttaagaaccctagtcagaaacaactccgacaggagacattttgttgcccacagtgccgcgcacctttccacatggattctctacgacctaacaaacagctgggaagccttatcgaggcattaaaggagacagaccaggaaatgtcttgcgaagagcacggcgagcagttccacttgttttgcgaggacgagggacagctgatctgttggagatgtgagcgagcacctcagcacaaagggcacaccaccgcccttgttgaagacgtgtgccagggatacaaagaaaagctgcaaaaggccgttactaaactgaaacagcttgaggaccgttgcacggaacagaaactctccaccgctatgcggatcacaaaatggaaagagaaggtgcagattcagaggcagaagatccgaagcgatttcaaaaatctccagtgctttctgcatgaggaggaaaaaagctacttgtggcgcttggagaaagaggagcagcagacgctaagtcggctgagggattacgaagctggcctgggtctgaagtccaacgaattgaagagtcatattttggagctggaagagaagtgtcagggctcggcacagaagttgttacagaacgtgaatgataccctctctcggtcgtgggccgtgaaactggagaccagcgaagcagtcagcttagagctccacacgatgtgtaacgtgtctaagttgtattttgatgtcaagaagatgctgcgctctcaccaggtgagtgtgactcttgacccagacacggctcaccacgaactcattctcagtgaagataggcggcaggtgactaggggctatactcaggagaaccaagatactagcagccgccgattcacagccttcccctgcgtgctgggatgtgaggggtttaccagcggcagaaggtatttcgaagtggatgtgggggaaggaaccgggtgggacttgggggtctgtatggagaacgttcagcgcgggaccggcatgaaacaagaaccccagtccggtttttggactctgcgactgtgcaagaagaagggttacgttgcactgacttctccccccacatcactacacttacatgaacagcccctattggtagggatctttctggactacgaagccggcgtcgtctccttctacaatggaaacactggatgtcacatttttacatttccgaaagcaagtttctccgatacactgagaccatacttccaggtttatcagtatagtccgttgtttctgccccctcccggcgactag

SEQ ID NO: 268665 - DNA, 1398 bp, Artificial Sequence
  derived and/or modified sequence
atggccagcaccaccagcaccaagaagatgatggaggaggccacctgttcaatttgcctgagcttgatgactaatccagtgagtatcaactgtgggcactcctactgtcacctgtgtattactgacttctttaagaacccttcacaaaagcaactgcgccaagagaccttctgttgcccacaatgtcgcgctcctttccacatggattcgttgagaccaaacaaacagctcggatcactgattgaagcgctcaaggaaaccgaccaggaaatgtcctgtgaggagcatggagaacaattccacctgttttgtgaggacgaagggcaactgatttgctggcggtgtgagcgggcgccacagcacaaaggccacacaactgcgttggtagaggatgtctgccaaggatataaggaaaaactgcagaaggccgtcacgaagcttaagcaacttgaagatagatgtaccgaacaaaagttatccactgctatgcgcatcacaaaatggaaggaaaaagtgcagatccagaggcagaagatccgatcagatttcaagaacctgcagtgcttcctacatgaagaggaaaagagttacctgtggcgccttgagaaagaggagcagcagacactgtcccggctgcgggattatgaagccgggcttggacttaagtcgaacgagctcaaaagccatatcctggaactggaagagaagtgccaaggatccgcccagaaattactgcagaatgtgaacgacacactttcccggtcctgggctgtgaagctggagacatcggaggcagtttctcttgaactgcacactatgtgtaatgtcagcaaattgtacttcgatgttaagaagatgctgcgaagtcaccaggtctcagtgactctggaccctgatacggctcatcacgagctgattctgagtgaagatcgtaggcaggtcacacggggctatacacaggagaatcaagatacaagttccagacgcttcaccgctttcccttgcgtgttggggtgtgaaggatttacctcgggcaggcgctactttgaggtagatgtcggtgagggtactggctgggacctgggtgtttgcatggagaatgtgcagcgtggaactggtatgaagcaggaaccacaaagtgggttctggactctgcggctgtgcaaaaagaaggggtatgtggccttaactagcccaccgacttccttgcacctgcacgaacagccactgctagttggcatctttctggattatgaagcaggagtggtctctttttacaacggcaacacagggtgccatatatttacattccctaaggccagcttctctgacactctccgaccgtactttcaggtgtatcagtactcccccctgttcctcccgccgccaggcgactag

SEQ ID NO: 268666 - DNA, 1398 bp, Artificial Sequence
  derived and/or modified sequence
atggcctccacaacgtccactaagaaaatgatggaagaggctacatgcagcatctgcctgtcgctgatgacaaatcccgtctctatcaactgcggccattcttattgccatctctgcatcacggacttttttaaaaacccttcccagaaacagctccggcaggaaaccttctgctgtccgcagtgcagagcccctttccacatggacagccttcgacccaataagcaacttggctctctcatcgaggccctcaaggaaacggatcaagagatgagttgtgaagagcacggtgaacagtttcatcttttctgtgaagatgaagggcagttgatttgttggcgatgtgagcgggctccgcagcataaaggccacactactgcccttgtggaagatgtctgccaagggtataaggaaaaattgcagaaagctgtgactaaactgaagcagctagaagatcgttgtactgagcagaaactgagcacggcaatgaggataactaagtggaaagaaaaagtgcagatacaacgacagaagattcggtcagacttcaaaaacctccagtgtttccttcacgaggaggagaagtcttacctctggcgcctggagaaggaagaacagcagacgttaagccgcctgcgcgactatgaagctggactagggctgaaatctaatgaactgaagtcacacattctggagctggaagagaaatgtcaaggatcggcccagaagctgttgcagaatgtcaatgataccctgtcacgctcttgggcagtcaagcttgaaacctcagaggcggtgtcactggagctgcacactatgtgtaatgtgtctaagctctactttgatgtgaaaaaaatgttgcgctctcaccaggtcagcgtgacgctggacccggatactgcccaccatgaactgattctgtctgaagacaggcggcaggtgaccagaggatatacgcaagaaaatcaggacacaagcagtaggcggtttaccgcctttccatgcgtgctgggctgcgagggcttcacgagcggcagacgttattttgaagtcgacgttggggaagggactggctgggacctgggagtgtgcatggaaaatgtacagcgcggaaccggcatgaaacaagagccccagtctggcttttggactcttagactgtgcaagaagaagggatatgttgcactgacgtctccccctacatcactgcacctccatgagcagccactgcttgtgggtattttcctggactacgaggccggagtggtctccttctataatgggaacaccggctgtcacatctttaccttccctaaagcatcattttcagacaccttgaggccatatttccaggtgtaccagtattcacctctatttctgccccctcccggtgactag

SEQ ID NO: 268667 - DNA, 1398 bp, Artificial Sequence
  derived and/or modified sequence
atggcttcaaccacatctacgaagaagatgatggaggaggccacttgtagtatttgcttatccctgatgacaaaccctgtgtccatcaactgtggccacagctattgccacttgtgtatcactgatttttttaagaacccgagccagaagcagctgcggcaggagactttctgttgcccccaatgcagggctcctttccacatggactccctcaggcctaataagcaactgggcagcctgattgaagcactcaaggagacggaccaagagatgagctgcgaagagcacggcgagcagttccacctgttctgcgaagatgagggccagctgatctgttggaggtgcgaacgcgctccacagcataaagggcacaccaccgctttagtggaggatgtgtgtcaggggtataaagagaagttacagaaagctgtcactaagttaaagcagttagaggaccggtgcaccgagcagaagcttagcactgctatgaggataactaagtggaaggagaaggttcaaatccagagacagaaaatccgatcggattttaagaacctccagtgtttccttcacgaggaagagaagtcgtacctgtggcgactcgaaaaggaggaacagcaaaccctctcgcgcctccgtgactacgaagctggccttggactcaagtccaacgagttgaagagccacatcctcgagctggaggagaagtgccaggggtcggctcagaaactgcttcagaacgttaatgacacacttagcaggagctgggctgtgaaattggaaacttccgaggcggtttcactggaactgcacacgatgtgcaatgtgtccaaactctattttgacgtgaagaaaatgctgcggagtcatcaggtatcagtaaccctggaccccgacacagcacatcacgaactgattctctccgaggaccggcgtcaagttactagaggctacacacaggagaatcaagacacttccagtagacgcttcaccgcctttccatgtgtgctggggtgtgaaggatttacgagcggaagaaggtatttcgaggtcgatgtgggtgagggaactgggtgggacttaggcgtgtgcatggaaaatgtccaacgaggaactggcatgaagcaggaaccacagagcggtttctggaccttacgactttgcaaaaaaaaaggctatgtggctttaacctcaccccctaccagcctgcatttgcatgaacagccacttctggtcgggatttttttggactatgaggccggagttgtaagcttttataatggaaacacaggatgtcatattttcacattccccaaagcgtcatttagtgacacattgaggccttacttccaggtgtaccagtatagtcccctctttctcccaccccctggcgactag

SEQ ID NO: 268668 - DNA, 1398 bp, Artificial Sequence
  derived and/or modified sequence
atggcaagtacaacatctacgaagaagatgatggaggaggccacctgttctatctgtctaagtctgatgaccaacccagtgtccattaactgcggtcactcgtattgtcacctgtgcattaccgatttctttaaaaatccttcccagaaacaactgaggcaggaaacgttttgctgccctcagtgcagggctcccttccatatggactcactgcgcccaaacaagcagctaggtagccttatagaggcactaaaggagacagatcaggaaatgagctgtgaggaacacggcgagcagttccatcttttctgcgaggatgagggacagctcatttgctggcggtgtgagcgtgctcctcagcacaagggccataccacagctctggtggaagacgtgtgccaggggtacaaggagaaactccaaaaggccgttactaaactgaagcagctcgaagaccggtgtacggagcagaaactttcgaccgctatgcgaataaccaagtggaaagagaaagttcagattcagaggcagaagattcgatctgattttaagaatttacaatgttttttacatgaggaagagaaaagctacctctggcgcctagagaaagaggagcaacagaccttaagccgcctgagagactatgaggccggtctcggactgaagtccaacgaactcaagtctcacatcttggagctggaggagaagtgccaaggtagcgctcagaagttactgcaaaacgtgaacgataccttgtccagatcttgggccgtcaagctggaaaccagcgaggcagtgtctctcgaactacataccatgtgtaacgtaagcaagctgtatttcgacgttaagaagatgctgagatctcaccaggtgtccgtgacactggaccctgataccgcccatcatgaactaatcctctcggaggatcgccgtcaggtgacccgcggttatacacaagaaaaccaagatactagctcccggagatttacagcgtttccatgcgtactcgggtgtgaaggctttactagcggcaggaggtacttcgaagttgatgttggcgaaggaaccggctgggacttaggggtctgcatggaaaacgtccaacgagggacaggcatgaagcaggaacctcaatccggattttggacgttacgactttgtaagaagaaggggtacgtagcactgactagcccaccaacctcgctgcacctccatgagcagcctttgctcgtagggatcttcctagactatgaggccggagtggtctccttttataatggaaacaccgggtgtcatatttttacctttcccaaggcctctttttcagatacactcagaccgtactttcaggtatatcaatattctcctctctttctgccaccacctggcgactag

SEQ ID NO: 268669 - DNA, 3255 bp, Artificial Sequence
  derived and/or modified sequence
agactttacaccaaatctcagaagattcagaacttagatgagtggggcccaggacaggaaccctggagccttggaaggaggggagccccatctccccagaagagcagtgaccccagcagagaggggcctggtgtatcactggaggaaatagcctgccaaggaatacacgtcttcagaagaaattctgtgtggcttcaagagactgatcaaattgtgagaggaaaacagcctacccggtcctcttttcttcaatacaaaatgagataataggggttggaaggaaaaccttcaagacctatggaagtcagttgcagccagctcatcacatagaggtgcaggtgaggtgtattttcatcacggtggaaaattctggctgcttcatctccatctctagagccaatattggagcttttcaataaaagctatggcctcaaccaccagcaccaagaagatgatggaggaagccacctgctccatctgcctgagcctgatgacgaacccagtaagcatcaactgtggacacagctactgccacttgtgtataacagacttctttaaaaacccaagccaaaagcaactgaggcaggagacattctgctgtccccagtgtcgggctccatttcatatggatagcctccgacccaacaagcagctgggaagcctcattgaagccctcaaagagacggatcaagaaatgtcatgtgaggaacacggagagcagttccacctgttctgcgaagacgaggggcagctcatctgctggcgctgtgagcgggcaccacagcacaaagggcacaccacagctcttgttgaagacgtatgccagggctacaaggaaaagctccagaaagctgtgacaaaactgaagcaacttgaagacagatgtacggagcagaagctgtccacagcaatgcgaataactaaatggaaagagaaggtacagattcagagacaaaaaatccggtctgactttaagaatctccagtgtttcctacatgaggaagagaagtcttatctctggaggctggagaaagaagaacaacagactctgagtagactgagggactatgaggctggtctggggctgaagagcaatgaactcaagagccacatcctggaactggaggaaaaatgtcagggctcagcccagaaattgctgcagaatgtgaatgacactttgagcaggagttgggctgtgaagctggaaacatcagaggctgtctccttggaacttcatactatgtgcaatgtttccaagctttacttcgatgtgaagaaaatgttaaggagtcatcaagttagtgtgactctggatccagatacagctcatcacgaactaattctctctgaggatcggagacaagtgactcgtggatacacccaggagaatcaggacacatcttccaggagatttactgccttcccctgtgtcttgggttgtgaaggcttcacctcaggaagacgttactttgaagtggatgttggcgaaggaaccggatgggatttaggagtttgtatggaaaatgtgcagaggggcactggcatgaagcaagagcctcagtctggattctggaccctcaggctgtgcaaaaagaaaggctatgtagcacttacttctcccccaacttcccttcatctgcatgagcagcccctgcttgtgggaatttttctggactatgaggccggagttgtatccttttataacgggaatactggctgccacatctttactttcccgaaggcttccttctctgatactctccggccctatttccaggtttatcaatattctcctttgtttctgcctcccccaggtgactaaggaaaagagcagaagctccttggtttaaccagcacagagaaaataatataaatcccataagggcagacgtttggtctgttttcttcgctgtcatttccttagtagttagactagtgctgagattttagtggatatataattgatttatgttgaatatatggacttagcaactaaaaataccacagatggttaacctggactggggcaaagcaagataatagtgatgatcgtatgttgctgtctccatccgtctttaatgggtcagggctttgatttccaagggtcttcaggtgatgagtaggggtacccacaagtcagaaggtctgcgttctcctagtttgtttgctgccatttgaactcatgtagggaatgaaagaaagctgcaattatccgccaactgcatttaaaacaaaacaaaacagaaaaatcaaaataacattgactcttccaaccactgacatgttgtttaataatctaagcggcagtcctggaggctaccagacttactgagttctacctgagaaacagccaagcaaagtgtgagagaagggttaagactggcttacaatgagatgcttcaaatgaaaagggaattatgagtaaaattgaactttgatgggggattcagttctggaaaagaatttggtattttccagtctgctaggaccaattaccttgaaatattttaaaatctcagtaaatagttattgctgaaatggctgttggcagttcttattatgattcagagaagagcaaatagaccttaacttcattttgaaaaagaccaaattaccatacccgagtgagtaatgacaggactacaactaaaacataaacaacattaatgatgaccataaaaagtcacaaaattgctaaatgttataatttagagttgacataaaaattgatggccaggcatggtggctcacgcctgtaatcccagaactatgtgaggctgaggcaggtggatcacttgaggtcaggagttcaacaccagcctggccaacatggtgaaaccctgtctctactaaaaatacaaaaattagccgggcatggtggtaggggcctgtaacccagctactcgtgaggccaaggcaggagaattgcttgagcctgcagcagctgcagtaagccaagatcatgctgtgcctcaaggaaaaaaaaaattaatgtttactgatatttgttgaagtcctacaacatcacctctgagaataggagaaatgaagcaacagttgtgtctagatgtcagaggcatggctgggcctccatctctgcctaagggagatataaaagagttcaaactattgcccatgttccccagggtcagaagttctaattatgatgatagaggctgggttgtaagtagtaagtgaagggtagcagaatatgccatctttggcataagaagtattttgagttgaagacaattg

SEQ ID NO: 268670 - DNA, 2788 bp, Artificial Sequence
  derived and/or modified sequence
aaaagctatggcctcaaccaccagcaccaagaagatgatggaggaagccacctgctccatctgcctgagcctgatgacgaacccagtaagcatcaactgtggacacagctactgccacttgtgtataacagacttctttaaaaacccaagccaaaagcaactgaggcaggagacattctgctgtccccagtgtcgggctccatttcatatggatagcctccgacccaacaagcagctgggaagcctcattgaagccctcaaagagacggatcaagaaatgtcatgtgaggaacacggagagcagttccacctgttctgcgaagacgaggggcagctcatctgctggcgctgtgagcgggcaccacagcacaaagggcacaccacagctcttgttgaagacgtatgccagggctacaaggaaaagctccagaaagctgtgacaaaactgaagcaacttgaagacagatgtacggagcagaagctgtccacagcaatgcgaataactaaatggaaagagaaggtacagattcagagacaaaaaatccggtctgactttaagaatctccagtgtttcctacatgaggaagagaagtcttatctctggaggctggagaaagaagaacaacagactctgagtagactgagggactatgaggctggtctggggctgaagagcaatgaactcaagagccacatcctggaactggaggaaaaatgtcagggctcagcccagaaattgctgcagaatgtgaatgacactttgagcaggagttgggctgtgaagctggaaacatcagaggctgtctccttggaacttcatactatgtgcaatgtttccaagctttacttcgatgtgaagaaaatgttaaggagtcatcaagttagtgtgactctggatccagatacagctcatcacgaactaattctctctgaggatcggagacaagtgactcgtggatacacccaggagaatcaggacacatcttccaggagatttactgccttcccctgtgtcttgggttgtgaaggcttcacctcaggaagacgttactttgaagtggatgttggcgaaggaaccggatgggatttaggagtttgtatggaaaatgtgcagaggggcactggcatgaagcaagagcctcagtctggattctggaccctcaggctgtgcaaaaagaaaggctatgtagcacttacttctcccccaacttcccttcatctgcatgagcagcccctgcttgtgggaatttttctggactatgaggccggagttgtatccttttataacgggaatactggctgccacatctttactttcccgaaggcttccttctctgatactctccggccctatttccaggtttatcaatattctcctttgtttctgcctcccccaggtgactaaggaaaagagcagaagctccttggtttaaccagcacagagaaaataatataaatcccataagggcagacgtttggtctgttttcttcgctgtcatttccttagtagttagactagtgctgagattttagtggatatataattgatttatgttgaatatatggacttagcaactaaaaataccacagatggttaacctggactggggcaaagcaagataatagtgatgatcgtatgttgctgtctccatccgtctttaatgggtcagggctttgatttccaagggtcttcaggtgatgagtaggggtacccacaagtcagaaggtctgcgttctcctagtttgtttgctgccatttgaactcatgtagggaatgaaagaaagctgcaattatccgccaactgcatttaaaacaaaacaaaacagaaaaatcaaaataacattgactcttccaaccactgacatgttgtttaataatctaagcggcagtcctggaggctaccagacttactgagttctacctgagaaacagccaagcaaagtgtgagagaagggttaagactggcttacaatgagatgcttcaaatgaaaagggaattatgagtaaaattgaactttgatgggggattcagttctggaaaagaatttggtattttccagtctgctaggaccaattaccttgaaatattttaaaatctcagtaaatagttattgctgaaatggctgttggcagttcttattatgattcagagaagagcaaatagaccttaacttcattttgaaaaagaccaaattaccatacccgagtgagtaatgacaggactacaactaaaacataaacaacattaatgatgaccataaaaagtcacaaaattgctaaatgttataatttagagttgacataaaaattgatggccaggcatggtggctcacgcctgtaatcccagaactatgtgaggctgaggcaggtggatcacttgaggtcaggagttcaacaccagcctggccaacatggtgaaaccctgtctctactaaaaatacaaaaattagccgggcatggtggtaggggcctgtaacccagctactcgtgaggccaaggcaggagaattgcttgagcctgcagcagctgcagtaagccaagatcatgctgtgcctcaaggaaaaaaaaaattaatgtttactgatatttgttgaagtcctacaacatcacctctgagaataggagaaatgaagcaacagttgtgtctagatgtcagaggcatggctgggcctccatctctgcctaagggagatataaaagagttcaaactattgcccatgttccccagggtcagaagttctaattatgatgatagaggctgggttgtaagtagtaagtgaagggtag

SEQ ID NO: 268671 - DNA, 1874 bp, Artificial Sequence
  derived and/or modified sequence
gttaacttcctgacccaggaagtggcagcaacagaggggactagcagcgaatatactttacaccaaatctcagaagattcagaacttagatgagtggggcccaggacaggaaccctggagccttggaaggaggggagccccatctccccagaagagcagtgaccccagcagagaggggcctggtgtatcactggaggaaatagcctgccaaggaatacacgtcttcagaagaaattctgtgtggcttcaagagactgatcaaattgtgagaggaaaacagcctacccggtcctcttttcttcaatacaaaatgagataataggggttggaaggaaaaccttcaagacctatggaagtcagttgcagccagctcatcacatagaggtgcaggtgaggtgtattttcatcacggtggaaaattctggctgcttcatctccatctctagagccaatattggagcttttcaataaaagctatggcctcaaccaccagcaccaagaagatgatggaggaagccacctgctccatctgcctgagcctgatgacgaacccagtaagcatcaactgtggacacagctactgccacttgtgtataacagacttctttaaaaacccaagccaaaagcaactgaggcaggagacattctgctgtccccagtgtcgggctccatttcatatggatagcctccgacccaacaagcagctgggaagcctcattgaagccctcaaagagacggatcaagaaatgtcatgtgaggaacacggagagcagttccacctgttctgcgaagacgaggggcagctcatctgctggcgctgtgagcgggcaccacagcacaaagggcacaccacagctcttgttgaagacgtatgccagggctacaaggaaaagctccagaaagctgtgacaaaactgaagcaacttgaagacagatgtacggagcagaagctgtccacagcaatgcgaataactaaatggaaagagaaggtacagattcagagacaaaaaatccggtctgactttaagaatctccagtgtttcctacatgaggaagagaagtcttatctctggaggctggagaaagaagaacaacagactctgagtagactgagggactatgaggctggtctggggctgaagagcaatgaactcaagagccacatcctggaactggaggaaaaatgtcagggctcagcccagaaattgctgcagaatgtgaatgacactttgagcaggagttgggctgtgaagctggaaacatcagaggctgtctccttggaacttcatactatgtgcaatgtttccaagctttacttcgatgtgaagaaaatgttaaggagtcatcaagttagtgtgactctggatccagatacagctcatcacgaactaattctctctgaggatcggagacaagtgactcgtggatacacccaggagaatcaggacacatcttccaggagatttactgccttcccctgtgtcttgggttgtgaaggcttcacctcaggaagacgttactttgaagtggatgttggcgaaggaaccggatgggatttaggagtttgtatggaaaatgtgcagaggggcactggcatgaagcaagagcctcagtctggattctggaccctcaggctgtgcaaaaagaaaggctatgtagcacttacttctcccccaacttcccttcatctgcatgagcagcccctgcttgtgggaatttttctggactatgaggccggagttgtatccttttataacgggaatactggctgccacatctttactttcccgaaggcttccttctctgatactctccggccctatttccaggtttatcaatattctcctttgtttctgcctcccccaggtgactaa

SEQ ID NO: 268672 - protein, 283 aa, Artificial Sequence
  derived and/or modified sequence
MDLWPGAWMLLLLLFLLLLFLLPTLWFCSPSAKYFFKMAFYNGWILFLAVLAIPVCAVRGRNVENMKILRLMLLHIKYLYGIRVEVRGAHHFPPSQPYVVVSNHQSSLDLLGMMEVLPGRCVPIAKRELLWAGSAGLACWLAGVIFIDRKRTGDAISVMSEVAQTLLTQDVRVWVFPEGTRNHNGSMLPFKRGAFHLAVQAQVPIVPIVMSSYQDFYCKKERRFTSGQCQVRVLPPVPTEGLTPDDVPALADRVRHSMLTVFREISTDGRGGGDYLKKPGGGG

SEQ ID NO: 268673 - protein, 171 aa, Artificial Sequence
  derived and/or modified sequence
MMEVLPGRCVPIAKRELLWAGSAGLACWLAGVIFIDRKRTGDAISVMSEVAQTLLTQDVRVWVFPEGTRNHNGSMLPFKRGAFHLAVQAQVPIVPIVMSSYQDFYCKKERRFTSGQCQVRVLPPVPTEGLTPDDVPALADRVRHSMLTVFREISTDGRGGGDYLKKPGGGG

SEQ ID NO: 268674 - protein, 91 aa, Artificial Sequence
  derived and/or modified sequence
HSASTPILTHSHPAQGMMEVLPGRCVPIAKRELLWAGSAGLACWLAGVIFIDRKRTGDAISVMSEVAQTLLTQDVSHPGLLLQEGASLHLG

SEQ ID NO: 268675 - DNA, 2021 bp, Artificial Sequence
  derived and/or modified sequence
tcctcttttagagaatgtccggattgctattggactttggagcgtatggctccaaatcaactcattggctaaaacttgacggaaaatggtggttaggtggccagaatggatttgtggccaggggcatggatgctgctgctgctgctcttcctgctgctgctcttcctgctgcccaccctgtggttctgcagccccagtgccaagtacttcttcaagatggccttctacaatggctggatcctcttcctggctgtgctcgccatccctgtgtgtgccgtgcgaggacgcaacgtcgagaacatgaagatcttgcgtctaatgctgctccacatcaaatacctgtacgggatccgagtggaggtgcgaggggctcaccacttccctccctcgcagccctatgttgttgtctccaaccaccagagctctctcgatctgcttgggatgatggaggtactgccaggccgctgtgtgcccattgccaagcgcgagctactgtgggctggctctgccgggctggcctgctggctggcaggagtcatcttcatcgaccggaagcgcacgggggatgccatcagtgtcatgtctgaggtcgcccagaccctgctcacccaggacgtgagggtctgggtgtttcctgagggaacgagaaaccacaatggctccatgctgcccttcaaacgtggcgccttccatcttgcagtgcaggcccaggttcccattgtccccatagtcatgtcctcctaccaagacttctactgcaagaaggagcgtcgcttcacctcgggacaatgtcaggtgcgggtgctgcccccagtgcccacggaagggctgacaccagatgacgtcccagctctggctgacagagtccggcactccatgctcactgttttccgggaaatctccactgatggccggggtggtggtgactatctgaagaagcctgggggcggtgggtgaaccctggctctgagctctcctcccatctgtccccatcttcctccccacacctacccacccagtgggccctgaagcagggccaaaccctcttccttgtctcccctctccccacttattctcctctttggaatcttcaacttctgaagtgaatgtggatacagcgccactcctgccccctcttggccccatccatggactcttgcctcggtgcagtctccactcttgacccccacctcctactgtcttgtctgtgggacagttgcctccccctcatctccagtgactcagcctacacaagggaggggaacattccatccccagtggagtctcttcctatgtggtcttctctacccctctaccccacattggccagtggactcatccattctttggaacaaatcccccccactccaaagtccatggattcaatggactcatccatttgtgaggaggacttctcgccctctggctggaagctgatacctgaagcactcccaggctcatcatgggagctttcctcagcaccttcaccttccctcccagtgtagcctcctgtcagtgggggctggacccttctaattcagaggtctcatgcctgcccttgcccagatgcccagggtcgtgcactctctgggataccagttcagtctccacatttctggttttctgtccccatagtacagttcttcagtggacatgaccccacccagccccctgcagccctgctgcaccatctcaccagacacaaggggaagaagcagacatcaggtgctgcactcacttctgccccctggggagttggggaaaggaacgaaccctggctggaggggataggagggcttttaatttatttctttttctgttgaggcttccccctctctgagccagttttcatttcttcctggtggcattagccactccctgcctctcactccagacctgttcccacaactggggaggtaggctgggagcaaaaggagagggtgggacccagttttgcgtggttggtttttattaattatctggataacagcaaaaaaactgaaaataaagagagagagaga

SEQ ID NO: 268676 - DNA, 2017 bp, Artificial Sequence
  derived and/or modified sequence
gaaatagggtcttcttcccaggttggaccccggggagtttgggcttttcctacaatcactgaccctcactgtgactaaaggagcagaattaggtggccagaatggatttgtggccaggggcatggatgctgctgctgctgctcttcctgctgctgctcttcctgctgcccaccctgtggttctgcagccccagtgccaagtacttcttcaagatggccttctacaatggctggatcctcttcctggctgtgctcgccatccctgtgtgtgccgtgcgaggacgcaacgtcgagaacatgaagatcttgcgtctaatgctgctccacatcaaatacctgtacgggatccgagtggaggtgcgaggggctcaccacttccctccctcgcagccctatgttgttgtctccaaccaccagagctctctcgatctgcttgggatgatggaggtactgccaggccgctgtgtgcccattgccaagcgcgagctactgtgggctggctctgccgggctggcctgctggctggcaggagtcatcttcatcgaccggaagcgcacgggggatgccatcagtgtcatgtctgaggtcgcccagaccctgctcacccaggacgtgagggtctgggtgtttcctgagggaacgagaaaccacaatggctccatgctgcccttcaaacgtggcgccttccatcttgcagtgcaggcccaggttcccattgtccccatagtcatgtcctcctaccaagacttctactgcaagaaggagcgtcgcttcacctcgggacaatgtcaggtgcgggtgctgcccccagtgcccacggaagggctgacaccagatgacgtcccagctctggctgacagagtccggcactccatgctcactgttttccgggaaatctccactgatggccggggtggtggtgactatctgaagaagcctgggggcggtgggtgaaccctggctctgagctctcctcccatctgtccccatcttcctccccacacctacccacccagtgggccctgaagcagggccaaaccctcttccttgtctcccctctccccacttattctcctctttggaatcttcaacttctgaagtgaatgtggatacagcgccactcctgccccctcttggccccatccatggactcttgcctcggtgcagtctccactcttgacccccacctcctactgtcttgtctgtgggacagttgcctccccctcatctccagtgactcagcctacacaagggaggggaacattccatccccagtggagtctcttcctatgtggtcttctctacccctctaccccacattggccagtggactcatccattctttggaacaaatcccccccactccaaagtccatggattcaatggactcatccatttgtgaggaggacttctcgccctctggctggaagctgatacctgaagcactcccaggctcatcatgggagctttcctcagcaccttcaccttccctcccagtgtagcctcctgtcagtgggggctggacccttctaattcagaggtctcatgcctgcccttgcccagatgcccagggtcgtgcactctctgggataccagttcagtctccacatttctggttttctgtccccatagtacagttcttcagtggacatgaccccacccagccccctgcagccctgctgcaccatctcaccagacacaaggggaagaagcagacatcaggtgctgcactcacttctgccccctggggagttggggaaaggaacgaaccctggctggaggggataggagggcttttaatttatttctttttctgttgaggcttccccctctctgagccagttttcatttcttcctggtggcattagccactccctgcctctcactccagacctgttcccacaactggggaggtaggctgggagcaaaaggagagggtgggacccagttttgcgtggttggtttttattaattatctggataacagcaaaaaaactgaaaataaagagagagagaga

SEQ ID NO: 268677 - DNA, 2234 bp, Artificial Sequence
  derived and/or modified sequence
ggaaaccagcaggcgttggggaggggtggcgggggaatagcggcggcagcagccccagccctcagagagacagcagaaagggagggagggagggtgctggggggacagccccccaccattcctaccgctatgggcccaacctcccactcccacctcccctccatcggccggggctaggacacccccaaatcccgtcgcccccttggcaccgacaccccgacagagacagagacacagccatccgccaccaccgctgccgcagcctggctggggagggggccagccccccaggccccctacccctctgaggtggccagaatggatttgtggccaggggcatggatgctgctgctgctgctcttcctgctgctgctcttcctgctgcccaccctgtggttctgcagccccagtgccaagtacttcttcaagatggccttctacaatggctggatcctcttcctggctgtgctcgccatccctgtgtgtgccgtgcgaggacgcaacgtcgagaacatgaagatcttgcgtctaatgctgctccacatcaaatacctgtacgggatccgagtggaggtgcgaggggctcaccacttccctccctcgcagccctatgttgttgtctccaaccaccagagctctctcgatctgcttgggatgatggaggtactgccaggccgctgtgtgcccattgccaagcgcgagctactgtgggctggctctgccgggctggcctgctggctggcaggagtcatcttcatcgaccggaagcgcacgggggatgccatcagtgtcatgtctgaggtcgcccagaccctgctcacccaggacgtgagggtctgggtgtttcctgagggaacgagaaaccacaatggctccatgctgcccttcaaacgtggcgccttccatcttgcagtgcaggcccaggttcccattgtccccatagtcatgtcctcctaccaagacttctactgcaagaaggagcgtcgcttcacctcgggacaatgtcaggtgcgggtgctgcccccagtgcccacggaagggctgacaccagatgacgtcccagctctggctgacagagtccggcactccatgctcactgttttccgggaaatctccactgatggccggggtggtggtgactatctgaagaagcctgggggcggtgggtgaaccctggctctgagctctcctcccatctgtccccatcttcctccccacacctacccacccagtgggccctgaagcagggccaaaccctcttccttgtctcccctctccccacttattctcctctttggaatcttcaacttctgaagtgaatgtggatacagcgccactcctgccccctcttggccccatccatggactcttgcctcggtgcagtctccactcttgacccccacctcctactgtcttgtctgtgggacagttgcctccccctcatctccagtgactcagcctacacaagggaggggaacattccatccccagtggagtctcttcctatgtggtcttctctacccctctaccccacattggccagtggactcatccattctttggaacaaatcccccccactccaaagtccatggattcaatggactcatccatttgtgaggaggacttctcgccctctggctggaagctgatacctgaagcactcccaggctcatcatgggagctttcctcagcaccttcaccttccctcccagtgtagcctcctgtcagtgggggctggacccttctaattcagaggtctcatgcctgcccttgcccagatgcccagggtcgtgcactctctgggataccagttcagtctccacatttctggttttctgtccccatagtacagttcttcagtggacatgaccccacccagccccctgcagccctgctgcaccatctcaccagacacaaggggaagaagcagacatcaggtgctgcactcacttctgccccctggggagttggggaaaggaacgaaccctggctggaggggataggagggcttttaatttatttctttttctgttgaggcttccccctctctgagccagttttcatttcttcctggtggcattagccactccctgcctctcactccagacctgttcccacaactggggaggtaggctgggagcaaaaggagagggtgggacccagttttgcgtggttggtttttattaattatctggataacagcaaaaaaactgaaaataaagagagagagaga

SEQ ID NO: 268678 - DNA, 2021 bp, Artificial Sequence
  derived and/or modified sequence
tcctcttttagagaatgtccggattgctattggactttggagcgtatggctccaaatcaactcattggctaaaacttgacggaaaatggtggttaggtggccagaatggatttgtggccaggggcatggatgctgctgctgctgctcttcctgctgctgctcttcctgctgcccaccctgtggttctgcagccccagtgccaagtacttcttcaagatggccttctacaatggctggatcctcttcctggctgtgctcgccatccctgtgtgtgccgtgcgaggacgcaacgtcgagaacatgaagatcttgcgtctaatgctgctccacatcaaatacctgtacgggatccgagtggaggtgcgaggggctcaccacttccctccctcgcagccctatgttgttgtctccaaccaccagagctctctcgatctgcttgggatgatggaggtactgccaggccgctgtgtgcccattgccaagcgcgagctactgtgggctggctctgccgggctggcctgctggctggcaggagtcatcttcatcgaccggaagcgcacgggggatgccatcagtgtcatgtctgaggtcgcccagaccctgctcacccaggacgtgagggtctgggtgtttcctgagggaacgagaaaccacaatggctccatgctgcccttcaaacgtggcgccttccatcttgcagtgcaggcccaggttcccattgtccccatagtcatgtcctcctaccaagacttctactgcaagaaggagcgtcgcttcacctcgggacaatgtcaggtgcgggtgctgcccccagtgcccacggaagggctgacaccagatgacgtcccagctctggctgacagagtccggcactccatgctcactgttttccgggaaatctccactgatggccggggtggtggtgactatctgaagaagcctgggggcggtgggtgaaccctggctctgagctctcctcccatctgtccccatcttcctccccacacctacccacccagtgggccctgaagcagggccaaaccctcttccttgtctcccctctccccacttattctcctctttggaatcttcaacttctgaagtgaatgtggatacagcgccactcctgccccctcttggccccatccatggactcttgcctcggtgcagtctccactcttgacccccacctcctactgtcttgtctgtgggacagttgcctccccctcatctccagtgactcagcctacacaagggaggggaacattccatccccagtggagtctcttcctatgtggtcttctctacccctctaccccacattggccagtggactcatccattctttggaacaaatcccccccactccaaagtccatggattcaatggactcatccatttgtgaggaggacttctcgccctctggctggaagctgatacctgaagcactcccaggctcatcctgggagctttcctcagcaccttcaccttccctcccagtgtagcctcctgtcagtgggggctggacccttctaattcagaggtctcatgcctgcccttgcccagatgcccagggtcgtgcactctctgggataccagttcagtctccacatttctggttttctgtccccatagtacagttcttcagtggacatgaccccacccagccccctgcagccctgctgcaccatctcaccagacacaaggggaagaagcagacatcaggtgctgcactcacttctgccccctggggagttggggaaaggaacgaaccctggctggaggggataggagggcttttaatttatttctttttctgttgaggcttccccctctctgagccagttttcatttcttcctggtggcattagccactccctgcctctcactccagacctgttcccacaactggggaggtaggctgggagcaaaaggagagggtgggacccagttttgcgtggttggtttttattaattatctggataacagcaaaaaaactgaaaataaagagagagagaga

SEQ ID NO: 268679 - DNA, 2103 bp, Artificial Sequence
  derived and/or modified sequence
ctttcctctcccagggcaagtgctgttaggtcacctttactccattccctccttttttcacttggtgaggcctcacacactgtacctgcccacgcaaagtgtcactagaaggaagggaaagggtagtaggattcgtttgcctgtctggaggtaggattggtctttgtagctattccaggtggccagaatggatttgtggccaggggcatggatgctgctgctgctgctcttcctgctgctgctcttcctgctgcccaccctgtggttctgcagccccagtgccaagtacttcttcaagatggccttctacaatggctggatcctcttcctggctgtgctcgccatccctgtgtgtgccgtgcgaggacgcaacgtcgagaacatgaagatcttgcgtctaatgctgctccacatcaaatacctgtacgggatccgagtggaggtgcgaggggctcaccacttccctccctcgcagccctatgttgttgtctccaaccaccagagctctctcgatctgcttgggatgatggaggtactgccaggccgctgtgtgcccattgccaagcgcgagctactgtgggctggctctgccgggctggcctgctggctggcaggagtcatcttcatcgaccggaagcgcacgggggatgccatcagtgtcatgtctgaggtcgcccagaccctgctcacccaggacgtgagggtctgggtgtttcctgagggaacgagaaaccacaatggctccatgctgcccttcaaacgtggcgccttccatcttgcagtgcaggcccaggttcccattgtccccatagtcatgtcctcctaccaagacttctactgcaagaaggagcgtcgcttcacctcgggacaatgtcaggtgcgggtgctgcccccagtgcccacggaagggctgacaccagatgacgtcccagctctggctgacagagtccggcactccatgctcactgttttccgggaaatctccactgatggccggggtggtggtgactatctgaagaagcctgggggcggtgggtgaaccctggctctgagctctcctcccatctgtccccatcttcctccccacacctacccacccagtgggccctgaagcagggccaaaccctcttccttgtctcccctctccccacttattctcctctttggaatcttcaacttctgaagtgaatgtggatacagcgccactcctgccccctcttggccccatccatggactcttgcctcggtgcagtctccactcttgacccccacctcctactgtcttgtctgtgggacagttgcctccccctcatctccagtgactcagcctacacaagggaggggaacattccatccccagtggagtctcttcctatgtggtcttctctacccctctaccccacattggccagtggactcatccattctttggaacaaatcccccccactccaaagtccatggattcaatggactcatccatttgtgaggaggacttctcgccctctggctggaagctgatacctgaagcactcccaggctcatcatgggagctttcctcagcaccttcaccttccctcccagtgtagcctcctgtcagtgggggctggacccttctaattcagaggtctcatgcctgcccttgcccagatgcccagggtcgtgcactctctgggataccagttcagtctccacatttctggttttctgtccccatagtacagttcttcagtggacatgaccccacccagccccctgcagccctgctgcaccatctcaccagacacaaggggaagaagcagacatcaggtgctgcactcacttctgccccctggggagttggggaaaggaacgaaccctggctggaggggataggagggcttttaatttatttctttttctgttgaggcttccccctctctgagccagttttcatttcttcctggtggcattagccactccctgcctctcactccagacctgttcccacaactggggaggtaggctgggagcaaaaggagagggtgggacccagttttgcgtggttggtttttattaattatctggataacagcaaaaaaactgaaaataaagagagagagaga

SEQ ID NO: 268680 - DNA, 2168 bp, Artificial Sequence
  derived and/or modified sequence
tggccgacatcgggaaagacggcgaagagctaggaaaagagggaaaacactagggtcgcagggttcaaaatggctccaacctcctttggtgacgtagagagcagaacttgggtctgcccctcccttttagttaagggagcagaactgggattagcccgacgtttggatagtgggaacatcgatctgcggcgctggtgttaacccaactcattcggctggacgactcagccctccccatattaggtggccagaatggatttgtggccaggggcatggatgctgctgctgctgctcttcctgctgctgctcttcctgctgcccaccctgtggttctgcagccccagtgccaagtacttcttcaagatggccttctacaatggctggatcctcttcctggctgtgctcgccatccctgtgtgtgccgtgcgaggacgcaacgtcgagaacatgaagatcttgcgtctaatgctgctccacatcaaatacctgtacgggatccgagtggaggtgcgaggggctcaccacttccctccctcgcagccctatgttgttgtctccaaccaccagagctctctcgatctgcttgggatgatggaggtactgccaggccgctgtgtgcccattgccaagcgcgagctactgtgggctggctctgccgggctggcctgctggctggcaggagtcatcttcatcgaccggaagcgcacgggggatgccatcagtgtcatgtctgaggtcgcccagaccctgctcacccaggacgtgagggtctgggtgtttcctgagggaacgagaaaccacaatggctccatgctgcccttcaaacgtggcgccttccatcttgcagtgcaggcccaggttcccattgtccccatagtcatgtcctcctaccaagacttctactgcaagaaggagcgtcgcttcacctcgggacaatgtcaggtgcgggtgctgcccccagtgcccacggaagggctgacaccagatgacgtcccagctctggctgacagagtccggcactccatgctcactgttttccgggaaatctccactgatggccggggtggtggtgactatctgaagaagcctgggggcggtgggtgaaccctggctctgagctctcctcccatctgtccccatcttcctccccacacctacccacccagtgggccctgaagcagggccaaaccctcttccttgtctcccctctccccacttattctcctctttggaatcttcaacttctgaagtgaatgtggatacagcgccactcctgccccctcttggccccatccatggactcttgcctcggtgcagtctccactcttgacccccacctcctactgtcttgtctgtgggacagttgcctccccctcatctccagtgactcagcctacacaagggaggggaacattccatccccagtggagtctcttcctatgtggtcttctctacccctctaccccacattggccagtggactcatccattctttggaacaaatcccccccactccaaagtccatggattcaatggactcatccatttgtgaggaggacttctcgccctctggctggaagctgatacctgaagcactcccaggctcatcatgggagctttcctcagcaccttcaccttccctcccagtgtagcctcctgtcagtgggggctggacccttctaattcagaggtctcatgcctgcccttgcccagatgcccagggtcgtgcactctctgggataccagttcagtctccacatttctggttttctgtccccatagtacagttcttcagtggacatgaccccacccagccccctgcagccctgctgcaccatctcaccagacacaaggggaagaagcagacatcaggtgctgcactcacttctgccccctggggagttggggaaaggaacgaaccctggctggaggggataggagggcttttaatttatttctttttctgttgaggcttccccctctctgagccagttttcatttcttcctggtggcattagccactccctgcctctcactccagacctgttcccacaactggggaggtaggctgggagcaaaaggagagggtgggacccagttttgcgtggttggtttttattaattatctggataacagcaaaaaaactgaaaataaagagagagagaga

SEQ ID NO: 268681 - DNA, 2496 bp, Artificial Sequence
  derived and/or modified sequence
ggcagatgaggattcaggaagcttgaggtttaggaaggaagatattgagagggaaaggtggaaatgaaggagagtgaagtgatggaatgatcctagtaaagggataatgggagtggaggaagagaagagggggtggaaaactagatacatggctaccaaattaaggaggcacgcgcattccagaggaatcggcattcttcctcactttttatttttctagaaagcacccctgaagccaaatttccattggaagaaaagatgtacccatattgtatgttgtgagaaggggttgtctcagcttgggcaagtaaggagactgatacgaaggaagtaggaaagaaaaggtacagaggtaaaagagcatggaaaaggaaagggtcagggataaggccaaagagatctcttctctttaaaggccagagaaggcaggtggaggggggagctggactgctgggagatagtgagggacaaagggcaaaggaaaccagaccagaggactggagagtgagatggagtgagatggagtcctggagagaaaaagaagagaggtgaacttaatgcttgtcatatggtggccagaatggatttgtggccaggggcatggatgctgctgctgctgctcttcctgctgctgctcttcctgctgcccaccctgtggttctgcagccccagtgccaagtacttcttcaagatggccttctacaatggctggatcctcttcctggctgtgctcgccatccctgtgtgtgccgtgcgaggacgcaacgtcgagaacatgaagatcttgcgtctaatgctgctccacatcaaatacctgtacgggatccgagtggaggtgcgaggggctcaccacttccctccctcgcagccctatgttgttgtctccaaccaccagagctctctcgatctgcttgggatgatggaggtactgccaggccgctgtgtgcccattgccaagcgcgagctactgtgggctggctctgccgggctggcctgctggctggcaggagtcatcttcatcgaccggaagcgcacgggggatgccatcagtgtcatgtctgaggtcgcccagaccctgctcacccaggacgtgagggtctgggtgtttcctgagggaacgagaaaccacaatggctccatgctgcccttcaaacgtggcgccttccatcttgcagtgcaggcccaggttcccattgtccccatagtcatgtcctcctaccaagacttctactgcaagaaggagcgtcgcttcacctcgggacaatgtcaggtgcgggtgctgcccccagtgcccacggaagggctgacaccagatgacgtcccagctctggctgacagagtccggcactccatgctcactgttttccgggaaatctccactgatggccggggtggtggtgactatctgaagaagcctgggggcggtgggtgaaccctggctctgagctctcctcccatctgtccccatcttcctccccacacctacccacccagtgggccctgaagcagggccaaaccctcttccttgtctcccctctccccacttattctcctctttggaatcttcaacttctgaagtgaatgtggatacagcgccactcctgccccctcttggccccatccatggactcttgcctcggtgcagtctccactcttgacccccacctcctactgtcttgtctgtgggacagttgcctccccctcatctccagtgactcagcctacacaagggaggggaacattccatccccagtggagtctcttcctatgtggtcttctctacccctctaccccacattggccagtggactcatccattctttggaacaaatcccccccactccaaagtccatggattcaatggactcatccatttgtgaggaggacttctcgccctctggctggaagctgatacctgaagcactcccaggctcatcatgggagctttcctcagcaccttcaccttccctcccagtgtagcctcctgtcagtgggggctggacccttctaattcagaggtctcatgcctgcccttgcccagatgcccagggtcgtgcactctctgggataccagttcagtctccacatttctggttttctgtccccatagtacagttcttcagtggacatgaccccacccagccccctgcagccctgctgcaccatctcaccagacacaaggggaagaagcagacatcaggtgctgcactcacttctgccccctggggagttggggaaaggaacgaaccctggctggaggggataggagggcttttaatttatttctttttctgttgaggcttccccctctctgagccagttttcatttcttcctggtggcattagccactccctgcctctcactccagacctgttcccacaactggggaggtaggctgggagcaaaaggagagggtgggacccagttttgcgtggttggtttttattaattatctggataacagcaaaaaaactgaaaataaagagagagagaga

SEQ ID NO: 268682 - DNA, 2496 bp, Artificial Sequence
  derived and/or modified sequence
ggcagatgaggattcaggaagcttgaggtttaggaaggaagatattgagagggaaaggtggaaatgaaggagagtgaagtgatggaatgatcctagtaaagggataatgggagtggaggaagagaagagggggtggaaaactagatacatggctaccaaattaaggaggcacgcgcattccagaggaatcggcattcttcctcactttttatttttctagaaagcacccctgaagccaaatttccattggaagaaaagatgtacccatattgtatgttgtgagaaggggttgtctcagcttgggcaagtaaggagactgatacgaaggaagtaggaaagaaaaggtacagaggtaaaagagcatggaaaaggaaagggtcagggataaggccaaagagatctcttctctttaaaggccagagaaggcaggtggaggggggagctggactgctgggagatagtgagggacaaagggcaaaggaaaccagaccagaggactggagagtgagatggagtgagatggagtcctggagagaaaaagaagagaggtgaacttaatgcttgtcatatggtggccagaatggatttgtggccaggggcatggatgctgctgctgctgctcttcctgctgctgctcttcctgctgcccaccctgtggttctgcagccccagtgccaagtacttcttcaagatggccttctacaatggctggatcctcttcctggctgtgctcgccatccctgtgtgtgccgtgcgaggacgcaacgtcgagaacatgaagatcttgcgtctaatgctgctccacatcaaatacctgtacgggatccgagtggaggtgcgaggggctcaccacttccctccctcgcagccctatgttgttgtctccaaccaccagagctctctcgatctgcttgggatgatggaggtactgccaggccgctgtgtgcccattgccaagcgcgagctactgtgggctggctctgccgggctggcctgctggctggcaggagtcatcttcatcgaccggaagcgcacgggggatgccatcagtgtcatgtctgaggtcgcccagaccctgctcacccaggacgtgagggtctgggtgtttcctgagggaacgagaaaccacaatggctccatgctgcccttcaaacgtggcgccttccatcttgcagtgcaggcccaggttcccattgtccccatagtcatgtcctcctaccaagacttctactgcaagaaggagcgtcgcttcacctcgggacaatgtcaggtgcgggtgctgcccccagtgcccacggaagggctgacaccagatgacgtcccagctctggctgacagagtccggcactccatgctcactgttttccgggaaatctccactgatggccggggtggtggtgactatctgaagaagcctgggggcggtgggtgaaccctggctctgagctctcctcccatctgtccccatcttcctccccacacctacccacccagtgggccctgaagcagggccaaaccctcttccttgtctcccctctccccacttattctcctctttggaatcttcaacttctgaagtgaatgtggatacagcgccactcctgccccctcttggccccatccatggactcttgcctcggtgcagtctccactcttgacccccacctcctactgtcttgtctgtgggacagttgcctccccctcatctccagtgactcagcctacacaagggaggggaacattccatccccagtggagtctcttcctatgtggtcttctctacccctctaccccacattggccagtggactcatccattctttggaacaaatcccccccactccaaagtccatggattcaatggactcatccatttgtgaggaggacttctcgccctctggctggaagctgatacctgaagcactcccaggctcatcctgggagctttcctcagcaccttcaccttccctcccagtgtagcctcctgtcagtgggggctggacccttctaattcagaggtctcatgcctgcccttgcccagatgcccagggtcgtgcactctctgggataccagttcagtctccacatttctggttttctgtccccatagtacagttcttcagtggacatgaccccacccagccccctgcagccctgctgcaccatctcaccagacacaaggggaagaagcagacatcaggtgctgcactcacttctgccccctggggagttggggaaaggaacgaaccctggctggaggggataggagggcttttaatttatttctttttctgttgaggcttccccctctctgagccagttttcatttcttcctggtggcattagccactccctgcctctcactccagacctgttcccacaactggggaggtaggctgggagcaaaaggagagggtgggacccagttttgcgtggttggtttttattaattatctggataacagcaaaaaaactgaaaataaagagagagagaga

SEQ ID NO: 268683 - DNA, 2103 bp, Artificial Sequence
  derived and/or modified sequence
ctttcctctcccagggcaagtgctgttaggtcacctttactccattccctccttttttcacttggtgaggcctcacacactgtacctgcccacgcaaagtgtcactagaaggaagggaaagggtagtaggattcgtttgcctgtctggaggtaggattggtctttgtagctattccaggtggccagaatggatttgtggccaggggcatggatgctgctgctgctgctcttcctgctgctgctcttcctgctgcccaccctgtggttctgcagccccagtgccaagtacttcttcaagatggccttctacaatggctggatcctcttcctggctgtgctcgccatccctgtgtgtgccgtgcgaggacgcaacgtcgagaacatgaagatcttgcgtctaatgctgctccacatcaaatacctgtacgggatccgagtggaggtgcgaggggctcaccacttccctccctcgcagccctatgttgttgtctccaaccaccagagctctctcgatctgcttgggatgatggaggtactgccaggccgctgtgtgcccattgccaagcgcgagctactgtgggctggctctgccgggctggcctgctggctggcaggagtcatcttcatcgaccggaagcgcacgggggatgccatcagtgtcatgtctgaggtcgcccagaccctgctcacccaggacgtgagggtctgggtgtttcctgagggaacgagaaaccacaatggctccatgctgcccttcaaacgtggcgccttccatcttgcagtgcaggcccaggttcccattgtccccatagtcatgtcctcctaccaagacttctactgcaagaaggagcgtcgcttcacctcgggacaatgtcaggtgcgggtgctgcccccagtgcccacggaagggctgacaccagatgacgtcccagctctggctgacagagtccggcactccatgctcactgttttccgggaaatctccactgatggccggggtggtggtgactatctgaagaagcctgggggcggtgggtgaaccctggctctgagctctcctcccatctgtccccatcttcctccccacacctacccacccagtgggccctgaagcagggccaaaccctcttccttgtctcccctctccccacttattctcctctttggaatcttcaacttctgaagtgaatgtggatacagcgccactcctgccccctcttggccccatccatggactcttgcctcggtgcagtctccactcttgacccccacctcctactgtcttgtctgtgggacagttgcctccccctcatctccagtgactcagcctacacaagggaggggaacattccatccccagtggagtctcttcctatgtggtcttctctacccctctaccccacattggccagtggactcatccattctttggaacaaatcccccccactccaaagtccatggattcaatggactcatccatttgtgaggaggacttctcgccctctggctggaagctgatacctgaagcactcccaggctcatcctgggagctttcctcagcaccttcaccttccctcccagtgtagcctcctgtcagtgggggctggacccttctaattcagaggtctcatgcctgcccttgcccagatgcccagggtcgtgcactctctgggataccagttcagtctccacatttctggttttctgtccccatagtacagttcttcagtggacatgaccccacccagccccctgcagccctgctgcaccatctcaccagacacaaggggaagaagcagacatcaggtgctgcactcacttctgccccctggggagttggggaaaggaacgaaccctggctggaggggataggagggcttttaatttatttctttttctgttgaggcttccccctctctgagccagttttcatttcttcctggtggcattagccactccctgcctctcactccagacctgttcccacaactggggaggtaggctgggagcaaaaggagagggtgggacccagttttgcgtggttggtttttattaattatctggataacagcaaaaaaactgaaaataaagagagagagaga

SEQ ID NO: 268684 - DNA, 2168 bp, Artificial Sequence
  derived and/or modified sequence
tggccgacatcgggaaagacggcgaagagctaggaaaagagggaaaacactagggtcgcagggttcaaaatggctccaacctcctttggtgacgtagagagcagaacttgggtctgcccctcccttttagttaagggagcagaactgggattagcccgacgtttggatagtgggaacatcgatctgcggcgctggtgttaacccaactcattcggctggacgactcagccctccccatattaggtggccagaatggatttgtggccaggggcatggatgctgctgctgctgctcttcctgctgctgctcttcctgctgcccaccctgtggttctgcagccccagtgccaagtacttcttcaagatggccttctacaatggctggatcctcttcctggctgtgctcgccatccctgtgtgtgccgtgcgaggacgcaacgtcgagaacatgaagatcttgcgtctaatgctgctccacatcaaatacctgtacgggatccgagtggaggtgcgaggggctcaccacttccctccctcgcagccctatgttgttgtctccaaccaccagagctctctcgatctgcttgggatgatggaggtactgccaggccgctgtgtgcccattgccaagcgcgagctactgtgggctggctctgccgggctggcctgctggctggcaggagtcatcttcatcgaccggaagcgcacgggggatgccatcagtgtcatgtctgaggtcgcccagaccctgctcacccaggacgtgagggtctgggtgtttcctgagggaacgagaaaccacaatggctccatgctgcccttcaaacgtggcgccttccatcttgcagtgcaggcccaggttcccattgtccccatagtcatgtcctcctaccaagacttctactgcaagaaggagcgtcgcttcacctcgggacaatgtcaggtgcgggtgctgcccccagtgcccacggaagggctgacaccagatgacgtcccagctctggctgacagagtccggcactccatgctcactgttttccgggaaatctccactgatggccggggtggtggtgactatctgaagaagcctgggggcggtgggtgaaccctggctctgagctctcctcccatctgtccccatcttcctccccacacctacccacccagtgggccctgaagcagggccaaaccctcttccttgtctcccctctccccacttattctcctctttggaatcttcaacttctgaagtgaatgtggatacagcgccactcctgccccctcttggccccatccatggactcttgcctcggtgcagtctccactcttgacccccacctcctactgtcttgtctgtgggacagttgcctccccctcatctccagtgactcagcctacacaagggaggggaacattccatccccagtggagtctcttcctatgtggtcttctctacccctctaccccacattggccagtggactcatccattctttggaacaaatcccccccactccaaagtccatggattcaatggactcatccatttgtgaggaggacttctcgccctctggctggaagctgatacctgaagcactcccaggctcatcctgggagctttcctcagcaccttcaccttccctcccagtgtagcctcctgtcagtgggggctggacccttctaattcagaggtctcatgcctgcccttgcccagatgcccagggtcgtgcactctctgggataccagttcagtctccacatttctggttttctgtccccatagtacagttcttcagtggacatgaccccacccagccccctgcagccctgctgcaccatctcaccagacacaaggggaagaagcagacatcaggtgctgcactcacttctgccccctggggagttggggaaaggaacgaaccctggctggaggggataggagggcttttaatttatttctttttctgttgaggcttccccctctctgagccagttttcatttcttcctggtggcattagccactccctgcctctcactccagacctgttcccacaactggggaggtaggctgggagcaaaaggagagggtgggacccagttttgcgtggttggtttttattaattatctggataacagcaaaaaaactgaaaataaagagagagagaga

SEQ ID NO: 268685 - DNA, 2017 bp, Artificial Sequence
  derived and/or modified sequence
gaaatagggtcttcttcccaggttggaccccggggagtttgggcttttcctacaatcactgaccctcactgtgactaaaggagcagaattaggtggccagaatggatttgtggccaggggcatggatgctgctgctgctgctcttcctgctgctgctcttcctgctgcccaccctgtggttctgcagccccagtgccaagtacttcttcaagatggccttctacaatggctggatcctcttcctggctgtgctcgccatccctgtgtgtgccgtgcgaggacgcaacgtcgagaacatgaagatcttgcgtctaatgctgctccacatcaaatacctgtacgggatccgagtggaggtgcgaggggctcaccacttccctccctcgcagccctatgttgttgtctccaaccaccagagctctctcgatctgcttgggatgatggaggtactgccaggccgctgtgtgcccattgccaagcgcgagctactgtgggctggctctgccgggctggcctgctggctggcaggagtcatcttcatcgaccggaagcgcacgggggatgccatcagtgtcatgtctgaggtcgcccagaccctgctcacccaggacgtgagggtctgggtgtttcctgagggaacgagaaaccacaatggctccatgctgcccttcaaacgtggcgccttccatcttgcagtgcaggcccaggttcccattgtccccatagtcatgtcctcctaccaagacttctactgcaagaaggagcgtcgcttcacctcgggacaatgtcaggtgcgggtgctgcccccagtgcccacggaagggctgacaccagatgacgtcccagctctggctgacagagtccggcactccatgctcactgttttccgggaaatctccactgatggccggggtggtggtgactatctgaagaagcctgggggcggtgggtgaaccctggctctgagctctcctcccatctgtccccatcttcctccccacacctacccacccagtgggccctgaagcagggccaaaccctcttccttgtctcccctctccccacttattctcctctttggaatcttcaacttctgaagtgaatgtggatacagcgccactcctgccccctcttggccccatccatggactcttgcctcggtgcagtctccactcttgacccccacctcctactgtcttgtctgtgggacagttgcctccccctcatctccagtgactcagcctacacaagggaggggaacattccatccccagtggagtctcttcctatgtggtcttctctacccctctaccccacattggccagtggactcatccattctttggaacaaatcccccccactccaaagtccatggattcaatggactcatccatttgtgaggaggacttctcgccctctggctggaagctgatacctgaagcactcccaggctcatcctgggagctttcctcagcaccttcaccttccctcccagtgtagcctcctgtcagtgggggctggacccttctaattcagaggtctcatgcctgcccttgcccagatgcccagggtcgtgcactctctgggataccagttcagtctccacatttctggttttctgtccccatagtacagttcttcagtggacatgaccccacccagccccctgcagccctgctgcaccatctcaccagacacaaggggaagaagcagacatcaggtgctgcactcacttctgccccctggggagttggggaaaggaacgaaccctggctggaggggataggagggcttttaatttatttctttttctgttgaggcttccccctctctgagccagttttcatttcttcctggtggcattagccactccctgcctctcactccagacctgttcccacaactggggaggtaggctgggagcaaaaggagagggtgggacccagttttgcgtggttggtttttattaattatctggataacagcaaaaaaactgaaaataaagagagagagaga

SEQ ID NO: 268686 - DNA, 2234 bp, Artificial Sequence
  derived and/or modified sequence
ggaaaccagcaggcgttggggaggggtggcgggggaatagcggcggcagcagccccagccctcagagagacagcagaaagggagggagggagggtgctggggggacagccccccaccattcctaccgctatgggcccaacctcccactcccacctcccctccatcggccggggctaggacacccccaaatcccgtcgcccccttggcaccgacaccccgacagagacagagacacagccatccgccaccaccgctgccgcagcctggctggggagggggccagccccccaggccccctacccctctgaggtggccagaatggatttgtggccaggggcatggatgctgctgctgctgctcttcctgctgctgctcttcctgctgcccaccctgtggttctgcagccccagtgccaagtacttcttcaagatggccttctacaatggctggatcctcttcctggctgtgctcgccatccctgtgtgtgccgtgcgaggacgcaacgtcgagaacatgaagatcttgcgtctaatgctgctccacatcaaatacctgtacgggatccgagtggaggtgcgaggggctcaccacttccctccctcgcagccctatgttgttgtctccaaccaccagagctctctcgatctgcttgggatgatggaggtactgccaggccgctgtgtgcccattgccaagcgcgagctactgtgggctggctctgccgggctggcctgctggctggcaggagtcatcttcatcgaccggaagcgcacgggggatgccatcagtgtcatgtctgaggtcgcccagaccctgctcacccaggacgtgagggtctgggtgtttcctgagggaacgagaaaccacaatggctccatgctgcccttcaaacgtggcgccttccatcttgcagtgcaggcccaggttcccattgtccccatagtcatgtcctcctaccaagacttctactgcaagaaggagcgtcgcttcacctcgggacaatgtcaggtgcgggtgctgcccccagtgcccacggaagggctgacaccagatgacgtcccagctctggctgacagagtccggcactccatgctcactgttttccgggaaatctccactgatggccggggtggtggtgactatctgaagaagcctgggggcggtgggtgaaccctggctctgagctctcctcccatctgtccccatcttcctccccacacctacccacccagtgggccctgaagcagggccaaaccctcttccttgtctcccctctccccacttattctcctctttggaatcttcaacttctgaagtgaatgtggatacagcgccactcctgccccctcttggccccatccatggactcttgcctcggtgcagtctccactcttgacccccacctcctactgtcttgtctgtgggacagttgcctccccctcatctccagtgactcagcctacacaagggaggggaacattccatccccagtggagtctcttcctatgtggtcttctctacccctctaccccacattggccagtggactcatccattctttggaacaaatcccccccactccaaagtccatggattcaatggactcatccatttgtgaggaggacttctcgccctctggctggaagctgatacctgaagcactcccaggctcatcctgggagctttcctcagcaccttcaccttccctcccagtgtagcctcctgtcagtgggggctggacccttctaattcagaggtctcatgcctgcccttgcccagatgcccagggtcgtgcactctctgggataccagttcagtctccacatttctggttttctgtccccatagtacagttcttcagtggacatgaccccacccagccccctgcagccctgctgcaccatctcaccagacacaaggggaagaagcagacatcaggtgctgcactcacttctgccccctggggagttggggaaaggaacgaaccctggctggaggggataggagggcttttaatttatttctttttctgttgaggcttccccctctctgagccagttttcatttcttcctggtggcattagccactccctgcctctcactccagacctgttcccacaactggggaggtaggctgggagcaaaaggagagggtgggacccagttttgcgtggttggtttttattaattatctggataacagcaaaaaaactgaaaataaagagagagagaga

SEQ ID NO: 268687 - DNA, 2103 bp, Artificial Sequence
  derived and/or modified sequence
ctttcctctcccagggcaagtgctgttaggtcacctttactccattccctccttttttcacttggtgaggcctcacacactgtacctgcccacgcaaagtgtcactagaaggaagggaaagggtagtaggattcgtttgcctgtctggaggtaggattggtctttgtagctattccaggtggccagaatggatttgtggccaggggcatggatgctgctgctgctgctcttcctgctgctgctcttcctgctgcccaccctgtggttctgcagccccagtgccaagtacttcttcaagatggccttctacaatggctggatcctcttcctggctgtgctcgccatccctgtgtgtgccgtgcgaggacgcaacgtcgagaacatgaagatcttgcgtctaatgctgctccacatcaaatacctgtacgggatccgagtggaggtgcgaggggctcaccacttccctccctcgcagccctatgttgttgtctccaaccaccagagctctctcgatctgcttgggatgatggaggtactgccaggccgctgtgtgcccattgccaagcgcgagctactgtgggctggctctgccgggctggcctgctggctggcaggagtcatcttcatcgaccggaagcgcacgggggatgccatcagtgtcatgtctgaggtcgcccagaccctgctcacccaggacgtgagggtctgggtgtttcctgagggaacgagaaaccacaatggctccatgctgcccttcaaacgtggcgccttccatcttgcagtgcaggcccaggttcccattgtccccatagtcatgtcctcctaccaagacttctactgcaagaaggagcgtcgcttcacctcgggacaatgtcaggtgcgggtgctgcccccagtgcccacggaagggctgacaccagatgacgtcccagctctggctgacagagtccggcactccatgctcactgttttccgggaaatctccactgatggccggggtggtggtgactatctgaagaagcctgggggcggtgggtgaaccctggctctgagctctcctcccatctgtccccatcttcctccccacacctacccacccagtgggccctgaagcagggccaaaccctcttccttgtctcccctctccccacttattctcctatttggaatcttcaacttctgaagtgaatgtggatacagcgccactcctgccccctcttggccccatccatggactcttgcctcggtgcagtctccactcttgacccccacctcctactgtcttgtctgtgggacagttgcctccccctcatctccagtgactcagcctacacaagggaggggaacattccatccccagtggagtctcttcctatgtggtcttctctacccctctaccccacattggccagtggactcatccattctttggaacaaatcccccccactccaaagtccatggattcaatggactcatccatttgtgaggaggacttctcgccctctggctggaagctgatacctgaagcactcccaggctcatcctgggagctttcctcagcaccttcaccttccctcccagtgtagcctcctgtcagtgggggctggacccttctaattcagaggtctcatgcctgcccttgcccagatgcccagggtcgtgcactctctgggataccagttcagtctccacatttctggttttctgtccccatagtacagttcttcagtggacatgaccccacccagccccctgcagccctgctgcaccatctcaccagacacaaggggaagaagcagacatcaggtgctgcactcacttctgccccctggggagttggggaaaggaacgaaccctggctggaggggataggagggcttttaatttatttctttttctgttgaggcttccccctctctgagccagttttcatttcttcctggtggcattagccactccctgcctctcactccagacctgttcccacaactggggaggtaggctgggagcaaaaggagagggtgggacccagttttgcgtggttggtttttattaattatctggataacagcaaaaaaactgaaaataaagagagagagaga

SEQ ID NO: 268688 - DNA, 2234 bp, Artificial Sequence
  derived and/or modified sequence
ggaaaccagcaggcgttggggaggggtggcgggggaatagcggcggcagcagccccagccctcagagagacagcagaaagggagggagggagggtgctggggggacagccccccaccattcctaccgctatgggcccaacctcccactcccacctcccctccatcggccggggctaggacacccccaaatcccgtcgcccccttggcaccgacaccccgacagagacagagacacagccatccgccaccaccgctgccgcagcctggctggggagggggccagccccccaggccccctacccctctgaggtggccagaatggatttgtggccaggggcatggatgctgctgctgctgctcttcctgctgctgctcttcctgctgcccaccctgtggttctgcagccccagtgccaagtacttcttcaagatggccttctacaatggctggatcctcttcctggctgtgctcgccatccctgtgtgtgccgtgcgaggacgcaacgtcgagaacatgaagatcttgcgtctaatgctgctccacatcaaatacctgtacgggatccgagtggaggtgcgaggggctcaccacttccctccctcgcagccctatgttgttgtctccaaccaccagagctctctcgatctgcttgggatgatggaggtactgccaggccgctgtgtgcccattgccaagcgcgagctactgtgggctggctctgccgggctggcctgctggctggcaggagtcatcttcatcgaccggaagcgcacgggggatgccatcagtgtcatgtctgaggtcgcccagaccctgctcacccaggacgtgagggtctgggtgtttcctgagggaacgagaaaccacaatggctccatgctgcccttcaaacgtggcgccttccatcttgcagtgcaggcccaggttcccattgtccccatagtcatgtcctcctaccaagacttctactgcaagaaggagcgtcgcttcacctcgggacaatgtcaggtgcgggtgctgcccccagtgcccacggaagggctgacaccagatgacgtcccagctctggctgacagagtccggcactccatgctcactgttttccgggaaatctccactgatggccggggtggtggtgactatctgaagaagcctgggggcggtgggtgaaccctggctctgagctctcctcccatctgtccccatcttcctccccacacctacccacccagtgggccctgaagcagggccaaaccctcttccttgtctcccctctccccacttattctcctatttggaatcttcaacttctgaagtgaatgtggatacagcgccactcctgccccctcttggccccatccatggactcttgcctcggtgcagtctccactcttgacccccacctcctactgtcttgtctgtgggacagttgcctccccctcatctccagtgactcagcctacacaagggaggggaacattccatccccagtggagtctcttcctatgtggtcttctctacccctctaccccacattggccagtggactcatccattctttggaacaaatcccccccactccaaagtccatggattcaatggactcatccatttgtgaggaggacttctcgccctctggctggaagctgatacctgaagcactcccaggctcatcctgggagctttcctcagcaccttcaccttccctcccagtgtagcctcctgtcagtgggggctggacccttctaattcagaggtctcatgcctgcccttgcccagatgcccagggtcgtgcactctctgggataccagttcagtctccacatttctggttttctgtccccatagtacagttcttcagtggacatgaccccacccagccccctgcagccctgctgcaccatctcaccagacacaaggggaagaagcagacatcaggtgctgcactcacttctgccccctggggagttggggaaaggaacgaaccctggctggaggggataggagggcttttaatttatttctttttctgttgaggcttccccctctctgagccagttttcatttcttcctggtggcattagccactccctgcctctcactccagacctgttcccacaactggggaggtaggctgggagcaaaaggagagggtgggacccagttttgcgtggttggtttttattaattatctggataacagcaaaaaaactgaaaataaagagagagagaga

SEQ ID NO: 268689 - DNA, 2496 bp, Artificial Sequence
  derived and/or modified sequence
ggcagatgaggattcaggaagcttgaggtttaggaaggaagatattgagagggaaaggtggaaatgaaggagagtgaagtgatggaatgatcctagtaaagggataatgggagtggaggaagagaagagggggtggaaaactagatacatggctaccaaattaaggaggcacgcgcattccagaggaatcggcattcttcctcactttttatttttctagaaagcacccctgaagccaaatttccattggaagaaaagatgtacccatattgtatgttgtgagaaggggttgtctcagcttgggcaagtaaggagactgatacgaaggaagtaggaaagaaaaggtacagaggtaaaagagcatggaaaaggaaagggtcagggataaggccaaagagatctcttctctttaaaggccagagaaggcaggtggaggggggagctggactgctgggagatagtgagggacaaagggcaaaggaaaccagaccagaggactggagagtgagatggagtgagatggagtcctggagagaaaaagaagagaggtgaacttaatgcttgtcatatggtggccagaatggatttgtggccaggggcatggatgctgctgctgctgctcttcctgctgctgctcttcctgctgcccaccctgtggttctgcagccccagtgccaagtacttcttcaagatggccttctacaatggctggatcctcttcctggctgtgctcgccatccctgtgtgtgccgtgcgaggacgcaacgtcgagaacatgaagatcttgcgtctaatgctgctccacatcaaatacctgtacgggatccgagtggaggtgcgaggggctcaccacttccctccctcgcagccctatgttgttgtctccaaccaccagagctctctcgatctgcttgggatgatggaggtactgccaggccgctgtgtgcccattgccaagcgcgagctactgtgggctggctctgccgggctggcctgctggctggcaggagtcatcttcatcgaccggaagcgcacgggggatgccatcagtgtcatgtctgaggtcgcccagaccctgctcacccaggacgtgagggtctgggtgtttcctgagggaacgagaaaccacaatggctccatgctgcccttcaaacgtggcgccttccatcttgcagtgcaggcccaggttcccattgtccccatagtcatgtcctcctaccaagacttctactgcaagaaggagcgtcgcttcacctcgggacaatgtcaggtgcgggtgctgcccccagtgcccacggaagggctgacaccagatgacgtcccagctctggctgacagagtccggcactccatgctcactgttttccgggaaatctccactgatggccggggtggtggtgactatctgaagaagcctgggggcggtgggtgaaccctggctctgagctctcctcccatctgtccccatcttcctccccacacctacccacccagtgggccctgaagcagggccaaaccctcttccttgtctcccctctccccacttattctcctctttggaatcttcaacttctgaagtgaatgtggatacagcgccactcctgccccctcttggccccatccatggactcttgcctcggtgcagtttccactcttgacccccacctcctactgtcttgtctgtgggacagttgcctccccctcatctccagtgactcagcctacacaagggaggggaacattccatccccagtggagtctcttcctatgtggtcttctctacccctctaccccacattggccagtggactcatccattctttggaacaaatcccccccactccaaagtccatggattcaatggactcatccatttgtgaggaggacttctcgccctctggctggaagctgatacctgaagcactcccaggctcatcctgggagctttcctcagcaccttcaccttccctcccagtgtagcctcctgtcagtgggggctggacccttctaattcagaggtctcatgcctgcccttgcccagatgcccagggtcgtgcactctctgggataccagttcagtctccacatttctggttttctgtccccatagtacagttcttcagtggacatgaccccacccagccccctgcagccctgctgcaccatctcaccagacacaaggggaagaagcagacatcaggtgctgcactcacttctgccccctggggagttggggaaaggaacgaaccctggctggaggggataggagggcttttaatttatttctttttctgttgaggcttccccctctctgagccagttttcatttcttcctggtggcattagccactccctgcctctcactccagacctgttcccacaactggggaggtaggctgggagcaaaaggagagggtgggacccagttttgcgtggttggtttttattaattatctggataacagcaaaaaaactgaaaataaagagagagagaga

SEQ ID NO: 268690 - DNA, 2234 bp, Artificial Sequence
  derived and/or modified sequence
ggaaaccagcaggcgttggggaggggtggcgggggaatagcggcggcagcagccccagccctcagagagacagcagaaagggagggagggagggtgctggggggacagccccccaccattcctaccgctatgggcccaacctcccactcccacctcccctccatcggccggggctaggacacccccaaatcccgtcgcccccttggcaccgacaccccgacagagacagagacacagccatccgccaccaccgctgccgcagcctggctggggagggggccagccccccaggccccctacccctctgaggtggccagaatggatttgtggccaggggcatggatgctgctgctgctgctcttcctgctgctgctcttcctgctgcccaccctgtggttctgcagccccagtgccaagtacttcttcaagatggccttctacaatggctggatcctcttcctggctgtgctcgccatccctgtgtgtgccgtgcgaggacgcaacgtcgagaacatgaagatcttgcgtctaatgctgctccacatcaaatacctgtacgggatccgagtggaggtgcgaggggctcaccacttccctccctcgcagccctatgttgttgtctccaaccaccagagctctctcgatctgcttgggatgatggaggtactgccaggccgctgtgtgcccattgccaagcgcgagctactgtgggctggctctgccgggctggcctgctggctggcaggagtcatcttcatcgaccggaagcgcacgggggatgccatcagtgtcatgtctgaggtcgcccagaccctgctcacccaggacgtgagggtctgggtgtttcctgagggaacgagaaaccacaatggctccatgctgcccttcaaacgtggcgccttccatcttgcagtgcaggcccaggttcccattgtccccatagtcatgtcctcctaccaagacttctactgcaagaaggagcgtcgcttcacctcgggacaatgtcaggtgcgggtgctgcccccagtgcccacggaagggctgacaccagatgacgtcccagctctggctgacagagtccggcactccatgctcactgttttccgggaaatctccactgatggccggggtggtggtgactatctgaagaagcctgggggcggtgggtgaaccctggctctgagctctcctcccatctgtccccatcttcctccccacacctacccacccagtgggccctgaagcagggccaaaccctcttccttgtctcccctctccccacttattctcctctttggaatcttcaacttctgaagtgaatgtggatacagcgccactcctgccccctcttggccccatccatggactcttgcctcggtgcagtttccactcttgacccccacctcctactgtcttgtctgtgggacagttgcctccccctcatctccagtgactcagcctacacaagggaggggaacattccatccccagtggagtctcttcctatgtggtcttctctacccctctaccccacattggccagtggactcatccattctttggaacaaatcccccccactccaaagtccatggattcaatggactcatccatttgtgaggaggacttctcgccctctggctggaagctgatacctgaagcactcccaggctcatcctgggagctttcctcagcaccttcaccttccctcccagtgtagcctcctgtcagtgggggctggacccttctaattcagaggtctcatgcctgcccttgcccagatgcccagggtcgtgcactctctgggataccagttcagtctccacatttctggttttctgtccccatagtacagttcttcagtggacatgaccccacccagccccctgcagccctgctgcaccatctcaccagacacaaggggaagaagcagacatcaggtgctgcactcacttctgccccctggggagttggggaaaggaacgaaccctggctggaggggataggagggcttttaatttatttctttttctgttgaggcttccccctctctgagccagttttcatttcttcctggtggcattagccactccctgcctctcactccagacctgttcccacaactggggaggtaggctgggagcaaaaggagagggtgggacccagttttgcgtggttggtttttattaattatctggataacagcaaaaaaactgaaaataaagagagagagaga

SEQ ID NO: 268691 - DNA, 2021 bp, Artificial Sequence
  derived and/or modified sequence
tcctcttttagagaatgtccggattgctattggactttggagcgtatggctccaaatcaactcattggctaaaacttgacggaaaatggtggttaggtggccagaatggatttgtggccaggggcatggatgctgctgctgctgctcttcctgctgctgctcttcctgctgcccaccctgtggttctgcagccccagtgccaagtacttcttcaagatggccttctacaatggctggatcctcttcctggctgtgctcgccatccctgtgtgtgccgtgcgaggacgcaacgtcgagaacatgaagatcttgcgtctaatgctgctccacatcaaatacctgtacgggatccgagtggaggtgcgaggggctcaccacttccctccctcgcagccctatgttgttgtctccaaccaccagagctctctcgatctgcttgggatgatggaggtactgccaggccgctgtgtgcccattgccaagcgcgagctactgtgggctggctctgccgggctggcctgctggctggcaggagtcatcttcatcgaccggaagcgcacgggggatgccatcagtgtcatgtctgaggtcgcccagaccctgctcacccaggacgtgagggtctgggtgtttcctgagggaacgagaaaccacaatggctccatgctgcccttcaaacgtggcgccttccatcttgcagtgcaggcccaggttcccattgtccccatagtcatgtcctcctaccaagacttctactgcaagaaggagcgtcgcttcacctcgggacaatgtcaggtgcgggtgctgcccccagtgcccacggaagggctgacaccagatgacgtcccagctctggctgacagagtccggcactccatgctcactgttttccgggaaatctccactgatggccggggtggtggtgactatctgaagaagcctgggggcggtgggtgaaccctggctctgagctctcctcccatctgtccccatcttcctccccacacctacccacccagtgggccctgaagcagggccaaaccctcttccttgtctcccctctccccacttattctcctctttggaatcttcaacttctgaagtgaatgtggatacagcgccactcctgccccctcttggccccatccatggactcttgcctcggtgcagtttccactcttgacccccacctcctactgtcttgtctgtgggacagttgcctccccctcatctccagtgactcagcctacacaagggaggggaacattccatccccagtggagtctcttcctatgtggtcttctctacccctctaccccacattggccagtggactcatccattctttggaacaaatcccccccactccaaagtccatggattcaatggactcatccatttgtgaggaggacttctcgccctctggctggaagctgatacctgaagcactcccaggctcatcctgggagctttcctcagcaccttcaccttccctcccagtgtagcctcctgtcagtgggggctggacccttctaattcagaggtctcatgcctgcccttgcccagatgcccagggtcgtgcactctctgggataccagttcagtctccacatttctggttttctgtccccatagtacagttcttcagtggacatgaccccacccagccccctgcagccctgctgcaccatctcaccagacacaaggggaagaagcagacatcaggtgctgcactcacttctgccccctggggagttggggaaaggaacgaaccctggctggaggggataggagggcttttaatttatttctttttctgttgaggcttccccctctctgagccagttttcatttcttcctggtggcattagccactccctgcctctcactccagacctgttcccacaactggggaggtaggctgggagcaaaaggagagggtgggacccagttttgcgtggttggtttttattaattatctggataacagcaaaaaaactgaaaataaagagagagagaga

SEQ ID NO: 268692 - DNA, 2103 bp, Artificial Sequence
  derived and/or modified sequence
ctttcctctcccagggcaagtgctgttaggtcacctttactccattccctccttttttcacttggtgaggcctcacacactgtacctgcccacgcaaagtgtcactagaaggaagggaaagggtagtaggattcgtttgcctgtctggaggtaggattggtctttgtagctattccaggtggccagaatggatttgtggccaggggcatggatgctgctgctgctgctcttcctgctgctgctcttcctgctgcccaccctgtggttctgcagccccagtgccaagtacttcttcaagatggccttctacaatggctggatcctcttcctggctgtgctcgccatccctgtgtgtgccgtgcgaggacgcaacgtcgagaacatgaagatcttgcgtctaatgctgctccacatcaaatacctgtacgggatccgagtggaggtgcgaggggctcaccacttccctccctcgcagccctatgttgttgtctccaaccaccagagctctctcgatctgcttgggatgatggaggtactgccaggccgctgtgtgcccattgccaagcgcgagctactgtgggctggctctgccgggctggcctgctggctggcaggagtcatcttcatcgaccggaagcgcacgggggatgccatcagtgtcatgtctgaggtcgcccagaccctgctcacccaggacgtgagggtctgggtgtttcctgagggaacgagaaaccacaatggctccatgctgcccttcaaacgtggcgccttccatcttgcagtgcaggcccaggttcccattgtccccatagtcatgtcctcctaccaagacttctactgcaagaaggagcgtcgcttcacctcgggacaatgtcaggtgcgggtgctgcccccagtgcccacggaagggctgacaccagatgacgtcccagctctggctgacagagtccggcactccatgctcactgttttccgggaaatctccactgatggccggggtggtggtgactatctgaagaagcctgggggcggtgggtgaaccctggctctgagctctcctcccatctgtccccatcttcctccccacacctacccacccagtgggccctgaagcagggccaaaccctcttccttgtctcccctctccccacttattctcctctttggaatcttcaacttctgaagtgaatgtggatacagcgccactcctgccccctcttggccccatccatggactcttgcctcggtgcagtttccactcttgacccccacctcctactgtcttgtctgtgggacagttgcctccccctcatctccagtgactcagcctacacaagggaggggaacattccatccccagtggagtctcttcctatgtggtcttctctacccctctaccccacattggccagtggactcatccattctttggaacaaatcccccccactccaaagtccatggattcaatggactcatccatttgtgaggaggacttctcgccctctggctggaagctgatacctgaagcactcccaggctcatcctgggagctttcctcagcaccttcaccttccctcccagtgtagcctcctgtcagtgggggctggacccttctaattcagaggtctcatgcctgcccttgcccagatgcccagggtcgtgcactctctgggataccagttcagtctccacatttctggttttctgtccccatagtacagttcttcagtggacatgaccccacccagccccctgcagccctgctgcaccatctcaccagacacaaggggaagaagcagacatcaggtgctgcactcacttctgccccctggggagttggggaaaggaacgaaccctggctggaggggataggagggcttttaatttatttctttttctgttgaggcttccccctctctgagccagttttcatttcttcctggtggcattagccactccctgcctctcactccagacctgttcccacaactggggaggtaggctgggagcaaaaggagagggtgggacccagttttgcgtggttggtttttattaattatctggataacagcaaaaaaactgaaaataaagagagagagaga

SEQ ID NO: 268693 - DNA, 2017 bp, Artificial Sequence
  derived and/or modified sequence
gaaatagggtcttcttcccaggttggaccccggggagtttgggcttttcctacaatcactgaccctcactgtgactaaaggagcagaattaggtggccagaatggatttgtggccaggggcatggatgctgctgctgctgctcttcctgctgctgctcttcctgctgcccaccctgtggttctgcagccccagtgccaagtacttcttcaagatggccttctacaatggctggatcctcttcctggctgtgctcgccatccctgtgtgtgccgtgcgaggacgcaacgtcgagaacatgaagatcttgcgtctaatgctgctccacatcaaatacctgtacgggatccgagtggaggtgcgaggggctcaccacttccctccctcgcagccctatgttgttgtctccaaccaccagagctctctcgatctgcttgggatgatggaggtactgccaggccgctgtgtgcccattgccaagcgcgagctactgtgggctggctctgccgggctggcctgctggctggcaggagtcatcttcatcgaccggaagcgcacgggggatgccatcagtgtcatgtctgaggtcgcccagaccctgctcacccaggacgtgagggtctgggtgtttcctgagggaacgagaaaccacaatggctccatgctgcccttcaaacgtggcgccttccatcttgcagtgcaggcccaggttcccattgtccccatagtcatgtcctcctaccaagacttctactgcaagaaggagcgtcgcttcacctcgggacaatgtcaggtgcgggtgctgcccccagtgcccacggaagggctgacaccagatgacgtcccagctctggctgacagagtccggcactccatgctcactgttttccgggaaatctccactgatggccggggtggtggtgactatctgaagaagcctgggggcggtgggtgaaccctggctctgagctctcctcccatctgtccccatcttcctccccacacctacccacccagtgggccctgaagcagggccaaaccctcttccttgtctcccctctccccacttattctcctctttggaatcttcaacttctgaagtgaatgtggatacagcgccactcctgccccctcttggccccatccatggactcttgcctcggtgcagtttccactcttgacccccacctcctactgtcttgtctgtgggacagttgcctccccctcatctccagtgactcagcctacacaagggaggggaacattccatccccagtggagtctcttcctatgtggtcttctctacccctctaccccacattggccagtggactcatccattctttggaacaaatcccccccactccaaagtccatggattcaatggactcatccatttgtgaggaggacttctcgccctctggctggaagctgatacctgaagcactcccaggctcatcctgggagctttcctcagcaccttcaccttccctcccagtgtagcctcctgtcagtgggggctggacccttctaattcagaggtctcatgcctgcccttgcccagatgcccagggtcgtgcactctctgggataccagttcagtctccacatttctggttttctgtccccatagtacagttcttcagtggacatgaccccacccagccccctgcagccctgctgcaccatctcaccagacacaaggggaagaagcagacatcaggtgctgcactcacttctgccccctggggagttggggaaaggaacgaaccctggctggaggggataggagggcttttaatttatttctttttctgttgaggcttccccctctctgagccagttttcatttcttcctggtggcattagccactccctgcctctcactccagacctgttcccacaactggggaggtaggctgggagcaaaaggagagggtgggacccagttttgcgtggttggtttttattaattatctggataacagcaaaaaaactgaaaataaagagagagagaga

SEQ ID NO: 268694 - DNA, 2168 bp, Artificial Sequence
  derived and/or modified sequence
tggccgacatcgggaaagacggcgaagagctaggaaaagagggaaaacactagggtcgcagggttcaaaatggctccaacctcctttggtgacgtagagagcagaacttgggtctgcccctcccttttagttaagggagcagaactgggattagcccgacgtttggatagtgggaacatcgatctgcggcgctggtgttaacccaactcattcggctggacgactcagccctccccatattaggtggccagaatggatttgtggccaggggcatggatgctgctgctgctgctcttcctgctgctgctcttcctgctgcccaccctgtggttctgcagccccagtgccaagtacttcttcaagatggccttctacaatggctggatcctcttcctggctgtgctcgccatccctgtgtgtgccgtgcgaggacgcaacgtcgagaacatgaagatcttgcgtctaatgctgctccacatcaaatacctgtacgggatccgagtggaggtgcgaggggctcaccacttccctccctcgcagccctatgttgttgtctccaaccaccagagctctctcgatctgcttgggatgatggaggtactgccaggccgctgtgtgcccattgccaagcgcgagctactgtgggctggctctgccgggctggcctgctggctggcaggagtcatcttcatcgaccggaagcgcacgggggatgccatcagtgtcatgtctgaggtcgcccagaccctgctcacccaggacgtgagggtctgggtgtttcctgagggaacgagaaaccacaatggctccatgctgcccttcaaacgtggcgccttccatcttgcagtgcaggcccaggttcccattgtccccatagtcatgtcctcctaccaagacttctactgcaagaaggagcgtcgcttcacctcgggacaatgtcaggtgcgggtgctgcccccagtgcccacggaagggctgacaccagatgacgtcccagctctggctgacagagtccggcactccatgctcactgttttccgggaaatctccactgatggccggggtggtggtgactatctgaagaagcctgggggcggtgggtgaaccctggctctgagctctcctcccatctgtccccatcttcctccccacacctacccacccagtgggccctgaagcagggccaaaccctcttccttgtctcccctctccccacttattctcctctttggaatcttcaacttctgaagtgaatgtggatacagcgccactcctgccccctcttggccccatccatggactcttgcctcggtgcagtttccactcttgacccccacctcctactgtcttgtctgtgggacagttgcctccccctcatctccagtgactcagcctacacaagggaggggaacattccatccccagtggagtctcttcctatgtggtcttctctacccctctaccccacattggccagtggactcatccattctttggaacaaatcccccccactccaaagtccatggattcaatggactcatccatttgtgaggaggacttctcgccctctggctggaagctgatacctgaagcactcccaggctcatcctgggagctttcctcagcaccttcaccttccctcccagtgtagcctcctgtcagtgggggctggacccttctaattcagaggtctcatgcctgcccttgcccagatgcccagggtcgtgcactctctgggataccagttcagtctccacatttctggttttctgtccccatagtacagttcttcagtggacatgaccccacccagccccctgcagccctgctgcaccatctcaccagacacaaggggaagaagcagacatcaggtgctgcactcacttctgccccctggggagttggggaaaggaacgaaccctggctggaggggataggagggcttttaatttatttctttttctgttgaggcttccccctctctgagccagttttcatttcttcctggtggcattagccactccctgcctctcactccagacctgttcccacaactggggaggtaggctgggagcaaaaggagagggtgggacccagttttgcgtggttggtttttattaattatctggataacagcaaaaaaactgaaaataaagagagagagaga

SEQ ID NO: 268695 - DNA, 2496 bp, Artificial Sequence
  derived and/or modified sequence
ggcagatgaggattcaggaagcttgaggtttaggaaggaagatattgagagggaaaggtggaaatgaaggagagtgaagtgatggaatgatcctagtaaagggataatgggagtggaggaagagaagagggggtggaaaactagatacatggctaccaaattaaggaggcacgcgcattccagaggaatcggcattcttcctcactttttatttttctagaaagcacccctgaagccaaatttccattggaagaaaagatgtacccatattgtatgttgtgagaaggggttgtctcagcttgggcaagtaaggagactgatacgaaggaagtaggaaagaaaaggtacagaggtaaaagagcatggaaaaggaaagggtcagggataaggccaaagagatctcttctctttaaaggccagagaaggcaggtggaggggggagctggactgctgggagatagtgagggacaaagggcaaaggaaaccagaccagaggactggagagtgagatggagtgagatggagtcctggagagaaaaagaagagaggtgaacttaatgcttgtcatatggtggccagaatggatttgtggccaggggcatggatgctgctgctgctgctcttcctgctgctgctcttcctgctgcccaccctgtggttctgcagccccagtgccaagtacttcttcaagatggccttctacaatggctggatcctcttcctggctgtgctcgccatccctgtgtgtgccgtgcgaggacgcaacgtcgagaacatgaagatcttgcgtctaatgctgctccacatcaaatacctgtacgggatccgagtggaggtgcgaggggctcaccacttccctccctcgcagccctatgttgttgtctccaaccaccagagctctctcgatctgcttgggatgatggaggtactgccaggccgctgtgtgcccattgccaagcgcgagctactgtgggctggctctgccgggctggcctgctggctggcaggagtcatcttcatcgaccggaagcgcacgggggatgccatcagtgtcatgtctgaggtcgcccagaccctgctcacccaggacgtgagggtctgggtgtttcctgagggaacgagaaaccacaatggctccatgctgcccttcaaacgtggcgccttccatcttgcagtgcaggcccaggttcccattgtccccatagtcatgtcctcctaccaagacttctactgcaagaaggagcgtcgcttcacctcgggacaatgtcaggtgcgggtgctgcccccagtgcccacggaagggctgacaccagatgacgtcccagctctggctgacagagtccggcactccatgctcactgttttccgggaaatctccactgatggccggggtggtggtgactatctgaagaagcctgggggcggtgggtgaaccctggctctgagctctcctcccatctgtccccatcttcctccccacacctacccacccagtgggccctgaagcagggccaaaccctcttccttgtctcccctctccccacttattctcctatttggaatcttcaacttctgaagtgaatgtggatacagcgccactcctgccccctcttggccccatccatggactcttgcctcggtgcagtctccactcttgacccccacctcctactgtcttgtctgtgggacagttgcctccccctcatctccagtgactcagcctacacaagggaggggaacattccatccccagtggagtctcttcctatgtggtcttctctacccctctaccccacattggccagtggactcatccattctttggaacaaatcccccccactccaaagtccatggattcaatggactcatccatttgtgaggaggacttctcgccctctggctggaagctgatacctgaagcactcccaggctcatcctgggagctttcctcagcaccttcaccttccctcccagtgtagcctcctgtcagtgggggctggacccttctaattcagaggtctcatgcctgcccttgcccagatgcccagggtcgtgcactctctgggataccagttcagtctccacatttctggttttctgtccccatagtacagttcttcagtggacatgaccccacccagccccctgcagccctgctgcaccatctcaccagacacaaggggaagaagcagacatcaggtgctgcactcacttctgccccctggggagttggggaaaggaacgaaccctggctggaggggataggagggcttttaatttatttctttttctgttgaggcttccccctctctgagccagttttcatttcttcctggtggcattagccactccctgcctctcactccagacctgttcccacaactggggaggtaggctgggagcaaaaggagagggtgggacccagttttgcgtggttggtttttattaattatctggataacagcaaaaaaactgaaaataaagagagagagaga

SEQ ID NO: 268696 - DNA, 2168 bp, Artificial Sequence
  derived and/or modified sequence
tggccgacatcgggaaagacggcgaagagctaggaaaagagggaaaacactagggtcgcagggttcaaaatggctccaacctcctttggtgacgtagagagcagaacttgggtctgcccctcccttttagttaagggagcagaactgggattagcccgacgtttggatagtgggaacatcgatctgcggcgctggtgttaacccaactcattcggctggacgactcagccctccccatattaggtggccagaatggatttgtggccaggggcatggatgctgctgctgctgctcttcctgctgctgctcttcctgctgcccaccctgtggttctgcagccccagtgccaagtacttcttcaagatggccttctacaatggctggatcctcttcctggctgtgctcgccatccctgtgtgtgccgtgcgaggacgcaacgtcgagaacatgaagatcttgcgtctaatgctgctccacatcaaatacctgtacgggatccgagtggaggtgcgaggggctcaccacttccctccctcgcagccctatgttgttgtctccaaccaccagagctctctcgatctgcttgggatgatggaggtactgccaggccgctgtgtgcccattgccaagcgcgagctactgtgggctggctctgccgggctggcctgctggctggcaggagtcatcttcatcgaccggaagcgcacgggggatgccatcagtgtcatgtctgaggtcgcccagaccctgctcacccaggacgtgagggtctgggtgtttcctgagggaacgagaaaccacaatggctccatgctgcccttcaaacgtggcgccttccatcttgcagtgcaggcccaggttcccattgtccccatagtcatgtcctcctaccaagacttctactgcaagaaggagcgtcgcttcacctcgggacaatgtcaggtgcgggtgctgcccccagtgcccacggaagggctgacaccagatgacgtcccagctctggctgacagagtccggcactccatgctcactgttttccgggaaatctccactgatggccggggtggtggtgactatctgaagaagcctgggggcggtgggtgaaccctggctctgagctctcctcccatctgtccccatcttcctccccacacctacccacccagtgggccctgaagcagggccaaaccctcttccttgtctcccctctccccacttattctcctatttggaatcttcaacttctgaagtgaatgtggatacagcgccactcctgccccctcttggccccatccatggactcttgcctcggtgcagtctccactcttgacccccacctcctactgtcttgtctgtgggacagttgcctccccctcatctccagtgactcagcctacacaagggaggggaacattccatccccagtggagtctcttcctatgtggtcttctctacccctctaccccacattggccagtggactcatccattctttggaacaaatcccccccactccaaagtccatggattcaatggactcatccatttgtgaggaggacttctcgccctctggctggaagctgatacctgaagcactcccaggctcatcctgggagctttcctcagcaccttcaccttccctcccagtgtagcctcctgtcagtgggggctggacccttctaattcagaggtctcatgcctgcccttgcccagatgcccagggtcgtgcactctctgggataccagttcagtctccacatttctggttttctgtccccatagtacagttcttcagtggacatgaccccacccagccccctgcagccctgctgcaccatctcaccagacacaaggggaagaagcagacatcaggtgctgcactcacttctgccccctggggagttggggaaaggaacgaaccctggctggaggggataggagggcttttaatttatttctttttctgttgaggcttccccctctctgagccagttttcatttcttcctggtggcattagccactccctgcctctcactccagacctgttcccacaactggggaggtaggctgggagcaaaaggagagggtgggacccagttttgcgtggttggtttttattaattatctggataacagcaaaaaaactgaaaataaagagagagagaga

SEQ ID NO: 268697 - DNA, 2017 bp, Artificial Sequence
  derived and/or modified sequence
gaaatagggtcttcttcccaggttggaccccggggagtttgggcttttcctacaatcactgaccctcactgtgactaaaggagcagaattaggtggccagaatggatttgtggccaggggcatggatgctgctgctgctgctcttcctgctgctgctcttcctgctgcccaccctgtggttctgcagccccagtgccaagtacttcttcaagatggccttctacaatggctggatcctcttcctggctgtgctcgccatccctgtgtgtgccgtgcgaggacgcaacgtcgagaacatgaagatcttgcgtctaatgctgctccacatcaaatacctgtacgggatccgagtggaggtgcgaggggctcaccacttccctccctcgcagccctatgttgttgtctccaaccaccagagctctctcgatctgcttgggatgatggaggtactgccaggccgctgtgtgcccattgccaagcgcgagctactgtgggctggctctgccgggctggcctgctggctggcaggagtcatcttcatcgaccggaagcgcacgggggatgccatcagtgtcatgtctgaggtcgcccagaccctgctcacccaggacgtgagggtctgggtgtttcctgagggaacgagaaaccacaatggctccatgctgcccttcaaacgtggcgccttccatcttgcagtgcaggcccaggttcccattgtccccatagtcatgtcctcctaccaagacttctactgcaagaaggagcgtcgcttcacctcgggacaatgtcaggtgcgggtgctgcccccagtgcccacggaagggctgacaccagatgacgtcccagctctggctgacagagtccggcactccatgctcactgttttccgggaaatctccactgatggccggggtggtggtgactatctgaagaagcctgggggcggtgggtgaaccctggctctgagctctcctcccatctgtccccatcttcctccccacacctacccacccagtgggccctgaagcagggccaaaccctcttccttgtctcccctctccccacttattctcctatttggaatcttcaacttctgaagtgaatgtggatacagcgccactcctgccccctcttggccccatccatggactcttgcctcggtgcagtctccactcttgacccccacctcctactgtcttgtctgtgggacagttgcctccccctcatctccagtgactcagcctacacaagggaggggaacattccatccccagtggagtctcttcctatgtggtcttctctacccctctaccccacattggccagtggactcatccattctttggaacaaatcccccccactccaaagtccatggattcaatggactcatccatttgtgaggaggacttctcgccctctggctggaagctgatacctgaagcactcccaggctcatcctgggagctttcctcagcaccttcaccttccctcccagtgtagcctcctgtcagtgggggctggacccttctaattcagaggtctcatgcctgcccttgcccagatgcccagggtcgtgcactctctgggataccagttcagtctccacatttctggttttctgtccccatagtacagttcttcagtggacatgaccccacccagccccctgcagccctgctgcaccatctcaccagacacaaggggaagaagcagacatcaggtgctgcactcacttctgccccctggggagttggggaaaggaacgaaccctggctggaggggataggagggcttttaatttatttctttttctgttgaggcttccccctctctgagccagttttcatttcttcctggtggcattagccactccctgcctctcactccagacctgttcccacaactggggaggtaggctgggagcaaaaggagagggtgggacccagttttgcgtggttggtttttattaattatctggataacagcaaaaaaactgaaaataaagagagagagaga

SEQ ID NO: 268698 - DNA, 2021 bp, Artificial Sequence
  derived and/or modified sequence
tcctcttttagagaatgtccggattgctattggactttggagcgtatggctccaaatcaactcattggctaaaacttgacggaaaatggtggttaggtggccagaatggatttgtggccaggggcatggatgctgctgctgctgctcttcctgctgctgctcttcctgctgcccaccctgtggttctgcagccccagtgccaagtacttcttcaagatggccttctacaatggctggatcctcttcctggctgtgctcgccatccctgtgtgtgccgtgcgaggacgcaacgtcgagaacatgaagatcttgcgtctaatgctgctccacatcaaatacctgtacgggatccgagtggaggtgcgaggggctcaccacttccctccctcgcagccctatgttgttgtctccaaccaccagagctctctcgatctgcttgggatgatggaggtactgccaggccgctgtgtgcccattgccaagcgcgagctactgtgggctggctctgccgggctggcctgctggctggcaggagtcatcttcatcgaccggaagcgcacgggggatgccatcagtgtcatgtctgaggtcgcccagaccctgctcacccaggacgtgagggtctgggtgtttcctgagggaacgagaaaccacaatggctccatgctgcccttcaaacgtggcgccttccatcttgcagtgcaggcccaggttcccattgtccccatagtcatgtcctcctaccaagacttctactgcaagaaggagcgtcgcttcacctcgggacaatgtcaggtgcgggtgctgcccccagtgcccacggaagggctgacaccagatgacgtcccagctctggctgacagagtccggcactccatgctcactgttttccgggaaatctccactgatggccggggtggtggtgactatctgaagaagcctgggggcggtgggtgaaccctggctctgagctctcctcccatctgtccccatcttcctccccacacctacccacccagtgggccctgaagcagggccaaaccctcttccttgtctcccctctccccacttattctcctatttggaatcttcaacttctgaagtgaatgtggatacagcgccactcctgccccctcttggccccatccatggactcttgcctcggtgcagtctccactcttgacccccacctcctactgtcttgtctgtgggacagttgcctccccctcatctccagtgactcagcctacacaagggaggggaacattccatccccagtggagtctcttcctatgtggtcttctctacccctctaccccacattggccagtggactcatccattctttggaacaaatcccccccactccaaagtccatggattcaatggactcatccatttgtgaggaggacttctcgccctctggctggaagctgatacctgaagcactcccaggctcatcctgggagctttcctcagcaccttcaccttccctcccagtgtagcctcctgtcagtgggggctggacccttctaattcagaggtctcatgcctgcccttgcccagatgcccagggtcgtgcactctctgggataccagttcagtctccacatttctggttttctgtccccatagtacagttcttcagtggacatgaccccacccagccccctgcagccctgctgcaccatctcaccagacacaaggggaagaagcagacatcaggtgctgcactcacttctgccccctggggagttggggaaaggaacgaaccctggctggaggggataggagggcttttaatttatttctttttctgttgaggcttccccctctctgagccagttttcatttcttcctggtggcattagccactccctgcctctcactccagacctgttcccacaactggggaggtaggctgggagcaaaaggagagggtgggacccagttttgcgtggttggtttttattaattatctggataacagcaaaaaaactgaaaataaagagagagagaga

SEQ ID NO: 268699 - protein, 451 aa, Artificial Sequence
  derived and/or modified sequence
MVGSALRRGAHAYVYLVSKASHISRGHQHQAWGSRPPAAECATQRAPGSVVELLGKSYPQDDHSNLTRKVLTRVGRNLHNQQHHPLWLIKERVKEHFYKQYVGRFGTPLFSVYDNLSPVVTTWQNFDSLLIPADHPSRKKGDNYYLNRTHMLRAHTSAHQWDLLHAGLDAFLVVGDVYRRDQIDSQHYPIFHQLEAVRLFSKHELFAGIKDGESLQLFEQSSRSAHKQETHTMEAVKLVEFDLKQTLTRLMAHLFGDELEIRWVDCYFPFTHPSFEMEINFHGEWLEVLGCGVMEQQLVNSAGAQDRIGWAFGLGLERLAMILYDIPDIRLFWCEDERFLKQFCVSNINQKVKFQPLSKYPAVINDISFWLPSENYAENDFYDLVRTIGGDLVEKVDLIDKFVHPKTHKTSHCYRITYRHMERTLSQREVRHIHQALQEAAVQLLGVEGRF

SEQ ID NO: 268700 - DNA, 1356 bp, Artificial Sequence
  derived and/or modified sequence
atggtaggcagcgccctgcgacggggcgcccatgcctacgtgtatctcgtgagtaaggcctctcatatctcccgcggccaccaacaccaagcctgggggtccaggccacctgctgccgagtgcgctacacaacgggctcccggctccgtcgtggagctgctggggaaatcgtacccacaagacgatcactctaatctaacacggaaggtgctgacacgcgtcggtcggaacctgcacaatcaacagcatcatccactatggctgattaaggagagggtgaaggagcatttttacaagcaatacgtggggcggttcggtactccactgttcagcgtgtatgacaatctcagccccgtggtgacgacatggcagaatttcgattcgcttctgatccccgccgaccatccctcccgcaagaaaggcgataattactacctcaataggacacacatgctgcgggcccatactagtgcccaccagtgggatctgttgcacgcggggcttgatgcatttctggtcgtcggtgatgtataccggagagatcagatagatagtcagcactacccaatatttcatcagctggaggccgtgcggctgttcagtaaacatgagctgttcgccggtatcaaggatggggagagcttgcaactgttcgagcaaagctcccgctcagctcataaacaggaaacgcacacaatggaggctgtcaagttggtcgaattcgatctaaagcaaactctgacacgcctcatggcacacctgttcggagacgaactggagatccgctgggtagactgttattttccgtttacccaccctagctttgagatggagatcaacttccacggcgaatggctggaggttttagggtgtggggtgatggaacaacagctcgttaactccgcaggcgcgcaagatagaatcgggtgggcctttgggctgggactcgagcgcctcgcaatgatcctgtacgatatcccggacatacggcttttttggtgtgaggatgagcgctttttgaaacaattttgcgtgagtaacattaatcaaaaagtgaagtttcagcctctgagcaagtatcccgccgttatcaatgatataagcttctggctgccgagtgaaaactatgccgagaacgatttttacgatctcgtgcggaccatcggcggcgacctggttgagaaggtggatctgattgacaaattcgttcacccgaagacccataaaacttctcattgttaccggataacttatcggcacatggagcggacattaagtcagagagaggtgagacatatccaccaagctttacaggaggccgccgtgcagttgctgggagtggaaggaaggttttag

SEQ ID NO: 268701 - DNA, 1356 bp, Artificial Sequence
  derived and/or modified sequence
atggtggggtccgcccttcgaagaggcgctcacgcttacgtgtaccttgttagcaaagcttcacacatctctcgcggccaccaacaccaggcctgggggtcacggcctcctgcagcggaatgtgccacccaaagggcccccgggagtgtggtggagctgctgggtaagagctatccacaggacgaccatagcaacctgacacgcaaagtcctgactcgggtgggtaggaacctgcataaccagcaacatcacccactatggcttatcaaggaaagggtaaaagagcacttctataagcagtacgtcggccgcttcggcacgcccctgttttccgtgtatgacaacctatcacctgttgtgaccacgtggcaaaacttcgattccctgctgatcccagcagaccacccttcaagaaaaaaaggggacaactactatctgaacagaactcatatgctgagagctcacaccagcgcacatcaatgggatctgctgcacgccggcctggacgccttcctggtcgtgggcgacgtatatcggcgtgaccagatcgacagccaacactacccgatcttccatcagctggaggcagttagattattcagtaagcacgaactttttgcgggcatcaaggacggggaatcgctgcagctctttgaacaatcttctagatctgcacacaaacaggagactcacacaatggaagcagtgaagctcgtagagttcgatcttaagcagactctcaccaggctaatggctcatctcttcggcgacgagttggaaatcagatgggttgattgttattttccttttacacaccctagttttgaaatggaaatcaattttcacggcgagtggctcgaagtcttgggctgcggagttatggagcaacaattagttaactctgccggtgcccaagatcggattggctgggcatttgggctgggtctcgagaggcttgctatgatactgtatgatattcctgacatccggctgttctggtgcgaggatgaacggtttctaaagcagttttgcgtgagcaacatcaatcagaaagtgaaattccagccactgagtaaataccccgctgtcataaacgatatatctttctggttgcctagtgagaattacgctgaaaacgatttctatgatctggtccgaacaataggcggcgacctggtggaaaaggttgacttgattgacaagtttgtgcatcccaagacccacaagacatcccattgctaccgcataacgtatcggcatatggagagaacactcagccagcgagaggtccgccatatccaccaagccctccaagaggccgcagtacaactactgggcgtcgaagggagattttag

SEQ ID NO: 268702 - DNA, 1356 bp, Artificial Sequence
  derived and/or modified sequence
atggtgggcagcgccctgcggcggggggcccacgcctacgtgtacctggtgtccaaggccagccacatcagccggggccaccagcaccaggcctggggcagccggcccccagctgctgaatgtgccacccagagggcccctggctctgtggtggagctgctgggcaagagctacccccaggatgaccacagcaacctgaccaggaaggtgctgaccagggtgggcaggaacctgcacaaccagcagcaccaccccctgtggctgatcaaggagcgggtgaaggagcacttctacaagcagtatgtgggccgcttcggcacccccctcttctctgtgtatgacaacctgagccctgtggtgaccacctggcagaactttgacagcctgctgatcccagctgaccaccccagcaggaagaagggggacaactactacctgaacagaacccacatgctgcgggcccacaccagcgcccaccagtgggacctgctgcacgccggcctggatgccttcctggtggtgggagatgtgtacagaagagaccagattgacagccagcactaccccatcttccaccagctggaggccgtgcggctcttcagcaagcatgagctgtttgctggcatcaaggatggagagagcctgcagctgtttgagcagagcagccgcagcgcccacaagcaggagacccacaccatggaggccgtgaagctggtggagtttgacctgaagcagaccctgacccggctgatggcccacctgtttggagatgagctggagatccgctgggtggactgctacttccccttcacccaccccagctttgagatggagatcaacttccacggggagtggctggaggtgctgggctgcggcgtgatggagcagcagctggtgaacagcgctggggcccaggaccgcatcggctgggccttcggcctgggcctggagcggctggccatgatcctgtatgacatcccagacatccgcctcttctggtgtgaagatgagcgcttcctgaagcagttctgtgtgagcaacatcaaccagaaggtgaagttccagcccctgagcaagtacccagctgtgatcaatgacatctccttctggctgcccagcgagaactatgcagaaaatgacttctatgacctggtgaggaccatcggcggggacctggtggagaaggtggacctgattgacaagtttgtgcaccccaagacccacaagaccagccactgctaccgcatcacctaccgccacatggagaggaccctgagccagcgggaggtgcgccacatccaccaggccctgcaggaggccgctgtgcagctgctgggcgtggagggccgcttctag

SEQ ID NO: 268703 - DNA, 1356 bp, Artificial Sequence
  derived and/or modified sequence
atggtgggcagcgccctgcggcggggcgcccacgcctacgtgtacctcgtgagcaaggcttcccacatctcgcgcggtcaccagcatcaagcttggggctccaggccccccgcagccgagtgcgctacccagcgcgcccctggctccgtggtcgaacttcttggcaagagctatccacaagatgatcactccaacctgactcgaaaagtattaacccgcgtaggccgcaatctgcataaccagcagcaccacccattgtggctgattaaagagcgcgtaaaggagcacttttataagcagtacgtgggtcggttcggcactcccctctttagcgtgtatgataatctctctccagttgtaactacctggcagaatttcgactctttactgattccggccgaccatcccagcaggaaaaaaggggacaattactatttgaataggacacacatgctgagggcgcacacttccgcacatcagtgggacctcctgcacgccggcttggacgctttcctggtcgtcggggatgtatatcggcgggatcagatagatagccagcattatccgatttttcatcagctggaggcggtcagattatttagtaagcatgagctgttcgctggcattaaggatggtgaatccctgcagttgttcgagcagtctagcagaagcgctcacaagcaggaaacacacaccatggaagctgtaaaactggtcgaattcgacctgaagcagacgctgacccgcctgatggcacatttatttggcgacgagctcgagataagatgggtggattgttatttcccatttactcatccatcatttgagatggaaatcaattttcacggagagtggctggaggtcttgggatgtggcgtcatggagcagcagctggttaactctgctggggcccaggaccgtattgggtgggcgtttggtctcgggcttgaacgcttagcgatgattttgtacgatattcccgacataaggctcttttggtgcgaagatgaaagattcttaaagcagttctgtgtcagcaatatcaaccagaaggtgaagtttcaacctttatcgaaataccctgcagtaattaatgatatcagcttttggctcccaagcgaaaactatgccgagaacgacttttatgatctggtgagaactattggcggagatttagtcgaaaaagtggacctaatcgacaaatttgtccacccaaaaacccacaagacctcccactgttaccgcatcacctatagacacatggagagaaccctgtctcaaagggaagtgaggcatatccaccaggctcttcaggaggccgccgtgcagttgcttggagtggaagggagattttag

SEQ ID NO: 268704 - DNA, 1356 bp, Artificial Sequence
  derived and/or modified sequence
atggtgggcagcgccctgcggcggggcgcccacgcctacgtgtacctggtgagcaaagccagtcacatatctcggggccaccaacaccaagcctggggaagcaggccgcctgccgctgagtgcgcaactcaacgggcgcccggaagtgtagtcgaactactcggcaaatcatatccccaagatgatcactctaatctgactcggaaggtgctgacaagagtagggcggaacctccacaatcagcaacaccatcccttatggttgattaaggaaagggtcaaagaacacttttacaaacagtatgttgggcggttcggcacacctctttttagcgtgtatgacaacctctccccagtcgttaccacatggcagaattttgactctctcttgataccggccgatcacccttctcggaagaagggagacaactactatcttaataggacgcacatgctgagggcgcacacgtctgcgcatcagtgggatctgttgcacgccggcctggacgcgtttctcgtggtgggagatgtctaccgaagggatcaaattgactctcagcactacccaattttccaccagctggaagcggtgcggcttttttctaagcacgagcttttcgctggaataaaagacggggagtccctgcagctgttcgagcagagttctaggagtgctcataagcaggagacccacaccatggaggcagtaaaattagtagagtttgacttgaagcagaccctcactaggcttatggcccatctgtttggggacgaactggaaatcaggtgggtagattgttatttcccctttacgcatccctctttcgaaatggagatcaattttcacggcgagtggctggaggtcctcggctgcggagtgatggagcagcaactagtgaatagtgcgggggctcaagataggatcggatgggccttcgggttaggactggagcggctggctatgattctgtacgatatcccagatatcagactgttttggtgtgaagatgagcggttccttaaacaattctgcgtttcgaatattaatcaaaaagtgaaatttcagccattgtctaaatatccagctgtgatcaacgacatctccttctggttaccctccgagaactatgctgaaaacgacttttatgacttggtgagaaccataggaggggatctcgtggagaaggtggacctcatcgataaattcgtgcatcctaagacccataaaactagccactgctaccgcatcacctataggcatatggagcgcacattgtctcagcgggaagttagacacatccaccaagctctgcaggaggcagcagtccagttgctgggcgtggagggacgtttctag

SEQ ID NO: 268705 - DNA, 1841 bp, Artificial Sequence
  derived and/or modified sequence
tttcaagggtgacttgatttcgcctgatcctggtcggcagggtggggtttcttggcattcctcaggccgggggatgcgacgtctgggtgtggaggtgatgagctaggggttctgtggcactccggctctgctcagggcgacctgcgtaggggcctctggggcaggcccgctttctgtcaaaatggcagcgcccagcgtgcgcgggtatctctgaagttggggtttaagattcttgcccgtgagagcgaacgagcctgccgtacttctgattttgaaacacctgggtctgggcttcccgggcgagcggtggaacctgtgagaagtttctacaatggtgggctcagctctcaggagaggtgcccatgcatatgtctacctggtgagtaaggccagtcacatctccagaggccatcagcaccaggcctggggatcgaggcctcctgcagcagagtgtgccacccaaagagctccaggcagtgtggtggagctgctgggcaaatcctaccctcaggacgaccacagcaacctcacccggaaggtcctcaccagagttggcaggaacctgcacaaccagcagcatcaccctctgtggctgatcaaggagagggtgaaggagcacttctacaagcagtatgtgggccgctttgggaccccgttgttctcggtctacgacaacctttctccagtggtcacgacctggcagaactttgacagcctgctcatcccagctgatcaccccagcaggaagaagggggacaactattacctgaatcggactcacatgctgagagcgcacacgtctgcacaccagtgggacttgctgcacgcgggactggatgccttcctggtggtgggtgatgtctacaggcgtgaccagatcgactcccagcactaccctattttccaccagctggaggccgtgcggctcttctccaagcatgagttatttgctggtataaaggatggagaaagcctgcagctctttgaacaaagttctcgctctgcgcataaacaagagacacacaccatggaggccgtgaagcttgtagagtttgatcttaagcaaacgcttaccaggctcatggcacatctttttggagatgagctggagataagatgggtagactgctacttcccttttacacatccttcctttgagatggagatcaactttcatggagaatggctggaagttcttggctgcggggtgatggaacaacaactggtcaattcagctggtgctcaagaccgaatcggctgggcttttggcctaggattagaaaggctagccatgatcctctacgacatccctgatatccgtctcttctggtgtgaggacgagcgcttcctgaagcagttctgtgtatccaacattaatcagaaggtgaagtttcagcctcttagcaaatatccggctgtgatcaatgatatttcattctggttgccctctgagaattacgcagaaaatgatttctatgacttagtccgaacaattggaggagacctggtggaaaaggttgatctcatagacaagtttgtacatccaaagacgcacaagaccagccactgctaccgcatcacgtaccgccacatggaacggactctgtcccagagagaggtcaggcacatccaccaggccttgcaggaggctgcagtccagctgttgggtgtggagggcaggttctgatgtcaccacttcactcaggctgcagccctcttggggctccaggatttgctgaaagagaaaaagatatggtttgtgaactggggcatcaatcatcttttgataaatggatcagttttaggactttcagaaaataaaagatcgctcttgaaaagct

SEQ ID NO: 268706 - DNA, 1528 bp, Artificial Sequence
  derived and/or modified sequence
aacctgtgagaagtttctacaatggtgggctcagctctcaggagaggtgcccatgcatatgtctacctggtgagtaaggccagtcacatctccagaggccatcagcaccaggcctggggatcgaggcctcctgcagcagagtgtgccacccaaagagctccaggcagtgtggtggagctgctgggcaaatcctaccctcaggacgaccacagcaacctcacccggaaggtcctcaccagagttggcaggaacctgcacaaccagcagcatcaccctctgtggctgatcaaggagagggtgaaggagcacttctacaagcagtatgtgggccgctttgggaccccgttgttctcggtctacgacaacctttctccagtggtcacgacctggcagaactttgacagcctgctcatcccagctgatcaccccagcaggaagaagggggacaactattacctgaatcggactcacatgctgagagcgcacacgtctgcacaccagtgggacttgctgcacgcgggactggatgccttcctggtggtgggtgatgtctacaggcgtgaccagatcgactcccagcactaccctattttccaccagctggaggccgtgcggctcttctccaagcatgagttatttgctggtataaaggatggagaaagcctgcagctctttgaacaaagttctcgctctgcgcataaacaagagacacacaccatggaggccgtgaagcttgtagagtttgatcttaagcaaacgcttaccaggctcatggcacatctttttggagatgagctggagataagatgggtagactgctacttcccttttacacatccttcctttgagatggagatcaactttcatggagaatggctggaagttcttggctgcggggtgatggaacaacaactggtcaattcagctggtgctcaagaccgaatcggctgggcttttggcctaggattagaaaggctagccatgatcctctacgacatccctgatatccgtctcttctggtgtgaggacgagcgcttcctgaagcagttctgtgtatccaacattaatcagaaggtgaagtttcagcctcttagcaaatatccggctgtgatcaatgatatttcattctggttgccctctgagaattacgcagaaaatgatttctatgacttagtccgaacaattggaggagacctggtggaaaaggttgatctcatagacaagtttgtacatccaaagacgcacaagaccagccactgctaccgcatcacgtaccgccacatggaacggactctgtcccagagagaggtcaggcacatccaccaggccttgcaggaggctgcagtccagctgttgggtgtggagggcaggttctgatgtcaccacttcactcaggctgcagccctcttggggctccaggatttgctgaaagagaaaaagatatggtttgtgaactggggcatcaatcatcttttgataaatggatcagttttaggactttcagaaaataaaagatcgctcttgaaaa

SEQ ID NO: 268707 - DNA, 1356 bp, Artificial Sequence
  derived and/or modified sequence
atggtcggctcggcccttcgaagaggcgcacacgcatatgtctacctggttagtaaggccagccacatatccaggggccaccaacaccaggcctggggttcccgcccaccagctgccgagtgtgctactcagcgggctcctggcagcgtggttgagctgttgggcaagtcctatcctcaagacgaccatagcaacctaacaaggaaagtcctgacccgcgtggggaggaacctgcacaaccagcagcaccatcccttgtggcttataaaggagcgcgtaaaggagcacttttacaaacagtatgtcggccgttttggcacgccccttttttcggtttacgacaatttgagcccagtggtcaccacatggcagaactttgactctctgcttatccctgctgaccaccctagtcggaagaagggggataactattacctcaataggacccatatgcttcgggctcatacaagtgcccaccagtgggacctcctccatgctgggctggacgcctttctggtagtgggggacgtctatcggcgagatcaaatcgatagccagcattacccaatcttccatcaactcgaggcagtgcggttgttttcaaagcatgaattgttcgccggaatcaaggatggcgaaagcctacagttgtttgagcagtcctcaagaagtgcccataaacaggagacacacacgatggaagccgtgaaactcgttgagtttgacttgaaacagaccttaacccggttgatggcccaccttttcggcgacgaacttgagataagatgggttgactgctatttccctttcacccatccgtcgtttgagatggagattaacttccacggcgagtggctggaagtgctcggctgcggagtaatggagcagcaacttgtgaattcagcaggagctcaggatcgcattggctgggcattcgggctgggcctggagcgcctggcaatgatcctgtacgatataccggatattcggctcttttggtgtgaagatgagcgcttcctgaaacagttctgcgtgagtaacatcaatcaaaaggtgaagttccagcctctgtcaaagtaccccgctgtaattaatgatatcagtttttggctgccatccgagaattacgctgagaacgatttctatgatctcgtgcgcaccataggcggagatctggtcgaaaaagtagatctaatcgacaaatttgttcacccgaagactcataaaacaagtcattgttataggattacctataggcatatggaacggacactgagccagcgggaagtgcgtcatatccaccaagcactacaggaggcagccgttcagctgctgggcgtggaagggaggttctag

SEQ ID NO: 268708 - DNA, 1356 bp, Artificial Sequence
  derived and/or modified sequence
atggtcggctcagccctccggagaggcgcacacgcctacgtttacttggtgagcaaagcatcccacatcagccgcggtcaccaacaccaggcttggggctcccgacccccagctgccgaatgtgccacacagagagcccctggcagcgtcgtcgagctcctgggaaaaagctatccccaggacgatcacagtaatcttacgcgcaaagtccttacccgggtcggccgaaatctccataaccaacagcaccaccccctgtggctgattaaggagcgtgttaaagaacacttctataagcagtatgttgggcgatttggcaccccacttttcagtgtttacgataacctgagtcctgtggtcacgacctggcagaactttgatagcttgctgatccctgccgaccacccttctcggaagaagggcgataattactacctgaacaggacacatatgctgcgggcacacacatcagcacaccagtgggacctgcttcatgcagggcttgacgcctttctggtcgttggcgacgtctacagaagggaccagatcgatagccagcactatcctatctttcaccagctagaggccgtaaggctattctcaaagcacgagctctttgcaggcattaaggacggggagtccctacaactattcgaacagagctcaagatcagcccataagcaggagactcatactatggaggcagtgaagttggtggagttcgacctgaagcagactttaacacgacttatggcgcacctgttcggtgacgagcttgaaataaggtgggtggactgttatttcccatttactcatccctcattcgagatggagattaacttccacggggagtggctggaggtgctgggatgcggggtgatggaacaacagctggtgaacagtgccggagcacaggatcgaatcggctgggcctttgggctgggtctggaacgattggccatgatattgtacgatatccccgatattagactcttttggtgcgaggatgagagattcctaaagcagttttgcgtgtccaacatcaaccaaaaggtcaaattccaaccgctgagcaagtaccccgcagtgataaacgacattagtttctggctcccctcggaaaattatgctgagaatgacttctacgacctcgtccgcactattggaggggatctcgtcgagaaggtggatctcatcgataaatttgtgcatcctaagactcacaaaacctcacattgctaccggattacctatagacacatggagaggacactgtcacagcgcgaagtccgacacattcaccaggccctgcaggaggctgcagtgcaactattgggggtcgagggacggttttag

SEQ ID NO: 268709 - DNA, 1356 bp, Artificial Sequence
  derived and/or modified sequence
atggtgggcagcgccctgagaagaggcgcccacgcctacgtgtacctggtgagcaaggccagccacatcagcagaggccaccagcaccaggcctggggcagcagaccccccgccgccgagtgcgccacccagagagcccccggcagcgtggtggagctgctgggcaagagctacccccaggacgaccacagcaacctgaccagaaaggtgctgaccagagtgggcagaaacctgcacaaccagcagcaccaccccctgtggctgatcaaggagagagtgaaggagcacttctacaagcagtacgtgggcagattcggcacccccctgttcagcgtgtacgacaacctgagccccgtggtgaccacctggcagaacttcgacagcctgctgatccccgccgaccaccccagcagaaagaagggcgacaactactacctgaacagaacccacatgctgagagcccacaccagcgcccaccagtgggacctgctgcacgccggcctggacgccttcctggtggtgggcgacgtgtacagaagagaccagatcgacagccagcactaccccatcttccaccagctggaggccgtgagactgttcagcaagcacgagctgttcgccggcatcaaggacggcgagagcctgcagctgttcgagcagagcagcagaagcgcccacaagcaggagacccacaccatggaggccgtgaagctggtggagttcgacctgaagcagaccctgaccagactgatggcccacctgttcggcgacgagctggagatcagatgggtggactgctacttccccttcacccaccccagcttcgagatggagatcaacttccacggcgagtggctggaggtgctgggctgcggcgtgatggagcagcagctggtgaacagcgccggcgcccaggacagaatcggctgggccttcggcctgggcctggagagactggccatgatcctgtacgacatccccgacatcagactgttctggtgcgaggacgagagattcctgaagcagttctgcgtgagcaacatcaaccagaaggtgaagttccagcccctgagcaagtaccccgccgtgatcaacgacatcagcttctggctgcccagcgagaactacgccgagaacgacttctacgacctggtgagaaccatcggcggcgacctggtggagaaggtggacctgatcgacaagttcgtgcaccccaagacccacaagaccagccactgctacagaatcacctacagacacatggagagaaccctgagccagagagaggtgagacacatccaccaggccctgcaggaggccgccgtgcagctgctgggcgtggagggcagattctag

SEQ ID NO: 268710 - DNA, 1518 bp, Artificial Sequence
  derived and/or modified sequence
gagcctccgttagggggtgggaaaggactttgccataggtcgctgaggccaccatctgctctcttactggccaagggcgtaaaaagatagtcttcccattagctagagagcaaaccccagaaagcctattggctgcgccgtccgcgggccttggtccgctttgaaggcgggctgcggctgcgagaggagggcgggcgggaggctagctgttgtcgtggttgctcggaggcacgtgtgcagtcccggaagcggcgaggggaaactgctccgcgcgcgccgcgggaggaggaaccgcccggtcctttagggtccgggcccggccgggccatggattcaatgcctgagcccgcgtcccgctgtcttctgcttcttcccttgctgctgctgctgctgctgctgctgccggccccggagctgggcccgagccaggccggagctgaggagaacgactgggttcgcctgcccagcaaatgcgaagggacttgcggttaatcgaagtcactgagaccatttgcaagaggctcctggattatagcctgcacaaggagaggaccggcagcaatcgatttgccaagggcatgtcagagacctttgagacattacacaacctggtacacaaaggggtcaaggtggtgatggacatcccctatgagctgtggaacgagacttctgcagaggtggctgacctcaagaagcagtgtgatgtgctggtggaagagtttgaggaggtgatcgaggactggtacaggaaccaccaggaggaagacctgactgaattcctctgcgccaaccacgtgctgaagggaaaagacaccagttgcctggcagagcagtggtccggcaagaagggagacacagctgccctgggagggaagaagtccaagaagaagagcagcagggccaaggcagcaggcggcaggagtagcagcagcaaacaaaggaaggagctgggtggccttgagggagaccccagccccgaggaggatgagggcatccagaaggcatcccctctcacacacagcccccctgatgagctctgagcccacccagcatcctctgtcctgagacccctgattttgaagctgaggagtcaggggcatggctctggcaggccgggatggccccgcagccttcagcccctccttgccttggctgtgccctcttctgccaaggaaagacacaagccccaggaagaactcagagccgtcatgggtagcccacgccgtcctttcccctccccaagtgtttctctcctgacccagggttcaggcaggccttgtggtttcaggactgcaaggactccagtgtgaactcaggaggggcaggtgtcagaactgggcaccaggactggagccccctccggagaccaaactcaccatccctcagtcctccccaacagggtactaggactgcagccccctgtagctcctctctgcttacccctcctgtggacaccttgcactctgcctggcccttcccagagcccaaagagtaaaaatgttctggttctgatttctg

SEQ ID NO: 268711 - protein, 1267 aa, Artificial Sequence
  derived and/or modified sequence
MRGLPRGRGLMRARGRGRAAPPGSRGRGRGGPHRGRGRPRSLLSLPRAQASWTPQLSTGLTSPPVPCLPSQGEAPAEMGALLLEKETRGATERVHGSLGDTPRSEETLPKATPDSLEPAGPSSPASVTVTVGDEGADTPVGATPLIGDESENLEGDGDLRGGRILLGHATKSFPSSPSKGGSCPSRAKMSMTGAGKSPPSVQSLAMRLLSMPGAQGAAAAGSEPPPATTSPEGQPKVHRARKTMSKPGNGQPPVPEKRPPEIQHFRMSDDVHSLGKVTSDLAKRRKLNSGGGLSEELGSARRSGEVTLTKGDPGSLEEWETVVGDDFSLYYDSYSVDERVDSDSKSEVEALTEQLSEEEEEEEEEEEEEEEEEEEEEEEEDEESGNQSDRSGSSGRRKAKKKWRKDSPWVKPSRKRRKREPPRAKEPRGVNGVGSSGPSEYMEVPLGSLELPSEGTLSPNHAGVSNDTSSLETERGFEELPLCSCRMEAPKIDRISERAGHKCMATESVDGELSGCNAAILKRETMRPSSRVALMVLCETHRARMVKHHCCPGCGYFCTAGTFLECHPDFRVAHRFHKACVSQLNGMVFCPHCGEDASEAQEVTIPRGDGVTPPAGTAAPAPPPLSQDVPGRADTSQPSARMRGHGEPRRPPCDPLADTIDSSGPSLTLPNGGCLSAVGLPLGPGREALEKALVIQESERRKKLRFHPRQLYLSVKQGELQKVILMLLDNLDPNFQSDQQSKRTPLHAAAQKGSVEICHVLLQAGANINAVDKQQRTPLMEAVVNNHLEVARYMVQRGGCVYSKEEDGSTCLHHAAKIGNLEMVSLLLSTGQVDVNAQDSGGWTPIIWAAEHKHIEVIRMLLTRGADVTLTDNEENICLHWASFTGSAAIAEVLLNARCDLHAVNYHGDTPLHIAARESYHDCVLLFLSRGANPELRNKEGDTAWDLTPERSDVWFALQLNRKLRLGVGNRAIRTEKIICRDVARGYENVPIPCVNGVDGEPCPEDYKYISENCETSTMNIDRNITHLQHCTCVDDCSSSNCLCGQLSIRCWYDKDGRLLQEFNKIEPPLIFECNQACSCWRNCKNRVVQSGIKVRLQLYRTAKMGWGVRALQTIPQGTFICEYVGELISDAEADVREDDSYLFDLDNKDGEVYCIDARYYGNISRFINHLCDPNIIPVRVFMLHQDLRFPRIAFFSSRDIRTGEELGFDYGDRFWDIKSKYFTCQCGSEKCKHSAEAIALEQSRLARLDPHPELLPELGSLPPVNT

SEQ ID NO: 268712 - protein, 298 aa, Artificial Sequence
  derived and/or modified sequence
  misc_feature (1)..(1): Xaa can be any naturally occurring amino acid
XSKRTPLHAAAQKGSVEICHVLLQAGANINAVDKQQRTPLMEAVVNNHLEVARYMVQRGGCVYSKEEDGSTCLHHAAKIGNLEMVSLLLSTGQVDVNAQGQLPPPSLPSHPQDSGGWTPIIWAAEHKHIEVIRMLLTRGADVTLTDNEENICLHWASFTGSAAIAEVLLNARCDLHAVNYHGDTPLHIAARESYHDCVLLFLSRGANPELRNKEGDTAWDLTPERSDVWFALQLNRKLRLGVGNRAIRTEKIICRDVARGYENVPIPCVNGVDGEPCPEDYKYISENCETSTMNIDRN

SEQ ID NO: 268713 - DNA, 3633 bp, Artificial Sequence
  derived and/or modified sequence
atggccgcggccgccggcgccgcagcagctgctgcggctgagggagaagcccctgcagaaatgggggcactcctgctcgaaaaagagactcgcggcgcaacggagagggtgcacggtagtcttggagacacaccccggagtgaggagactctacccaaagctacccctgatagcctggaacctgctggaccgagcagccctgcgagcgtgaccgttaccgtgggcgatgagggggctgataccccggtgggagcaacccccctgatcggagatgaatctgagaacctggagggcgatggggacctgcgaggcggccgcattttgctgggccatgctactaaatctttcccaagcagccctagtaagggggggagttgcccctctagagctaagatgtccatgacaggtgcaggcaagtcacccccctcagtgcagtcgcttgccatgagactgttgagtatgcccggagctcagggagccgctgctgccggctcggaacctccgcctgcaactacctctcctgaaggccagccgaaagtccatagagcaaggaaaactatgagcaagcccggaaatggccagcccccagtgcctgagaagcgaccaccagagattcagcatttcagaatgagcgatgacgtgcacagtcttgggaaagtgacgagtgatctggccaaacggaggaaactgaactcgggaggcggactcagtgaggaactagggtccgcccggcgttcaggtgaggtgactctgaccaagggtgaccctggtagcctggaggagtgggaaactgtagtgggggacgacttttccctgtattatgatagttattccgtggacgaaagagtggactctgattctaaaagcgaagtggaagcactgaccgaacaactgagcgaggaggaagaagaggaagaagaagaggaggaagaggaagaggaggaggaagaagaagaggaagaggaagaggatgaggaatccggaaatcagagcgataggagtggtagttctgggagacggaaagctaagaaaaaatggcgcaaggactccccatgggttaaacctagccgaaaaaggcggaaaagggagccaccccgagcaaaggaacctaggggagttaacggtgttggctcatccggaccctccgagtacatggaggtgcccctgggctccctggaactgccttcggagggtacattgtctccaaaccacgccggcgtctcaaacgacacctcctctctggaaaccgaacgggggtttgaagaattgcctctgtgcagttgtcgcatggaagcgcccaagattgacaggatttcggagcgcgcggggcacaaatgcatggccacagagtctgtggacggcgaattgtctggctgtaatgccgcaatccttaagagagaaacgatgagaccctcatccagggtggctctgatggtgctgtgcgagactcatagggcaaggatggttaagcatcattgttgtcccggctgcggctatttttgcacagctggtacattcctcgaatgtcatcctgatttccgggtggcccaccgatttcataaggcctgtgtctcgcagctgaatgggatggtgttctgcccccattgcggtgaagatgcttctgaggcccaagaggtgaccatccctagaggagacggggtcacgccacccgccggaacagccgcccccgccccccccccactgtcacaagacgttcccggccgcgcggatacatcacagcctagtgcccgtatgagaggccacggagaaccacgccgccccccctgtgacccattggccgacacgattgattccagtggaccctctcttactctgcccaatggcggctgccttagcgcggtagggttacctctgggaccgggaagggaggcgttggagaaggccttagtaattcaagaaagtgagagacgaaagaagctccgtttccatcccaggcagctctatctctccgtgaaacaaggggagctccagaaggttatcctaatgctcctagacaatctcgatcccaattttcagtctgatcagcagtccaaacgcacccctctgcatgccgctgcgcagaagggctcggtcgaaatatgtcatgttctcttgcaagcaggcgcgaacataaacgcggtggataagcagcagcggacacccctgatggaggcagttgtcaacaatcacctcgaggtggctagatatatggtgcagcgcggaggatgcgtgtacagtaaggaggaagatgggtccacctgcctacatcatgcagccaagataggaaatctcgaaatggtctcattgctgttgtcaaccgggcaggtcgacgttaatgcccaggacagtggcggatggaccccaataatttgggcggcagagcacaaacacattgaagtgatccgcatgctgctcacgcgaggtgcagatgtgaccctgacggacaatgaggagaacatctgcctacactgggccagcttcactgggtcagctgccatcgcagaagtccttctgaatgcccgatgtgatctccatgctgttaactatcacggcgatactccccttcacatagctgcacgtgaatcctaccatgattgcgtgctcctattcctctcccgtggcgcaaatcccgaactcagaaataaggagggggataccgcatgggacttgactccagagcggagtgacgtgtggttcgcccttcagttgaaccgcaaactgaggctgggcgtgggaaatagagccattaggactgaaaagatcatatgccgagatgtggcacgcgggtacgagaacgtccccattccttgtgtcaacggcgttgacggcgagccatgtcccgaggactacaagtacatcagcgagaattgcgagacttccacaatgaacatcgaccgtaatatcacccatctgcaacactgcacctgtgtggacgactgcagctcgtccaattgcctgtgcggacagctgtcaattagatgttggtacgacaaggatggcagactgttgcaggagttcaataaaattgaacctcccctcatctttgaatgcaaccaggcctgctcatgttggcggaactgtaagaaccgagtagtgcagagcgggataaaagtgcgcctccagctctatagaacggctaagatggggtggggcgtgcgcgctctgcagactataccacagggcaccttcatttgtgagtacgtcggggaactgattagcgacgctgaagccgacgtgagagaggatgactcttatcttttcgacctggataataaagatggcgaagtatactgcattgatgcacgctactatggcaacatctcccgttttatcaatcatctgtgcgatccgaatattattccggtgcgggtgtttatgctgcatcaggacctacggtttccacgcatcgcgttcttcagcagccgtgatatccggactggggaggagcttggcttcgattacggagatcggttttgggatattaaaagcaaatatttcacgtgccagtgcggatcggaaaaatgcaaacactccgctgaagccatagctctggaacagtcgagactggccaggctggacccccaccctgagctccttcccgagctgggctcgctccccccagtgaatacgtag

SEQ ID NO: 268714 - DNA, 3633 bp, Artificial Sequence
  derived and/or modified sequence
atggccgcagccgctggcgcggccgccgccgccgccgctgagggagaagctcctgctgaaatgggcgccctccttttagaaaaggaaaccaggggagcgacagagcgggtacacggttcacttggtgacacccccaggtccgaggagacgctgccgaaggctacccctgacagtctcgagcctgcagggccctcctctcctgctagcgtcactgtcacagtgggagatgaaggtgcggacacccccgtaggggcgactcccctgattggcgacgaaagcgaaaacctcgaaggcgacggcgacctgcggggcggcagaatcctattaggacacgccaccaagtcttttccttcctcaccatccaaagggggttcatgcccttccagagctaagatgtccatgacgggcgcaggcaagtcaccccccagcgtgcagtctctggccatgaggctgctctccatgccgggcgcccagggcgccgccgctgcgggcagtgagcccccccccgcaactaccagtcctgagggacagcccaaagtccaccgcgctcggaagactatgagcaaacctggaaatggacagcccccagtgccggagaagcgacctccagagatccaacatttcaggatgagcgatgacgttcatagtctgggcaaagtgaccagcgatttggcaaagagacgaaagctaaatagcggcggcggcctgtctgaagagcttggctccgctagaagaagcggggaggtaacgttaaccaaaggagatccagggtctctggaggagtgggaaacagtagtaggcgatgatttcagcctgtactatgactcgtattccgtggatgagagagttgattctgactccaaatccgaagtcgaggcgctgacggagcagttgtccgaggaagaggaggaagaagaagaggaagaggaggaggaagaggaagaagaggaagaagaggaggaagaagaggatgaagaaagcgggaaccagtcagatcgctctggatcctctggtaggcggaaggccaagaaaaaatggcgaaaggactccccttgggtcaagccctcccggaaacgccgaaagcgcgagccacctagagcaaaagagccgcgtggagtgaacggagtgggaagcagcggaccctccgaatacatggaggtcccactgggcagtctagaactgccttctgaaggtactttatctccaaatcacgcaggcgtgagtaatgatacatcttccctggagacagaacggggattcgaagaactaccattgtgttcctgcaggatggaggcccctaaaatcgaccgcatctcggaacgggcaggacacaaatgcatggcgacagaaagcgtagacggggaactgagcggttgcaacgcggctattctgaagagggagactatgcggccaagcagccgagtggcactgatggtgttgtgcgagacccaccgcgccaggatggtgaagcaccactgttgtccaggatgtggttacttctgtactgctggtacattcctggaatgccaccccgatttccgggtcgcccaccgatttcataaagcttgtgtttcacagctgaatgggatggtgttctgcccacactgcggagaggacgcttctgaggctcaggaagtgacgataccacgtggggatggcgttacgcccccagcaggtacagctgcgcctgccccaccccctttgagccaggacgtgcccgggagagcagacacatcacagccgtccgcccgaatgcgcggccacggggaacctaggaggccaccatgtgacccactggcagatacaatcgacagcagcggcccctctctcactctccctaatggaggatgtctgagtgcagtgggccttcctctcggcccaggtagagaggctctcgaaaaagctcttgtcattcaggaatccgagcgtcgtaagaagttgcgatttcatccacggcaactttatctatctgtgaagcaaggagagctgcaaaaggttattctgatgcttcttgacaatctggacccgaactttcagagcgaccaacagtcaaagagaacaccactgcatgcagctgctcagaaaggctcagtggaaatatgtcacgtactgcttcaggccggtgcaaatatcaatgcagtggataagcagcagcgtacaccgctgatggaggccgtcgtgaataaccacttagaagtggctcgatatatggttcagcggggagggtgcgtatattctaaggaagaggacggatccacctgcctgcaccacgccgccaaaattggtaatctggagatggtttcattgctgttatctactgggcaggtggatgtcaacgcccaggacagcgggggatggactccaatcatctgggctgctgagcataaacacatcgaagtcattaggatgcttctcacacggggcgctgacgttacattgaccgacaacgaagagaatatctgccttcactgggcatcctttacaggctctgctgcaattgccgaagtcctgttaaatgctcgttgcgatctccatgccgttaactaccatggcgatacccccttacacatagcggcacgcgagagctaccatgattgtgtcctgctgtttttgagtagaggagccaatcccgaactcagaaacaaagaaggtgacacagcgtgggatctcacacctgagagatccgacgtttggttcgcgcttcaactcaatcggaagctgaggcttggggtcgggaatcgggccatccggacagaaaagataatctgtcgcgacgtagcgcgtggctacgagaacgtccctattccctgtgtaaacggggttgatggggagccgtgccctgaggactacaaatatatctctgagaactgcgagacttccacgatgaacatcgataggaatattacccacttacagcactgcacatgtgtggacgattgttcctccagcaactgcctctgtgggcagctctccattcgttgttggtatgataaagacggaaggttattacaggagttcaacaagatcgaacctcctcttattttcgaatgcaatcaagcttgcagttgctggcgaaattgcaagaaccgtgttgtacagtctggaattaaggtgcgactacagctttatcgaactgcgaaaatggggtggggcgttcgagcgttgcagaccattcctcagggcacattcatatgcgagtatgttggggaactcataagcgacgccgaagctgatgtgagagaggacgacagttatctgttcgatctcgacaataaggatggcgaggtgtactgtatagacgctcgctactatgggaatatctcaaggttcatcaaccacttatgtgatcccaacatcattcccgttagggtttttatgcttcaccaggatttgcgatttccccggatagccttcttcagctcccgcgatattcggaccggggaggagttaggcttcgactatggagatcggttttgggatatcaagagtaaatactttacctgccagtgtggaagcgaaaagtgtaagcattcggccgaggccattgccttagaacaatctcgcctcgctcgcttagaccctcatcccgagctgcttccagagctcggatccctcccgcctgttaatacctag

SEQ ID NO: 268715 - DNA, 3804 bp, Artificial Sequence
  derived and/or modified sequence
atgcggggccttccacgcgggagaggactgatgcgcgcgcggggcagaggacgagccgctcctcccgggtctcgggggaggggacggggcgggccacacagggggaggggaagaccacgcagcctgctgagtctgccaagagcccaagcctcttggacgcctcagctatctaccgggcttacatccccacctgttccctgcttgcctagtcagggggaggcgcctgccgagatgggggcgctcctgctcgaaaaagaaactcgcggtgctaccgaacgggttcacggttccctgggcgatacgccccggtccgaggagaccttgcctaaggctacccctgacagcctggagccagctggcccgagctctcccgccagcgtgacagtcaccgtgggagatgaaggggccgacacaccagttggggcaacaccccttatcggggacgagtccgagaatttggagggagatggagatctgagaggtggcagaatattgctgggccatgccaccaaatctttccctagtagcccatctaagggtggctcatgccctagcagagcgaaaatgagtatgacaggggcggggaagagtccacccagcgtccagtcactggctatgaggcttctgagtatgccgggagcccagggtgccgccgctgctgggtccgagcctccaccagctaccacaagtcccgagggacagccgaaggtccatcgagcgcgcaagacgatgtcgaaacctgggaacggacagccccctgtccccgagaagcggccccccgaaatccagcactttcggatgagtgatgacgttcattctctgggcaaagtgacctccgatctcgctaaacgtcggaagctcaacagcggcggagggctgtcagaagaactaggcagcgcaaggaggtccggagaggtgaccctgacaaaaggtgacccaggctccttggaagagtgggagaccgtggtcggtgatgatttcagcctgtattacgattcttactctgtggatgagcgagtggatagcgatagcaaatcggaggttgaggcgcttacagagcagctgagcgaggaggaggaagaagaggaagaagaggaagaagaagaggaggaggaggaagaggaagaagaggaggaggaagacgaggagtcaggaaatcagtcagaccgatcagggtcatctgggagacggaaggctaagaaaaagtggaggaaggactccccctgggtcaagcctagccgaaagcggcggaagcgtgaaccaccccgggccaaagagccaaggggcgtgaatggcgtcggctcatctggcccatcagagtatatggaggtcccattaggaagcctagagctgccatccgaggggaccctgtcccctaaccacgcaggcgtaagtaacgatacgagcagtctagaaactgaaagggggttcgaggagctgccattatgctcctgccggatggaagcaccaaagatcgacagaattagcgagagagccgggcataagtgcatggcaacagagtcagttgatggagagttatccggctgcaatgcagccattttgaaacgcgagactatgcggccttcaagtcgagtggcattgatggtcttatgcgagacacacagagcccgaatggtgaaacaccattgttgcccagggtgtggctatttctgcaccgccggtacctttttggagtgtcatccagactttcgtgtagctcacaggttccacaaggcttgcgtgagccagcttaacggcatggtcttttgcccacattgcggcgaggatgccagcgaagcgcaggaagtgaccatacctcgcggagacggcgtgactcccccagccggcacagccgcccccgctccccctcctctgagccaggatgtgcccggccgagctgatacaagccagccctccgctcgaatgagggggcatggcgaaccgagacgcccaccctgcgatccactggctgacactattgacagctcaggacctagtctcacactgcctaatggtggctgtttatcggccgtgggcctccctttaggccctggaagagaggctctggaaaaggccctggtcattcaggaatcggaacgacggaagaagctgagattccacccccggcaattgtatctgtcggtgaagcagggcgagctacaaaaggttatccttatgctcctggacaatctggatccaaactttcaatctgatcaacagtccaagcgtacacccctgcacgctgccgcccagaaaggatccgtggagatctgtcacgtcttactgcaggctggggctaatatcaatgctgtggacaaacagcagcgcactccattgatggaggccgtggttaacaatcacctggaagtggccagatacatggtccagaggggcggctgtgtatactcgaaagaggaggatggctctacttgcttacaccatgctgctaaaataggaaatcttgagatggtttctctgttgttgtctactggacaagtggacgtgaacgcacaggattcgggtggctggaccccaattatctgggccgccgagcacaagcatattgaggtgatcagaatgcttcttacccggggcgcagatgtaacccttactgacaatgaggaaaatatatgtttgcattgggcttctttcacggggtcggcagccattgcagaggtgctactgaacgctaggtgtgatcttcacgctgtgaactatcacggggatactcctctccacatcgcagctcgagagtcttatcacgactgcgtgttattattcctgtcccgtggagccaaccccgaactgaggaataaggagggagacactgcctgggaccttaccccagagaggtctgacgtttggttcgcactccagctgaatcgtaagcttaggctcggagtagggaacagagctatacggaccgaaaagatcatttgcagggacgtggcacgggggtacgaaaacgttcccatcccctgcgttaatggtgtggatggggaaccctgcccagaggactacaaatatattagtgagaactgtgaaacatccacaatgaatatcgatcgaaacatcacccacctccagcactgtacttgtgtggacgattgcagttcttctaactgcctctgcggccaactgtccattcgttgctggtacgacaaagatggccggttgctgcaggagtttaacaaaatagagcctcctctcatcttcgaatgtaatcaggcatgttcttgttggagaaattgtaagaaccgagtggttcagagcggcattaaggtgcggctccaactctatcgcacagctaagatgggatggggtgtcagggctctccagacgatcccacaagggacattcatatgcgaatacgtaggtgaacttatctcagacgcggaagctgacgtgcgcgaggacgacagttatttgtttgacctcgataataaagacggtgaagtttactgtattgatgcaagatattacggcaacatctcgcggttcattaatcacctctgcgatcccaacatcatccctgtgagggtattcatgcttcaccaggacttgcgatttcctcggatcgccttctttagttctagagatatccgaactggcgaggaactgggatttgactacggggatcgcttctgggacatcaaatccaaatactttacttgtcagtgcggttctgagaagtgtaaacatagtgccgaggccatcgcactggaacagagccgcctcgcccgtctggacccccatcccgagctgttgcctgagctaggctcactgcccccagttaacacttag

SEQ ID NO: 268716 - DNA, 3804 bp, Artificial Sequence
  derived and/or modified sequence
atgagggggttgccccgagggcgtgggctcatgagggctaggggacgtggacgggcagccccacccggttcacgcggacgaggccggggcggaccacacagaggtagaggcaggcccaggtccctcctaagcctccctagagcccaggccagttggaccccacaactctccacagggcttacctcccccccggtaccatgcttaccttcacagggtgaggcccccgccgagatgggagccctgttgcttgagaaagaaacgagaggagcaacggaacgcgtgcacggctcgttgggcgacacgccccgaagcgaggagactctgccaaaggcaacccccgacagcctagagcctgcaggaccatcaagccctgcctcagttaccgtgacagtgggtgacgagggggccgacacgcccgtgggcgcaactccgttgattggggatgagagcgagaatctcgagggagacggcgatttgcgtggagggagaatactcctgggccatgccaccaaatcattcccgtcctccccatcaaaaggcggatcatgtccaagtcgagccaagatgtcaatgacaggtgcaggcaagtctcctccttccgtgcaatcacttgctatgcggttactaagtatgccgggggctcaaggggccgctgcggctggctcggaaccacccccagccacgacttctcccgaggggcagccaaaggtacacagagctcgtaaaactatgtccaaacccggaaatggccagccaccagtacccgagaagcgcccccctgagattcagcactttcgtatgtcggacgacgtccactcactgggaaaggttacctccgacctggccaagagacggaaactgaattccgggggcggattgagtgaggagttggggtccgcaagacgctccggcgaggttaccctcaccaagggagatccaggcagccttgaggaatgggagacggttgtcggggatgactttagcctttactatgacagttactccgttgatgaaagggtagattcagatagcaagagcgaggtagaggcactgaccgagcagctatctgaagaggaggaagaggaagaagaagaggaagaagaggaggaggaggaagaggaggaggaagaggaagaagaggacgaggagtcaggaaatcagtctgaccgaagcggtagctctggtcgacgcaaagcaaaaaaaaaatggagaaaggactctccatgggtcaagccctcacgaaaaagacgcaagagggaacctccacgggccaaagagccccgtggcgtgaacggagtaggttcatcaggacctagcgagtacatggaagtcccattagggagcctcgagctacccagcgaaggaacgctgagtccaaatcacgctggggtttctaacgatacttcttcactggagacagaaaggggctttgaggagctgccactgtgctcttgcaggatggaagccccaaagattgacaggatatcggagcgggccggccacaagtgtatggctactgaaagcgttgatggggaactgtcgggctgcaacgccgctattcttaagcgcgagaccatgcgtccctcatcccgggtggccttgatggtgctttgtgaaactcacagggcacggatggtaaaacaccattgctgcccgggatgcggctacttttgcacggcagggacctttctcgaatgccatcctgattttcgcgtggcacataggttccacaaggcttgcgtgtcccagctgaacgggatggtgttttgcccgcattgcggcgaggacgcgtccgaggctcaggaagtgaccatcccgagaggagacggagtgacaccccctgctggaaccgccgcaccagcacccccaccgctgtcacaagatgttcccggacgtgccgatacctcccagcctagcgcccgcatgcggggacatggcgaacccaggcgtcccccatgtgaccccttggccgacactatcgactcctccggcccgagcctgaccctgcctaacggcggctgcctctctgctgtgggcctgccccttggccctggtcgcgaagcgctagaaaaggcactggtgattcaggagagcgagaggaggaagaagctgcggttccacccacggcaactttacctgagtgtcaaacagggagagcttcagaaagtaatactgatgctcctagacaatcttgatcctaactttcagagtgaccaacagtctaagcgaacgccactccatgccgcagcccagaaaggaagtgtggagatttgccacgtcctgttgcaggcaggggcaaacattaatgctgtggacaagcagcaacggactccactgatggaagcagtagttaacaaccacctggaagtcgcccgctacatggtgcaacgcgggggatgtgtgtattcaaaggaggaggacgggagtacatgtcttcaccacgcagctaaaatcggaaatcttgaaatggtgtctctgctgcttagcacagggcaggtggacgtgaatgctcaggacagtgggggctggacacctatcatttgggctgccgagcacaagcacatcgaagtcatcagaatgttactcacccgcggagctgacgtgaccctaaccgacaacgaggagaacatctgcctgcactgggcctccttcactggatcagccgctatcgcggaagttcttctgaatgctaggtgcgatttgcacgcagtcaattatcacggcgacacccctctccacatcgctgctagagagagttatcatgactgcgtcctcctttttttgtccaggggcgccaaccctgaactgaggaacaaagagggagacacggcctgggacctgaccccggagcgcagcgacgtctggttcgccttacaactcaacaggaaactgcgcctcggcgttggcaatagagccataagaacagaaaagataatctgtcgcgacgtggcacgcgggtacgagaacgtgcccatcccctgtgtgaatggcgttgacggggaaccgtgtccagaggactataaatacattagcgagaactgtgaaactagtactatgaatatagatcggaatatcacccatttgcagcattgcacatgtgtggatgactgctcctcaagcaattgtctctgcggtcagctcagtatacggtgctggtacgacaaagacggtagactgctccaggagtttaacaagattgaaccaccgttgatatttgagtgcaatcaggcgtgcagctgttggcgcaattgtaaaaaccgggtggtccaatccggtatcaaggtgcgcctgcagctgtatcggacagctaagatggggtggggagtgcgcgcccttcagactattccccagggcacctttatctgtgagtacgttggggaactgatatcagatgccgaggccgatgtcagggaggatgactcttatctgtttgatctggataataaggacggggaagtctattgtatcgatgccaggtactacggcaacatctcccgctttatcaaccacctctgtgaccccaatattattccagtgcgcgtgttcatgctgcaccaggacctgagatttccccgcattgcattcttctcttcaagggacatcagaacaggagaagagctcggatttgattacggggacaggttttgggatataaaatcaaaatacttcacctgccagtgtggctccgagaagtgtaagcacagtgctgaggccattgctttggagcagtcgcggctcgcccgactcgacccacaccccgaattactgccggaactcggatccctcccccccgttaacacttag

SEQ ID NO: 268717 - DNA, 3804 bp, Artificial Sequence
  derived and/or modified sequence
atgcggggtctgccacgggggcgaggcctcatgcgcgcccggggcagaggaagggccgcccctccggggtctaggggccgtggccggggcggaccccaccggggtaggggcaggcccagaagtctcctgagtctgccccgcgcccaggcttcatggacaccacagcttagcaccggtctcaccagtcctcccgtaccttgtctcccatctcagggagaggctcccgcagagatgggggccttgctgctggaaaaggagactaggggggcgaccgagcgtgtacatgggtccctgggcgataccccacggtcagaagagactttacctaaggctacccctgactccttggagcccgctggcccatcctctccggcaagtgtcaccgtgaccgtgggcgacgagggcgcggacacccccgtgggcgctaccccactgataggcgatgagtccgaaaacctggaaggtgatggcgatttaaggggcggccgcattctcctgggccatgcaacaaagtcatttccctctagcccctcgaaaggcggaagctgtccgagtcgcgctaagatgtctatgacaggagctgggaaaagccctccttcggttcagtctcttgctatgagacttctgagcatgcccggcgcacagggtgcagcagctgctggaagtgagcccccacccgctactacgtccccagaggggcagccaaaagtccacagggcacggaagactatgagcaagccaggcaacgggcaaccacctgtgcctgaaaaacgccctcccgagatccaacactttcgcatgtctgacgacgtgcacagtctcgggaaggtgacatctgatttagccaagcgtagaaaactgaattctggtggtggcctgtctgaagagttggggagtgcacgacgaagcggtgaggtgaccctgacgaagggcgacccagggagcctggaggaatgggagaccgttgtgggcgatgacttttctctttattatgattcgtattctgtggacgagcgggtggacagcgactcaaaatctgaggtcgaggccctgacagaacagttgtctgaggaggaagaagaggaagaggaagaagaggaagaggaggaggaggaggaggaggaggaggaagaagaggaggacgaagaaagtgggaaccagtccgatagaagtggctcgtccggccgtcgcaaagccaaaaaaaaatggcgtaaggatagcccttgggtgaagccctcccgaaagcgtcgaaagagggagcccccccgcgctaaagagcctcgaggcgtcaacggggtggggtcaagtggcccgtccgaatatatggaagtgccgctggggagcttggagctgccatctgaaggcactctgtcccccaaccacgccggggtgagtaacgatactagtagtctggagacggagaggggctttgaagaacttcccctgtgctcgtgccgcatggaggcacctaagatcgatcgaatcagcgaacgagcaggacataagtgtatggcaacagagtcagttgacggggaactaagcggttgcaacgccgctatactgaagcgcgagaccatgcgcccttcgagccgtgttgcactaatggtattgtgtgaaacacacagggctcggatggttaagcatcattgttgccctggctgtggttacttttgtaccgccggcacatttctggagtgccaccctgattttagagtcgcacacagatttcacaaggcctgtgtcagccaacttaacggaatggttttctgcccccactgtggagaggatgcttctgaggcccaagaggttacaattccaaggggagatggcgtcacccccccagcggggactgctgcaccagctccacctcctctgagccaggatgtcccaggaagggctgataccagccaaccgagcgctaggatgagggggcacggggagccccggcgaccgccatgcgatccgctggcagatacaattgactccagtggcccttccctcacactgcctaacggcggttgcctgagtgccgtgggcctgccgttgggtcccggacgggaggcccttgaaaaggctctcgtgatccaggagtccgaaagaaggaaaaagcttcgatttcaccctcgtcagctttatctgagcgttaagcagggagaactgcagaaagtgattcttatgctcttggataaccttgatcccaacttccaatcagaccagcagtcaaagcgaacccccctgcatgccgccgcccagaagggttctgtagagatttgccacgtgctgctccaggctggtgcgaacatcaatgccgtcgataagcagcagcgtaccccacttatggaggccgtggtgaacaaccacctcgaggtagcacgctacatggtacaacgtggtgggtgtgtctattctaaagaggaggatggttcaacctgtctccatcatgctgcgaaaatcggcaatctcgaaatggtctctctgctgctgtccacaggccaagtagacgtgaatgcacaggacagtggagggtggactccaattatatgggctgccgagcataagcatatcgaggtgatacgaatgctgttgacaagaggggccgatgtgactctgacagataacgaagagaacatatgtcttcattgggcctccttcacgggatccgctgcgattgcggaggtgctcctcaacgctagatgtgatttgcatgccgtaaactaccacggcgacacccctctacatatcgccgccagagagtcttatcacgattgcgtgttgttgtttctgtcccgaggcgcaaacccggaactcaggaataaagagggggacacagcctgggatctgacccccgagcgcagtgatgtctggtttgctctacaactcaacaggaagcttcgccttggggtcggaaaccgtgctatccggaccgaaaagatcatctgccgagatgtggcccggggttacgagaatgtcccaataccctgcgtgaatggagttgacggcgaaccttgccccgaagattacaaatacatctctgaaaattgtgagacctctactatgaacattgaccgaaatataacacacctccagcattgcacatgcgtggacgattgctccagtagtaattgcttgtgtgggcaactaagtattcgttgctggtacgataaagacggcaggctgctgcaggaatttaacaagatcgagccgcccctgatttttgagtgcaaccaggcttgtagctgctggcgcaattgtaagaaccgggttgtgcagagtgggatcaaagtacgtctccaactgtaccgcacagctaaaatggggtggggcgtgcgagccctgcaaacaattcctcagggaactttcatttgcgagtatgttggagaattaatttctgacgcagaggccgatgtgcgcgaagatgatagttacctcttcgatctagataataaggatggtgaagtctactgtattgacgcgagatattatggaaatatatcacgcttcataaatcacctctgcgatcccaacattattcctgttagagtcttcatgcttcaccaggacctgaggttcccgcgcatagcgttcttttcttcccgggacattcgtactggcgaggagctcgggtttgattatggagacaggttttgggacatcaaatccaagtactttacatgtcaatgtggctctgagaaatgcaagcacagtgctgaggcgattgccttggaacagtccaggctggcaaggcttgatcctcatcccgagttgctgcccgaacttggcagcctaccacccgtgaatacctag

SEQ ID NO: 268718 - DNA, 2769 bp, Artificial Sequence
  derived and/or modified sequence
tcagaggtcgaggccctgaccgaacagctgagcgaggaggaagaggaagaagaggaggaggaggaagaggaagaggaagaggaggaggaagaggaggaagaggaagatgaagaatctggaaaccagagtgaccgctccggatccagcgggcggcggaaggcaaaaaaaaagtggcgaaaggactcaccctgggtgaagcctagtaggaagcgcagaaaaagggaacctccgagagcgaaggaaccaagaggcgtgaatggagtcggatcatccgggccgtctgaatacatggaggtcccgctggggtcgctggagctcccgagcgaagggaccctatctccgaatcacgctggcgtgagtaatgacactagctcccttgaaacagaacggggttttgaggagctccctctctgttcgtgtcgtatggaggcccctaagatcgatcgaattagcgaacgtgctggccataaatgcatggccactgagtcggtcgatggagagctgagtgggtgcaacgccgccatcctgaagagggaaacgatgagaccctcctctcgggtggccctcatggtgttgtgtgaaactcatcgtgccaggatggtcaaacatcattgttgcccaggatgcggttatttttgtaccgctggcacttttttagaatgccatcctgattttcgagtggcccatcgtttccataaggcttgcgtcagtcagctgaatgggatggtcttttgtcctcactgtggcgaagatgcaagtgaagcccaggaggtgacaataccacgtggcgacggggtaacaccaccagctggtacagcagcacctgccccccctccactgtcacaagatgtccccggccgcgctgacacttcgcagcctagcgctcggatgcgtggacatggcgaaccaaggcggccgccctgtgaccccctcgccgataccatcgattcctccgggccgtcactgactctgccaaatggtggctgcctttcagctgtcgggcttcctctcgggccgggaagagaagctcttgagaaagccctggtgatccaggaatcagagcgacgcaaaaaactcaggttccaccccaggcaactgtatctgtcggtaaaacagggagaactgcagaaagtgatcctgatgcttcttgataacctagaccctaatttccagtctgatcagcagtctaagaggacacctcttcacgccgctgcccagaaggggtccgttgagatctgtcacgtgctacttcaggcgggagcaaacattaatgcagtagataagcagcagcgtactcctctgatggaggccgtagtgaacaaccatctggaagtcgctcggtatatggtgcagcggggtggctgcgtttacagcaaggaggaggatggtagcacctgcctgcatcacgctgctaagattggcaatctagagatggtgtccctgctcttatccaccggccaggtagatgtgaacgcacaggacagtgggggatggactccaataatctgggcagccgaacacaaacacatagaagtaattcgcatgttgctgaccaggggagcagacgtgactctgacagataatgaagagaacatttgcctgcactgggccagcttcacggggagtgctgccatcgcggaggtcctcctaaacgctagatgcgatctgcacgcagtgaattatcacggcgacactccactccatatcgcagctagggaaagttaccatgactgcgtcttgctcttcctttctaggggtgccaaccctgaactcaggaataaagagggtgacaccgcctgggatctgacacccgagcggagtgacgtgtggttcgctctgcaacttaatcggaagcttcgtctaggggtcggtaaccgcgcaatccgaacagagaagatcatatgccgcgacgtcgcaaggggctacgaaaacgtcccgatcccctgtgtgaatggggttgacggagaaccttgcccagaagactataagtatatctccgagaattgtgaaacttccaccatgaacattgatcgcaatatcactcatttacagcactgcacatgcgtcgatgattgttcatcaagcaattgcttatgtgggcagctctcaatccgatgctggtacgacaaagatggccggctgctgcaggaatttaacaagattgaaccacccctcatttttgaatgtaaccaggcttgtagctgttggagaaattgcaagaatcgggtcgtgcaaagtggtatcaaggtgcggctgcagctatatcgcaccgcgaaaatggggtggggagtgcgggccctccagactatcccacagggaacatttatctgtgaatatgtcggagaactgattagcgatgctgaagcagatgtgagggaggatgattcatacctttttgatctggacaataaagacggagaagtatactgcattgacgctcgttattatggtaacatctcccggtttattaaccatttgtgtgaccctaacatcatccccgtcagagtctttatgttacatcaggatctgaggtttcctcgtatcgctttcttcagcagcagggacatacgcactggagaggaactcggctttgattatggcgaccgcttctgggatatcaaatcaaagtacttcacctgtcaatgcggatccgagaaatgtaagcacagcgccgaggcaatcgccctggaacagtcacgtctggctcgccttgacccgcaccccgaactcctccccgagctggggtccctgccaccggttaatacatag

SEQ ID NO: 268719 - DNA, 3633 bp, Artificial Sequence
  derived and/or modified sequence
atggctgccgccgcgggcgcagccgctgccgcagcagccgagggcgaagcgcctgctgagatgggagccctgctcctggaaaaggaaacgcgcggggcaaccgagcgcgtgcacggctccttgggcgacactccccgtagcgaggaaaccttgcccaaggccacacctgattctttggaacccgccgggcccagctcaccagcaagtgtgacggttacagtgggagatgagggtgccgatacaccagttggggccaccccactcatcggggacgagagcgaaaatctcgagggtgacggagatttaagagggggccgcatcttactgggacatgccaccaaatccttcccctcgtccccgtcaaaggggggaagctgccctagtcgagcaaagatgtctatgaccggcgcggggaagtcccctccatcagtgcagagccttgccatgcgcctgttgagcatgcccggagcacaaggcgctgcggccgctggaagcgaacccccaccagccactacttcccctgagggccagcctaaggtacacagagcccggaagaccatgtctaaacccggtaacgggcagccaccggtgcctgagaaacgaccaccggagatccagcactttcggatgtccgacgatgtgcatagcctgggtaaagtaacttccgacctagccaaacggcgcaaattgaactctggcggtggtctgagtgaagagctgggtagcgcccgtcgatcaggcgaagtgacactgaccaagggcgatccgggcagtcttgaagagtgggaaaccgtcgtcggcgatgacttttcattgtactatgatagttattctgtggacgagagggtcgactccgacagtaaatccgaggtcgaagccctgacagaacagctgtccgaagaagaagaggaagaggaagaggaggaagaagaggaagaggaagaggaggaggaggaggaagaggaagaagatgaagagtccggcaatcaaagcgatcggtctgggtcctccggccggcgtaaagccaaaaaaaaatggcgcaaagactccccttgggtgaagcccagtaggaaacggagaaaacgcgagccccctcgggccaaagaaccgagaggcgtgaacggggtaggttcttccggtccttcagagtatatggaggttcctctgggctcccttgagttgccaagcgaaggtactctttctcccaaccacgccggggtgagcaacgatacttccagcctggagacagaacgcggttttgaggagttacccctttgctcttgtcggatggaagcaccaaaaattgaccggatatctgagcgggcgggtcacaagtgcatggccactgagtccgtagacggcgaactgtccggatgcaatgcagcaattctgaagcgcgaaactatgcggcctagctcacgggtggccctgatggtcctgtgtgaaacacacagagcaagaatggtgaaacatcactgctgccccggttgcggctacttttgcacagcgggcaccttcctcgagtgccaccccgattttcgggtcgcacatcggtttcataaggcgtgcgtatctcagcttaacggcatggtgttctgcccacactgtggcgaagacgccagtgaggcgcaggaggttacaattccacggggtgacggagtaaccccccctgcaggcacagctgcacctgctcccccaccactcagtcaggacgttccaggtcgggcagacacctctcagccgtcagcccggatgcggggacacggagagcccagaagacctccttgcgatcctttggccgacacaatcgatagtagtggcccaagcctcactctgcccaacggtggctgtctctcagctgtgggactgcccctagggccaggccgtgaggcactagaaaaggccttggttattcaggagagtgaacgcagaaaaaagctgaggtttcatcctcgtcagctctacctgtccgtcaagcagggtgagcttcagaaggttatcctcatgctcctggacaaccttgatccgaattttcagtccgaccagcagtcgaaaaggactcctttacatgccgccgcacaaaaaggaagcgtcgagatatgccacgtcttgcttcaggcgggggctaacataaatgcagtggataagcaacagcggaccccgcttatggaggccgtggtgaacaaccatctggaggttgcccgctacatggtgcagagaggaggctgtgtatacagcaaggaggaagacggaagcacctgcctgcatcacgccgctaagatcggaaaccttgagatggtttcacttctattgtctacaggtcaggtggacgtgaatgcacaagactctggtggatggacaccgatcatctgggcggcggagcacaaacacatcgaggtgatccggatgttgttaacgcgcggtgccgatgtgacgctgacagacaatgaggaaaacatctgtttacactgggcctcattcacgggcagcgctgccattgccgaagttttgctaaatgcccgctgcgacctgcacgctgtgaactaccacggcgacaccccgctgcacatagccgcccgtgaatcctaccacgactgtgttctcttattcttgtcaaggggggcaaacccagaactgcggaataaggagggagataccgcctgggacctgaccccagaacgctccgacgtgtggtttgcactgcaattaaatcggaaactgcgcctcggcgtggggaaccgcgcaatccgtacagagaaaattatctgcagggacgtagcgaggggctacgagaacgtccccattccttgcgtgaacggcgtcgacggcgaaccttgccccgaggattacaaatacatttccgaaaactgcgaaacttcaacaatgaacatcgatcgtaacataacccacctacagcactgcacctgcgtggacgactgtagcagttccaattgcttatgtgggcagttgagcattaggtgttggtatgataaagacggtcggttactacaggagttcaataagatcgaaccacccctgatctttgagtgcaatcaggcatgttcttgctggagaaattgtaagaaccgcgttgtgcagtctggaataaaagtccgacttcagctttatcggacagccaaaatggggtggggtgtaagagcattgcagaccatccctcaaggaacgttcatttgtgaatatgtcggcgagctgatcagcgacgcggaagcagacgtgagggaggacgatagctacctgtttgatctcgataacaaggacggggaggtctattgcatagacgcacggtattatgggaacattagccgatttatcaatcacctgtgcgaccctaatatcattcctgttcgggtttttatgctccaccaagatctgcgattcccacgcattgccttcttctcttctagagatattaggacaggggaggaactggggtttgactatggggaccgcttctgggacattaagtcaaaatattttacctgtcagtgcgggtccgagaaatgtaaacactcagccgaggccatcgccctggaacagagtagactggcacgactagatccccaccctgagttactgcctgaattgggctccctaccacccgtcaacacatag

SEQ ID NO: 268720 - DNA, 3804 bp, Artificial Sequence
  derived and/or modified sequence
atgcggggcctacctcgaggacggggactcatgagggcccgcggaagaggcagagccgctccacctgggagtaggggcagaggacggggtggccctcacagaggtaggggcagaccccgcagtctgctctccctgccccgtgcacaagcttcttggaccccgcagttatcaactggtttgacctcccctccggttccgtgtctgccaagtcaaggagaggctccagcagaaatgggggcacttctgctcgaaaaggagacgcgtggagcaacagagagggtccacggctctctgggagatacccccaggtctgaagaaaccttacccaaagctaccccagacagcttggagcccgctggtccaagcagccccgcctcagtgacggtgacagtcggggatgagggtgccgacactccggttggagccactcctctgataggcgacgaaagcgagaatctggagggggatggcgacctgcgtgggggcaggatcctgcttggccatgcaaccaaatccttcccgtctagcccttctaagggcggctcttgtcccagtcgtgccaagatgagcatgacgggagctggtaaatcacccccaagcgttcaatcgctggccatgagactgctctcgatgccaggcgcccagggagcggccgctgctggctccgagccaccacctgcgaccacctctcctgaggggcaaccaaaggtgcatagagcaaggaagactatgtccaagccgggaaatggacagccgcccgtaccagagaagagacctcctgagattcagcactttcgaatgagcgatgatgtgcatagcctcggcaaggtgacatcagacctggccaaaaggcggaaactgaactcagggggggggttaagcgaggaactggggtccgccagacgaagcggcgaagtaaccctgactaagggagatcccggctcacttgaggagtgggagaccgtcgtcggggatgacttttcactgtactacgacagctattccgtggacgagcgggtcgattcagactccaaaagcgaggtggaagcgctgacagaacagttgtccgaggaggaggaggaagaagaagaggaggaagaagaggaggaggaagaggaggaggaagaggaggaagaggaggatgaagagtccggcaatcaaagcgatcgcagcggaagcagtggccgacgcaaagccaaaaaaaagtggaggaaggactcaccttgggtcaagccatctcggaaaaggcggaaaagggaaccaccgagggccaaggaacctaggggcgtcaatggggtgggaagtagcgggccaagcgagtacatggaagtgccactggggtccctggaactcccatctgagggaacacttagcccgaaccatgccggggtctcgaacgacaccagcagccttgagaccgagcgcggtttcgaagagctgcccctctgcagttgccgcatggaggctccgaaaattgacagaattagcgaaagggcaggacataaatgcatggcaactgaatccgtggacggcgaacttagtggctgcaatgctgctatcttgaaaagggaaaccatgagacccagttcacgggtcgctcttatggtgctatgtgagacacatcgcgcccgcatggtgaagcatcactgctgtcccggctgtgggtacttctgtaccgctggcacatttttagagtgtcatcctgacttcagggtggctcacaggttccacaaagcttgtgtctcacaacttaacggtatggtgttctgtccccactgcggcgaggacgcgtccgaggcccaggaagtcaccataccacgcggcgacggggttacacctcccgctggcaccgccgcgcccgccccacctccactaagccaggatgttcccggtagggctgacaccagccagccctccgctcgcatgcggggccatggcgagcctagacgtcctccctgcgaccccctggccgacaccatcgatagctcaggcccttctctaacactgcctaacgggggatgcctaagcgcagtaggactccctctcgggccagggagggaagcgctggaaaaggctctggtcatccaggaatccgagcgccgcaaaaaattaaggtttcatcccaggcagctatatttgtccgttaagcagggggagctgcagaaggttatacttatgctgttagataacctggatcccaactttcagagcgaccagcagagcaagcggaccccactgcacgcggccgcacagaaggggtctgtagagatttgccatgtcctccttcaggccggcgccaacataaatgctgttgacaagcagcagcgcaccccactgatggaggccgtggttaacaatcatcttgaagttgctaggtacatggtacagcggggaggatgcgtgtactcaaaggaagaagacggctccacttgtctccatcacgccgctaagatcggcaacctggagatggtcagtttactcctgagcaccgggcaggtagatgtcaatgcacaggactctggggggtggactcctataatatgggcagctgaacacaaacacatcgaggtgattcgtatgctgctaacgcgcggcgctgacgtcacccttacagataatgaagagaacatctgtctccattgggcgagcttcacggggagcgccgccatcgcagaggttttattgaacgctcgctgcgacctccacgccgtcaactatcatggagatactcctctccacatcgccgcccgagagtcctaccatgattgcgtgctgttgtttctgtctagaggggctaaccctgaactccggaataaagaaggcgacactgcttgggacctgacgccagagcggtctgacgtctggttcgcgctccaacttaacaggaaactgcgactcggcgtgggaaaccgagccattaggactgagaagataatctgtcgtgatgtggccagagggtacgaaaatgttcctattccttgcgtcaacggtgtggacggcgaaccatgcccagaggactataagtatatcagcgagaattgcgagacttctacgatgaacatagatcgcaatattactcacttgcaacattgcacttgcgtcgacgactgtagctcctctaattgcctttgcggccagctctcaatacgttgctggtatgataaggacggtcggttgctgcaggaattcaataaaattgaacctcccttaatattcgaatgtaatcaagcatgcagctgttggagaaattgcaagaatagagtagtccagtctggcattaaggtgagactccagctgtatcgcacagctaagatggggtggggtgtcagagcattacaaactatcccacaagggacgttcatctgtgagtatgtgggcgagctgatatcagatgccgaagctgacgtgagagaggatgattcctatctgtttgatctcgacaataaagatggggaagtatattgtatcgatgcccggtattacggtaatatctctaggttcattaaccatctgtgcgatcctaatattatacctgtccgggtgtttatgctgcaccaagaccttagattcccacggattgcattcttttcgtctcgcgatattcgcaccggagaagagctgggtttcgattatggcgacagattctgggatataaagtccaagtacttcacatgccaatgcgggtccgaaaaatgtaagcactccgccgaggcaattgcactggagcagtctagactcgcgcggctggacccgcacccagagctactgccagaattggggagcctgcctcctgttaatacctag

SEQ ID NO: 268721 - DNA, 3633 bp, Artificial Sequence
  derived and/or modified sequence
atggccgccgccgccggcgccgcagcagctgctgctgccgagggcgaagcaccagccgagatgggtgctctcctgctcgagaaggagacacggggcgctacggaaagggtgcatgggtccttgggagacacaccccggtcagaagaaacactgccaaaagccacacccgacagtctggagcctgcggggccatctagtcccgcctctgtgaccgttactgtcggcgatgaaggcgctgacaccccagttggggccacacccctgattggtgatgagagcgaaaaccttgaaggcgacggcgaccttagagggggcaggatcctcctgggccatgcgactaaaagcttccccagctctcctagcaaaggggggtcgtgtccctcgagagcaaagatgtctatgacgggggcaggcaaaagccccccttcagttcagtccctggcgatgaggttgttatcgatgccgggggcccagggagccgccgcagccggctccgaaccgccaccggccacaactagcccagaaggccagccgaaggttcaccgtgcgcggaagaccatgtccaagcctggtaatggccagccaccagttcccgagaaacggcctccagagatacaacattttcgtatgtccgatgacgtgcattccttggggaaggtgacttcagacctcgctaagcgcagaaaactaaacagcggaggggggctctctgaggagctgggcagcgcaagaagaagcggagaggtcaccctcaccaaaggtgacccgggatcgctcgaagaatgggagactgtggtgggcgatgactttagtctttattatgatagctactctgtggatgagcgtgtggattccgatagtaagtcagaagtggaggccttgacagagcagctctcagaggaggaagaagaagaagaggaggaggaagaagaggaagaagaggaagaggaagaagaggaagaggaagaggacgaggaaagtggcaaccaatctgacaggtcaggctccagtggccggcggaaggctaagaagaaatggaggaaagacagcccctgggtcaaaccctccaggaagcgacggaaaagggagccacctcgcgctaaagaaccccgtggggtgaatggtgttggctcttcgggtccaagtgaatacatggaagttcccctgggttccctggagctcccctcggagggaactttgtcccccaatcacgccggcgtcagcaatgacacaagcagcctggaaaccgagcgtgggtttgaggaactaccgttatgctcctgcagaatggaggcccccaaaatagatcgtatcagcgagagagcaggccacaagtgcatggcaacagaatcagtagacggagagctctcagggtgtaatgctgcaattctcaagcgagagactatgagaccatccagcagagtggcgctgatggttctgtgcgagacccaccgtgcccgcatggtgaagcaccactgctgtccaggctgtggatacttctgcactgctggtacttttttggagtgccatcccgacttccgcgtcgctcacagattccataaggcatgcgtctctcagcttaacggtatggtgttctgccctcattgcggagaggatgctagcgaggcccaggaggtgaccatcccacgaggtgacggagtcacccctcctgcaggcacagccgcccctgcccccccccctctaagtcaggacgtccctggcagggccgacacctcacagccgagcgctagaatgcggggacatggagagcctcggcgccccccatgcgatcctctggccgatacaatagactcctctggcccgagtctcacgctgcctaatggtggatgtctgtccgcggtcggattgccattagggcctggtcgagaggcactggaaaaggctttggtcattcaagaaagcgaaaggcgcaagaagcttcggtttcacccgcggcagctctacctatccgtgaagcagggagaattgcagaaagtgatcttgatgctcttggacaatctggatcccaacttccagagcgaccagcagtcaaaacggaccccactgcacgctgcagcacaaaagggctcagtcgaaatttgccatgtgcttttgcaagccggtgcaaatatcaatgccgtggacaagcaacagagaaccccgctcatggaggctgtcgtcaataatcacctggaggtggctaggtatatggttcaacgcggaggctgtgtctattctaaagaggaagacggtagtacctgcttgcaccatgcggccaaaataggtaacttagaaatggtgagcctgctgctcagtaccggccaggtggacgtgaacgctcaggatagcgggggttggacaccaattatttgggcagctgagcacaaacatatcgaggttataaggatgctattgaccaggggggccgacgtgaccctgacggataacgaagaaaacatctgcttgcactgggccagcttcaccgggtcggccgctattgctgaggtgttgctcaatgctcggtgtgacctgcacgccgttaactatcatggagacactccccttcatatcgctgcccgtgagagctatcacgattgcgttctgttgtttctttcccgaggggccaaccctgaacttaggaataaggagggagacaccgcctgggatcttacacccgagagaagtgacgtgtggtttgccctgcaactcaatagaaagttaaggctaggcgttggcaaccgcgctatacgtacagagaagattatctgcagggatgtcgctcgcggctacgagaacgtccccataccatgtgtaaacggggtcgatggggaaccctgtccagaagattacaagtatatcagcgaaaattgtgaaacctcgactatgaatattgatagaaatatcacgcatctgcagcattgcacgtgcgtcgacgattgctcttcatccaactgcctgtgtggccaactgtctattaggtgctggtacgacaaggatggccgccttctgcaggagttcaacaaaattgagccacccttgattttcgaatgtaaccaggcttgctcttgctggcgtaattgtaaaaacagagtcgtgcagagtggcatcaaggtcagactgcagctttacaggacagccaagatgggatggggagtgagggctctgcagactatccctcaggggacatttatctgcgagtacgttggagagttgatcagtgacgcggaggcagacgtaagagaagacgattcctacctgtttgacctcgacaataaggatggcgaagtctactgcatcgacgcgcgctattatggcaatattagtagattcataaatcacctgtgcgacccaaacattatcccagttcgagtgttcatgctgcaccaggacctgagatttcctcgcatcgcctttttctctagccgggacataagaaccggcgaggaactcggtttcgactatggagacagattttgggacatcaaatcaaaatacttcacctgccaatgtggttcagaaaaatgtaaacactccgcggaggccatcgcgctggaacagagcaggctcgccaggctagatccccatccggaactgcttcctgagcttggctctctgcctccagtgaatacatag

SEQ ID NO: 268722 - DNA, 2769 bp, Artificial Sequence
  derived and/or modified sequence
tccgaggtcgaggcactgaccgaacagttgagcgaggaagaagaagaagaagaagaggaggaggaagaggaggaagaagaagaggaggaagaggaggaggaggaagacgaggaatcaggcaaccaaagcgaccggagtggcagctcgggccgcagaaaggcgaagaagaagtggcgaaaagacagtccctgggtgaagccatccaggaaaaggaggaaaagggagcctcctagagcaaaggaaccacgaggcgtgaacggcgtgggctcttccggcccctctgaatatatggaggttcccttgggcagtctcgaactacctagtgaaggaacgctgagccctaaccacgccggcgtgtccaacgacacgagttccttagagaccgagagagggtttgaggaactaccgttgtgttcatgcaggatggaagccccaaagattgatcggatatccgaacgcgcaggccataagtgtatggccacagaatccgtggacggggagctcagtgggtgtaatgccgccattctcaagcgagaaaccatgcgaccctcctctagagtggcactgatggtgttgtgcgagacccacagggctcgaatggtgaagcatcattgttgtcccggctgtggatatttttgtacggctggaacgttcctggaatgtcacccagattttagagtcgctcacaggtttcataaggcttgtgtgtctcagctcaatggaatggttttttgcccacattgcggggaggacgcatccgaagcccaggaggtaaccatcccccgcggcgatggagtgaccccacctgcaggaactgcagcacctgcccctccaccgttaagccaggacgttcccggcagggcggacacaagccagccttccgcgcgaatgcgtggccacggtgaaccacggcggcccccatgtgaccccctggctgacacgatcgattcttccggaccatcactgactctacccaatggtggctgtttaagtgccgtgggcctcccactgggtcctggtcgtgaggcattagagaaggctttggtgatacaagagagcgagaggcgtaagaagctgcggttccacccccgccagctctatctgagtgtcaaacagggtgagttacaaaaggtgatacttatgctcctggataacctcgatccaaactttcaatctgaccagcagtccaagagaacaccactccatgccgctgctcagaaaggttcggttgagatctgccacgtgctgttgcaggcaggcgccaacatcaatgctgtggacaaacagcaacgcacaccactcatggaagctgtggtgaacaaccatctggaggtggctcggtacatggttcagcgaggtggatgtgtttattctaaggaagaggatggatccacttgccttcatcatgcagctaaaatcggcaacttagagatggtgtctctgctactgtctactggtcaggttgatgtcaatgctcaggattcaggaggatggacgccaatcatttgggccgctgagcacaaacatatcgaggttatccgaatgctgctgacacggggagccgatgtgactctgaccgataacgaggagaacatttgcctgcattgggccagcttcactggctcagcggccattgcagaagtgttgctcaacgccaggtgcgatctacatgctgtaaactaccatggcgatacaccgttacatatcgctgcccgagagtcttaccatgactgcgtgctactgttcttatcccgtggcgccaatcccgaactgcgcaacaaagagggcgataccgcatgggatctgacccccgagcgtagcgatgtgtggtttgcccttcagctgaataggaagcttaggttaggagtgggtaacagagctatccgcaccgagaagatcatctgcagggacgtcgctagaggctatgagaatgttcccatcccatgcgttaacggggtggatggcgagccgtgtcccgaggactacaaatatattagcgagaactgcgagacctccaccatgaacattgaccggaacatcacccacttacaacattgtacatgtgtcgacgactgttcttcgagcaactgtctatgtgggcagctgagcatccgctgttggtacgataaggacggccggctgttacaggagttcaataagattgagccaccccttatttttgaatgcaatcaagcttgctcctgttggcgaaattgtaagaatcgtgtcgtgcagagcggaatcaaagtgagactccagttgtatcgaacagcaaaaatgggctggggggttcgggctttacagactatccctcagggcacgttcatctgtgagtatgtgggtgagctcatctctgatgcagaggctgatgttagggaagatgatagctacctatttgatcttgataataaggatggagaggtatattgtatcgatgcccgttattatggtaacattagccgttttattaatcacctgtgtgatcctaacattatccccgtccgggtgtttatgcttcaccaagacctgcgattcccccgcattgccttcttctcctcaagagacataaggacgggtgaagagctgggtttcgactacggtgacagattttgggatattaaatcaaagtatttcacatgccagtgtggcagtgaaaagtgcaagcatagtgccgaggccatagcgctcgagcagtcccgcctggccagactggatccccatcctgagctcttgccggagttagggtcactaccaccggtcaacacttag

SEQ ID NO: 268723 - DNA, 3633 bp, Artificial Sequence
  derived and/or modified sequence
atggctgctgctgctggagctgctgctgctgctgctgctgagggggaggccccagctgagatgggcgccctgctgctggagaaggagaccaggggggccacagagcgggtgcacggcagcctgggggacacccccaggtctgaggagaccctgcccaaggccaccccagacagcctggagcccgccggccccagcagccctgcctctgtgacagtgacagtgggagatgagggcgctgacacccctgtgggcgccacccccctgattggagatgaaagtgagaacctggagggagatggagacctgcggggcggccgcatcctgctgggccacgccaccaagagcttccccagcagccccagcaagggcggcagctgccccagccgggccaagatgtccatgactggagctgggaagagccccccatctgtgcagagcctggccatgaggctgctgtccatgcctggggcccagggcgctgctgctgctggcagcgagcccccaccagccaccaccagccctgagggccagcccaaggtgcaccgggccaggaagaccatgagcaagccaggaaatggccagccccctgtgcctgagaagaggcctcctgagatccagcacttcaggatgtctgatgatgtgcacagcctgggcaaggtgaccagtgacctggccaagaggaggaagctgaacagcggcggcggcctgtctgaggagctgggcagcgcccggcgcagcggggaggtgaccctgaccaagggggaccccggcagcctggaggagtgggagaccgtggtgggagatgacttcagcctgtactatgacagctacagcgtggatgagcgggtggacagcgacagcaagtctgaggtggaggccctgacagagcagctgtctgaggaggaggaggaggaggaggaggaggaggaggaggaggaggaggaggaggaggaggaggaggaggaggaggatgaggagagcggcaaccagagcgacaggagcggcagcagtggaagaaggaaggccaagaagaagtggaggaaggacagcccctgggtgaagcccagcaggaagaggaggaagcgggagcccccccgggccaaggagccccggggcgtgaatggagtgggcagcagcggccccagcgagtacatggaggtgcccctgggcagcctggagctgcccagcgagggcaccctgagccccaaccacgccggcgtgtccaatgacaccagcagcctggagacagagcggggctttgaggagctgcccctgtgcagctgcaggatggaggcccccaagattgaccgcatcagcgagcgggccggccacaagtgcatggccacagaatctgtggatggagagctgagcggctgcaatgctgccatcctgaagcgggagaccatgaggcccagcagccgggtggccctgatggtgctgtgtgagacccaccgggccaggatggtgaagcaccactgctgccccggctgcggctacttctgcacagctggcaccttcctggagtgccacccagacttccgggtggcccaccgcttccacaaggcctgtgtgtcccagctgaatggcatggtgttctgcccccactgtggggaggatgccagcgaggcccaggaggtgaccatccccagaggagatggagtgaccccacctgctggaacagctgccccagcccccccacccctgagccaggatgtgcccggccgggctgacaccagccagcccagcgccaggatgaggggccacggggagccccggcggcccccctgtgaccccctggccgacaccatcgacagcagcggccccagcctgaccctgcccaacggcggctgcctgtctgctgtgggcctgcccctgggccctggccgggaggccctggagaaggccctggtgatccaggagagcgagaggaggaagaagctgcgcttccacccccggcagctgtacctgtctgtgaagcagggcgagctgcagaaggtgatcctgatgctgctggacaacctggaccccaacttccagagcgaccagcagagcaagaggacccccctgcatgctgctgcccagaagggctctgtggagatctgccacgtgctgctgcaggccggggccaacatcaatgctgtggacaagcagcagaggacccccctgatggaggccgtggtgaacaaccacctggaggtggcccgctacatggtgcagagaggaggctgtgtgtacagcaaggaggaggatggcagcacctgcctgcaccacgccgccaagattggcaacctggagatggtgtccctgctgctgagcacaggccaggtggatgtgaatgcccaggacagcggcggctggacccccatcatctgggccgctgagcacaagcacatcgaggtgatccgcatgctgctgaccagaggagcagatgtgaccctgacagacaatgaggagaacatctgcctgcactgggccagcttcaccggcagcgctgccatcgccgaggtgctgctgaatgcccgctgtgacctgcatgctgtgaactaccacggggacacccccctgcacatcgccgcccgggagagctaccatgactgtgtgctgctcttcctgagcagaggagccaaccctgagctgaggaacaaggagggggacacagcctgggacctgaccccagagaggagtgatgtgtggtttgccctgcagctgaacaggaagctgcggctgggcgtgggcaacagagccatcagaacagagaagatcatctgcagagatgtggcccggggctatgaaaatgtgcccatcccctgtgtgaatggagtggatggagagccctgcccagaggactacaagtacatcagcgagaactgtgagaccagcaccatgaacatcgacaggaacatcacccacctgcagcactgcacctgtgtggatgactgcagcagcagcaactgcctgtgtggccagctgagcatccgctgctggtatgacaaggatggccgcctgctgcaggagttcaacaagattgagcccccactcatctttgagtgcaaccaggcctgcagctgctggaggaactgcaagaacagagtggtgcagagcggcatcaaggtgcggctgcagctgtacagaacagccaagatgggctggggcgtgcgggccctgcagaccatcccccagggcaccttcatctgtgaatatgtgggggagctgatcagtgatgctgaggctgatgtgagagaagatgacagctacctgtttgacctggacaacaaggatggagaggtgtactgcattgatgcccgctactacggcaacatcagccgcttcatcaaccacctgtgtgaccccaacatcatccctgtgcgggtcttcatgctgcaccaggacctgcgcttcccccgcatcgccttcttcagcagccgggacatcagaactggagaggagctgggctttgattatggagaccgcttctgggacatcaagagcaagtacttcacctgccagtgtggcagcgagaagtgcaagcacagcgctgaggccatcgccctggagcagagccggctggcccggctggacccccaccctgagctgctgcctgagctgggcagcctgccccctgtgaacacctag

SEQ ID NO: 268724 - DNA, 3804 bp, Artificial Sequence
  derived and/or modified sequence
atgaggggcctgccccggggccggggcctgatgagggcccggggccggggccgggccgcccctcctggcagccggggccggggccggggcggcccccaccggggccggggccggcccaggagcctgctgagcctgccccgggcccaggcctcctggaccccccagctgagcacaggcctgaccagcccccctgtgccctgcctgcccagccagggcgaggccccagctgagatgggcgccctgctgctggagaaggagaccaggggggccacagagcgggtgcacggcagcctgggggacacccccaggtctgaggagaccctgcccaaggccaccccagacagcctggagcctgctggccccagcagccctgcctctgtgacagtgacagtgggagatgaaggagctgacacccctgtgggcgccacccccctgattggagatgaaagtgagaacctggagggagatggagacctgcggggcggccgcatcctgctgggccacgccaccaagagcttccccagcagccccagcaaaggaggcagctgccccagccgggccaagatgtccatgaccggggccggcaagagcccccccagcgtgcagagcctggccatgaggctgctgtccatgcctggggcccagggcgctgctgctgctggcagcgagcccccaccagccaccaccagccctgagggccagcccaaggtgcaccgggccaggaagaccatgagcaagccaggaaatggccagccccctgtgcctgagaagaggcctcctgagatccagcacttcaggatgtctgatgatgtgcacagcctgggcaaggtgaccagtgacctggccaagaggaggaagctgaacagcggcggcggcctgtctgaggagctgggcagcgccaggagaagtggagaggtgaccctgaccaagggggaccccggcagcctggaggagtgggagaccgtggtgggagatgacttcagcctgtactatgacagctacagcgtggatgagcgggtggacagcgacagcaagtctgaggtggaggccctgacagagcagctgtctgaggaggaggaggaggaggaggaggaggaggaggaggaggaggaggaggaggaggaggaggaggaggaggaggatgaggagagcggcaaccagagcgacagaagtggcagcagcggccgcaggaaggccaagaagaagtggaggaaggacagcccctgggtgaagcccagcaggaagaggaggaagcgggagcccccccgggccaaggagccccggggcgtgaatggagtgggcagcagcggccccagcgagtacatggaggtgcccctgggcagcctggagctgcccagcgagggcaccctgagccccaaccacgccggcgtgtccaatgacaccagcagcctggagacagagcggggctttgaggagctgcccctgtgcagctgcaggatggaggcccccaagattgaccgcatcagcgagagagctggccacaagtgcatggccacagagagcgtggatggagagctgagcggctgcaatgctgccatcctgaagcgggagaccatgaggcccagcagccgggtggccctgatggtgctgtgtgagacccaccgggccaggatggtgaagcaccactgctgccccggctgcggctacttctgcacagctggcaccttcctggagtgccacccagacttccgggtggcccaccgcttccacaaggcctgtgtgtcccagctgaatggcatggtgttctgcccccactgtggagaagatgccagcgaggcccaggaggtgaccatccccagaggagatggagtgaccccacctgctggaacagctgccccagcccccccacccctgagccaggatgtgcccggccgggctgacaccagccagcccagcgccaggatgaggggccatggagagcccaggaggcctccctgtgaccccctggccgacaccatcgacagcagcggccccagcctgaccctgcccaatggaggctgcctgtctgctgtgggcctgcccctgggccctggccgggaggccctggagaaggccctggtgatccaggagagcgagaggaggaagaagctgcgcttccacccccggcagctgtacctgtctgtgaagcagggcgagctgcagaaggtgatcctgatgctgctggacaacctggaccccaacttccagagcgaccagcagagcaagaggacccccctgcacgccgccgcccagaagggctctgtggagatctgccacgtgctgctgcaggccggggccaacatcaatgctgtggacaagcagcagaggacccccctgatggaggccgtggtgaacaaccacctggaggtggcccgctacatggtgcagaggggcggctgtgtgtacagcaaggaggaggatggcagcacctgcctgcaccacgccgccaagattggcaacctggagatggtgtccctgctgctgagcacaggccaggtggatgtgaatgcccaggacagcggcggctggacccccatcatctgggccgctgagcacaagcacattgaagtcatccgcatgctgctgaccagaggagcagatgtgaccctgacagacaatgaggagaacatctgcctgcactgggccagcttcaccggcagcgctgccatcgccgaggtgctgctgaatgcccgctgtgacctgcatgctgtgaactaccatggagacacccccctgcacatcgccgcccgggagagctaccatgactgtgtgctgctcttcctgagcagaggagccaaccctgagctgaggaacaaggagggggacacagcctgggacctgaccccagagaggagtgatgtgtggtttgccctgcagctgaacaggaagctgcggctgggcgtgggcaacagagccatcagaacagagaagatcatctgcagagatgtggcccggggctatgaaaatgtgcccatcccctgtgtgaatggagtggatggagagccctgcccagaggactacaagtacatcagcgagaactgtgagaccagcaccatgaacatcgacaggaacatcacccacctgcagcactgcacctgtgtggatgactgcagcagcagcaactgcctgtgtggccagctgagcatccgctgctggtatgacaaggatggccgcctgctgcaggagttcaacaagattgagcccccactcatctttgagtgcaaccaggcctgcagctgctggaggaactgcaagaacagagtggtgcagagcggcatcaaggtgcggctgcagctgtacagaacagccaagatgggctggggcgtgcgggccctgcagaccatcccccagggcaccttcatctgtgaatatgtgggggagctgatcagtgatgctgaggctgatgtgcgggaggatgacagctacctgtttgacctggacaacaaggatggagaggtgtactgcattgatgcccgctactacggcaacatcagccgcttcatcaaccacctgtgtgaccccaacatcatccctgtgcgggtcttcatgctgcaccaggacctgcgcttccccagaattgccttcttcagcagccgggacatcagaactggagaggagctgggctttgattatggagaccgcttctgggacatcaagagcaagtacttcacctgccagtgtggcagcgagaagtgcaagcacagcgctgaggccatcgccctggagcagagccggctggcccggctggacccccaccctgagctgctgcctgagctgggcagcctgccccctgtgaacacctag

SEQ ID NO: 268725 - DNA, 2769 bp, Artificial Sequence
  derived and/or modified sequence
tctgaggtggaggccctgacagagcagctgtctgaggaggaggaggaggaggaggaggaggaggaggaggaggaggaggaggaggaggaggaggaggaggaggaggatgaggagagcggcaaccagagcgacaggagcggcagcagtggaagaaggaaggccaagaagaagtggaggaaggacagcccctgggtgaagcccagcaggaagaggaggaagcgggagcccccccgggccaaggagccccggggcgtgaatggagtgggcagcagcggccccagcgagtacatggaggtgcccctgggcagcctggagctgcccagcgagggcaccctgagccccaaccacgccggcgtgtccaatgacaccagcagcctggagacagagcggggctttgaggagctgcccctgtgcagctgcaggatggaggcccccaagattgaccgcatcagcgagcgggccggccacaagtgcatggccacagaatctgtggatggagagctgagcggctgcaatgctgccatcctgaagcgggagaccatgaggcccagcagccgggtggccctgatggtgctgtgtgagacccaccgggccaggatggtgaagcaccactgctgccccggctgcggctacttctgcacagctggcaccttcctggagtgccacccagacttccgggtggcccaccgcttccacaaggcctgtgtgtcccagctgaatggcatggtgttctgcccccactgtggggaggatgccagcgaggcccaggaggtgaccatccccagaggagatggagtgaccccacctgctggaacagctgccccagcccccccacccctgagccaggatgtgcccggccgggctgacaccagccagcccagcgccaggatgaggggccacggggagccccggcggcccccctgtgaccccctggccgacaccatcgacagcagcggccccagcctgaccctgcccaacggcggctgcctgtctgctgtgggcctgcccctgggccctggccgggaggccctggagaaggccctggtgatccaggagagcgagaggaggaagaagctgcgcttccacccccggcagctgtacctgtctgtgaagcagggcgagctgcagaaggtgatcctgatgctgctggacaacctggaccccaacttccagagcgaccagcagagcaagaggacccccctgcatgctgctgcccagaagggctctgtggagatctgccacgtgctgctgcaggccggggccaacatcaatgctgtggacaagcagcagaggacccccctgatggaggccgtggtgaacaaccacctggaggtggcccgctacatggtgcagagaggaggctgtgtgtacagcaaggaggaggatggcagcacctgcctgcaccacgccgccaagattggcaacctggagatggtgtccctgctgctgagcacaggccaggtggatgtgaatgcccaggacagcggcggctggacccccatcatctgggccgctgagcacaagcacatcgaggtgatccgcatgctgctgaccagaggagcagatgtgaccctgacagacaatgaggagaacatctgcctgcactgggccagcttcaccggcagcgctgccatcgccgaggtgctgctgaatgcccgctgtgacctgcatgctgtgaactaccacggggacacccccctgcacatcgccgcccgggagagctaccatgactgtgtgctgctcttcctgagcagaggagccaaccctgagctgaggaacaaggagggggacacagcctgggacctgaccccagagaggagtgatgtgtggtttgccctgcagctgaacaggaagctgcggctgggcgtgggcaacagagccatcagaacagagaagatcatctgcagagatgtggcccggggctatgaaaatgtgcccatcccctgtgtgaatggagtggatggagagccctgcccagaggactacaagtacatcagcgagaactgtgagaccagcaccatgaacatcgacaggaacatcacccacctgcagcactgcacctgtgtggatgactgcagcagcagcaactgcctgtgtggccagctgagcatccgctgctggtatgacaaggatggccgcctgctgcaggagttcaacaagattgagcccccactcatctttgagtgcaaccaggcctgcagctgctggaggaactgcaagaacagagtggtgcagagcggcatcaaggtgcggctgcagctgtacagaacagccaagatgggctggggcgtgcgggccctgcagaccatcccccagggcaccttcatctgtgaatatgtgggggagctgatcagtgatgctgaggctgatgtgagagaagatgacagctacctgtttgacctggacaacaaggatggagaggtgtactgcattgatgcccgctactacggcaacatcagccgcttcatcaaccacctgtgtgaccccaacatcatccctgtgcgggtcttcatgctgcaccaggacctgcgcttcccccgcatcgccttcttcagcagccgggacatcagaactggagaggagctgggctttgattatggagaccgcttctgggacatcaagagcaagtacttcacctgccagtgtggcagcgagaagtgcaagcacagcgctgaggccatcgccctggagcagagccggctggcccggctggacccccaccctgagctgctgcctgagctgggcagcctgccccctgtgaacacctag

SEQ ID NO: 268726 - DNA, 3633 bp, Artificial Sequence
  derived and/or modified sequence
atggccgccgccgccggcgccgccgccgccgccgccgccgagggcgaagcaccagccgaaatgggcgcactgctcttggagaaagagactaggggcgcgactgagagagtgcacgggtcactgggtgacactccacggagcgaggaaacgctgcctaaggccacccctgattcactggagcctgccggaccctcgagtccagcctccgtgacagtgacagtaggggacgaaggagcagacactcctgtcggcgcaacgcccctgattggcgatgaatcagagaatctggaaggggacggcgatctacggggagggagaattctgctagggcatgcgacgaagtcttttccgagctcacccagcaaaggcgggtcatgcccctctagggcaaagatgtcgatgacaggggcaggaaaatcccccccgtctgttcaatcgctcgctatgcgtctgctgtccatgcccggcgctcaaggagcagcagccgccggcagcgaacctcctcctgctaccacatcccctgaaggtcagcccaaagtgcaccgggcaaggaagaccatgtccaaacccggcaatggccaaccccctgtgcctgagaaaaggcctccagaaatccagcatttccggatgagtgatgatgtccactcgttaggcaaggtgactagtgacctggccaagcggaggaaactgaactcaggcggtggcctgtcagaggagctcggcagcgcccgccggtccggtgaggttaccttgactaagggcgatccaggatccctggaggaatgggaaactgttgtgggggacgacttttctttgtattacgatagttactctgtggatgagcgcgtcgattccgattctaaaagcgaagttgaagcattgacagaacaactctcagaggaagaggaagaagaggaggaggaagaggaagaagaggaggaggaggaggaggaagaggaggaagaagaggacgaagagtccgggaatcaatctgacagaagcggatcaagcggcagacggaaggccaagaagaagtggaggaaggatagcccatgggtaaaacctagccggaaacggcgtaagcgagagccccctagagctaaggaaccacgcggagtgaatggcgtcggctcctccggtccttctgagtacatggaagtgcccctcggatccctggagcttcctagcgaaggcaccctgtcgccaaatcacgccggtgtttcgaatgatacatcttcccttgagacagaacgggggtttgaggaactccctctgtgctcctgccggatggaagctccaaaaattgacaggatctctgagagggctggacacaaatgtatggcaaccgaatctgtggacggcgagttgagcggttgtaatgccgccatacttaaaagggaaaccatgagaccctcttccagggtggcacttatggtgctgtgtgagacacaccgggctaggatggtcaaacaccactgctgcccaggctgtggatacttctgtactgccggcacattcttggaatgccatcccgatttccgcgtcgcccacagattccataaggcgtgtgtgtcccagctgaatggcatggtgttctgcccccattgtggggaggatgcttcagaggcacaggaggtgacaatcccaagaggggacggagtgacccccccagcaggaactgctgcccctgctcccccccctctatcccaggacgtcccaggaagggcagacacatcgcagcctagtgcacggatgagggggcacggggaaccacggcggccaccatgcgatccattggctgatactattgatagctccggccccagcttaactctgcctaacgggggctgcttgtctgcagtaggactgcccctgggacctgggcgggaggccctggaaaaggccttggtcattcaggaaagtgaaaggcggaagaaactgaggttccacccaagacagctctacctgtctgtaaaacagggggaattgcaaaaggtgatccttatgcttctggataatctagatccaaactttcaatccgaccagcagtccaagaggacaccactgcacgccgccgcacaaaaaggttcggttgagatttgtcacgtgttgctgcaggccggggcaaatatcaatgccgtagataaacaacagaggacccccctgatggaggcagtagttaataatcatctcgaggttgcaaggtatatggtccagcgcggtggctgtgtgtattctaaggaggaagatggctccacctgtctgcaccatgcagccaagattggtaacctcgaaatggtcagtctcctgttatccaccggacaagttgatgtgaacgctcaggattcgggcggttggacacccatcatttgggcagccgaacacaagcatatcgaagtgattagaatgctgctgacgcgaggtgctgacgtgactctcactgacaacgaggaaaacatatgtcttcactgggcttcttttaccggatcggctgcaatagccgaggttctgctgaacgcccgctgtgacctgcacgctgttaattaccatggcgacacccctctgcatattgccgctagagaaagctaccatgattgcgtgctgctgtttctgtcccgcggggcaaatcctgaactgcgcaataaagagggcgatactgcttgggacctcacaccagagcggtccgatgtctggttcgcactgcagctcaatcggaagcttcggcttggcgtcggcaatcgcgctatccgcaccgaaaaaataatttgccgagatgtggcccgcggctacgaaaacgtgccaatcccatgtgtgaatggagtggacggagagccatgccctgaggattataagtacatttctgaaaattgcgagacatccaccatgaacatcgaccgcaacattacccacctccagcactgtacttgtgtggatgactgtagcagtagcaactgcctctgtggccaactttccatccgatgctggtatgacaaagacggccggcttttgcaggaattcaataaaattgagccgcctctgatctttgagtgcaaccaggcttgtagttgctggcgtaattgtaaaaacagggtagttcagtccggaatcaaagtccggctgcaactctaccgaacagccaagatgggctggggggtgcgggcattacagaccatccctcagggcacatttatctgcgagtacgtgggggagcttatctcagatgccgaggccgacgtccgggaagacgacagctatctgttcgatttggataacaaggacggcgaggtatactgtattgacgctcggtactatggaaacatcagcagattcatcaaccacctctgcgatcctaatatcattcccgtaagggtatttatgctccatcaggatctaaggtttccacgaatagccttctttagctcgcgggacatccggactggcgaggaactgggattcgattacggcgatcgcttctgggacattaaaagtaaatacttcacttgccaatgtggcagtgaaaaatgcaagcactctgccgaagctatagctcttgaacagagtcggcttgctaggcttgatccccatccagagctattgcccgagctcggctcgctaccccctgtgaatacctag

SEQ ID NO: 268727 - DNA, 3633 bp, Artificial Sequence
  derived and/or modified sequence
atggccgccgccgccggcgccgccgccgccgccgccgccgagggcgaggcccccgccgaaatgggagccttgctgctggagaaggagacccgtggtgctaccgagcgggtgcatggttcattaggtgataccccccgttcagaagagactctgcccaaggcgactccagactcactggaacccgcaggcccatcttcaccggcatccgtgactgtgactgtcggcgacgagggcgctgatacccccgtgggggctactcccttgatcggcgatgaatctgagaaccttgaaggagacggagacttgcgcggtggccggatccttcttggtcatgctacgaaaagttttccttcatccccaagcaaaggaggctcttgccctagccgcgcaaagatgtccatgacaggcgccgggaagtctcctccttctgtccaaagcctggctatgcgtctgctgagcatgcctggcgcccagggtgcagccgccgccgggagtgagcctccccctgcaacgacttccccagaaggccagccaaaggttcatagagcgcgcaagacgatgtccaagcccgggaacggccagccaccggtcccagaaaagcgccctccagagattcagcacttccgtatgagcgatgacgtccacagccttgggaaggtgaccagcgatctggccaagcgaaggaaactaaactctggggggggactctccgaggaactaggaagcgcaaggcggagcggcgaagtgactctgacaaagggtgatccagggtccctcgaggaatgggagactgtggtgggcgatgatttcagcttatattacgactcatacagtgttgacgagcgggtagattctgactccaaaagcgaagtggaggcccttactgagcagctgagcgaagaggaagaggaagaagaagaggaggaagaggaggaggaggaggaggaggaggaagaggaagaggaggaagacgaggagtcaggcaaccagtctgaccggtccgggtcatccggcaggcgaaaggccaagaagaagtggagaaaggactctccttgggttaagccgagcagaaaacgcaggaagcgcgaacccccaagggctaaagagccaaggggcgttaacggagtgggctcatccgggcccagcgaatacatggaggtgccgctcggatctctggagctcccctcagagggcactctaagtcctaaccatgccggcgtgtcaaatgacacaagctcattggaaaccgagcggggtttcgaagaactaccactttgcagctgcagaatggaagcccctaagatcgacaggatatctgagcgcgcagggcacaagtgcatggctacggagtcagttgacggggaattaagcggctgcaacgccgctattttaaaaagggagactatgaggccttcttcccgtgtggccctgatggttctgtgtgagactcatagagctcgaatggtaaagcatcactgctgtcccggatgtggctatttctgtacagcgggcacctttctggaatgtcacccggatttccgggtggcgcataggttccataaggcctgcgtgtctcaattgaatgggatggtgttctgcccacactgtggcgaagatgcatctgaggcacaggaggtgaccatccccagaggagatggggtgacgccacccgcgggaaccgccgcccccgccccgccacccctcagtcaggatgtcccaggaagagccgatacttcccaaccttcggccagaatgcgcggccatggtgaaccacggcggcctccatgtgatcccctcgctgatacaatcgatagctcagggccatctcttacgctgcccaacggaggctgtctatctgccgtgggactgcctttgggccctggcagagaagccttggagaaagcgcttgtgatccaggaatctgagcgacggaaaaagctgcgcttccatccaaggcagctttacctctccgtaaagcagggagaattacagaaagtgatactgatgttgcttgacaatctggaccccaatttccagagcgaccaacagtctaagcgcacgccactgcatgctgcagcccagaaggggtccgtggagatttgccatgttctgctgcaggccggagccaacatcaatgctgttgacaaacaacagagaacccctctcatggaggccgtcgtgaataaccatctggaggttgcccgctacatggtccagagagggggctgcgtgtattccaaagaggaagatggatccacctgcctgcatcacgccgcaaaaattggaaacctcgaaatggtgtccctcttgctgagtactgggcaggtcgatgtaaacgcccaggatagcggaggttggactcctattatctgggccgcggagcataagcatatcgaggtgatcagaatgctgctgactcgcggcgctgacgtcacactgacagacaacgaggagaatatctgtctgcactgggcctcttttacagggagtgcagccatcgcggaagtcctgctaaacgccaggtgtgacctccatgccgtgaattaccatggagacacacccctgcatattgccgcccgcgaaagctatcacgactgtgtgttgttgtttctttctagaggggcaaacccagaactcagaaacaaggaaggtgacactgcctgggatctgacccctgaacgctccgatgtatggtttgccctccagctcaaccgcaagctaagattgggggtgggcaatcgagcaattcgcacagagaagatcatctgcagagatgttgccagagggtatgagaatgtgccaatcccctgtgtgaatggggtagatggggagccttgtcctgaggattataaatacatatccgaaaactgtgagacaagcacaatgaatattgatagaaatataacacacctgcagcattgtacatgtgtggacgattgctccagcagcaactgcttgtgtggccaactgtccattcggtgctggtacgacaaggacggaaggctgttacaggagttcaacaagattgagccccccctgatatttgagtgtaaccaagcctgctcatgttggagaaactgtaaaaatagggtcgtccaatcaggtattaaggtcaggctccagctgtatcggactgctaaaatgggctggggagtgcgagcactccaaactatcccccagggcactttcatctgcgagtatgtgggggagctgatctcggacgcagaagccgatgtccgggaggacgactcctatctgtttgacctggacaacaaggacggcgaagtgtactgtattgatgctagatactatgggaacatctccaggtttattaatcacctctgcgaccctaacatcataccagtgcgcgtgtttatgttgcaccaggaccttaggtttccacgcatcgcgtttttctcctccagagacattagaacaggggaggaactgggttttgactacggggaccggttttgggatattaagtcaaagtattttacttgtcagtgtggttccgagaagtgtaagcatagcgctgaagcgatcgcattagaacagtcgcgactagctcggttggacccccatcccgagcttttgccagaactggggtcactgccaccggttaatacctag

SEQ ID NO: 268728 - DNA, 3804 bp, Artificial Sequence
  derived and/or modified sequence
atgcggggcctgccccggggccggggcctgatgcgggcccggggcagaggcagggctgctccccccggctcacgcgggagaggacgcggggggccgcatagggggagagggaggcccagaagccttctttccctgcctcgagcccaagcctcctggactccccagctgagtaccggccttacgtcaccacccgtcccctgtttaccctcccaaggtgaggcccctgccgaaatgggagctttactgcttgagaaagagaccaggggggccacagagagagtacatggctcattgggagataccccacgcagtgaagagactttgcccaaggccaccccggacagtctcgagccagccggtccaagctcgcccgctagcgtgaccgtcacggtaggagacgagggtgctgatactcctgtcggcgccacaccattaattggggacgagtcagaaaacttggaaggcgatggggatttacggggcgggcgcatcctcctggggcatgcaactaagagttttccgagtagcccgagcaaaggcggatcttgtccaagtcgagctaagatgtctatgactggtgcaggaaaatcaccaccttctgtgcagtccctggctatgcgcctcttgtcaatgcccggagcgcagggagcagcggcagccgggtctgagcccccaccagcaacgacgtcaccggagggccagcccaaagtgcacagggccaggaagactatgagtaagccaggcaatggccaaccccccgtcccggaaaaacgcccacctgaaatccagcacttccggatgtctgacgatgtccattctcttggcaaagtgacaagtgatttggccaaacgcaggaagcttaattctggcggaggactcagcgaagagctagggtctgcccgccgctcaggagaagtcacacttaccaagggagatcccggctccctggaagagtgggagaccgtggtcggcgatgacttttcactgtactacgattcatatagcgtcgatgaaagggtggactccgatagcaaatctgaggtagaggcccttacagagcagctctccgaggaagaagaggaggaagaagaagaagaagaagaagaagaggaagaggaggaggaggaggaggaagaggaagatgaagaaagcggaaaccagtcagaccggtccggctcctcggggcggcgcaaggctaaaaaaaagtggcggaaggatagcccctgggtaaaaccaagcagaaagaggaggaaaagagagcccccacgcgccaaggagccacgtggggtgaacggcgtagggtcttccgggccttccgagtacatggaggtgcccttgggaagtctagagctccccagcgagggcaccttgagcccaaaccacgctggtgttagtaacgatacttcaagccttgagacggaacgagggttcgaagaactacctttatgtagctgccgtatggaggcaccgaaaatcgaccgcataagcgagcgcgcagggcacaaatgcatggccacggaatccgtggacggtgaacttagcggatgcaacgcagcgatactcaagagagaaacaatgaggcctagcagcagggtcgctctcatggtgctctgcgagacccatcgtgcacgcatggtgaagcatcactgctgtcctggatgcgggtacttttgtacggctggtacttttctcgagtgtcacccagattttcgcgtggctcacaggttccacaaggcttgcgtctcccagttgaatggaatggtgttttgcccccactgtggcgaggatgcttcggaggcccaggaggtgacaatcccccgaggtgacggtgtaacccccccggctggcaccgccgcccctgccccacccccactgtctcaggatgtgcctggcagagcagataccagtcagccttctgcccgaatgcgaggacacggggagcctcgccgcccaccttgcgatccgttagccgacacgatcgactctagcggaccttcgctgacactcccaaacgggggttgtttgtccgcggttggattgcccctgggccctggtcgggaagcacttgagaaagcccttgttattcaggaaagcgaacggcgcaaaaagctccgctttcatccccgccagctgtacttatcagttaaacagggcgagctacagaaggttatcctgatgctgttagataatctcgatccaaactttcaatccgaccagcagtctaagaggacacctctgcatgcagccgcacaaaagggctcggtggaaatttgtcacgtgctcctacaggccggagcaaacatcaatgccgtggacaaacagcagcggaccccactgatggaagccgtggtaaataatcatctggaagtagcgagatacatggtgcagagaggcggatgtgtgtactccaaagaggaggatggcagcacctgcttacaccacgccgccaagatcggaaatctggagatggtgagcctcctcctctccaccgggcaggtcgatgtgaacgctcaggactctggcggatggactcccattatctgggcagcggaacacaaacatatcgaggtgatccggatgctcctcactaggggcgccgacgtgaccctgactgacaatgaagagaacatctgcctgcactgggcttcttttacggggagtgccgcgatcgcagaagtactccttaatgcgcggtgcgacctgcatgccgtaaactaccacggcgacacacctttacatatcgctgcccgagagtcttaccatgattgcgttctgctattcttatctcgaggggccaaccccgagctgcgcaataaggaaggggatactgcctgggatctcacgcccgagcgatctgacgtgtggtttgcactacagctgaacagaaaactgcggctgggcgtaggcaatcgcgccatcagaactgagaagattatctgccgtgacgtagcgaggggctacgagaacgtgccgataccttgtgtaaatggggtggacggggaaccatgtccagaggattataaatatatttccgaaaattgcgagacttcaactatgaacattgataggaacatcacacatctccagcactgtacatgcgtggacgattgctcctcttcaaactgcctctgcgggcagctgtcaattcggtgctggtacgacaaagacggccgtctgctgcaggaattcaataagattgaacccccactcatctttgagtgcaaccaggcatgctcttgctggaggaattgcaagaaccgcgtggtgcaatcagggatcaaagtaaggctccagctgtatcggaccgcgaagatggggtggggagtgcgggccctgcaaactatcccccaaggcacctttatttgtgagtacgtcggggagctgatttcagacgccgaggcagatgttagagaagatgattcttatctattcgatctcgataataaggatggggaagtgtattgtatcgacgcgaggtactatggtaatatctccagatttattaaccacctgtgcgatccaaatattataccagtgcgggtcttcatgctgcaccaggatctccgcttccctaggatcgcatttttttccagcagggacattagaaccggtgaagaactgggattcgactacggcgacagattttgggatatcaaatcgaaatactttacatgtcagtgtggcagcgaaaagtgtaagcactctgctgaggccatcgccctggagcaatctcggcttgctcggctcgatccacatccggagctgctgccggaattgggctcgctacccccagtgaacacctag

SEQ ID NO: 268729 - DNA, 3804 bp, Artificial Sequence
  derived and/or modified sequence
atgcggggcctgccccggggccggggcctgatgcgggcccggggccggggacgcgctgctccccctggtagtcgaggccgtggacggggagggccccaccgcgggagaggcaggccacgcagtctgctttcgttaccaagggcccaggcctcctggacaccacagctttccacgggcctcacctcgccccccgtgccttgtcttccgtctcagggagaagcaccagctgaaatgggggcactgctgctggaaaaggagacgaggggagccaccgaacgagtgcatggcagtctgggagatactcccaggtcagaagagaccctgcccaaggcgacgccggatagcctcgagccggccggaccatcgtcgccggctagcgtgaccgttaccgtgggtgatgagggagccgacactcctgtgggggctacacccctgatcggagacgaatctgagaacctggaaggggatggagacctacgcggaggtcgtatccttcttggtcacgccactaagagttttccaagttctccttcaaaaggcggcagttgtccatcccgcgcaaagatgtctatgaccggggcaggaaaaagcccacccagcgtccagtcattggccatgcggcttttatctatgcctggcgcccaaggtgctgccgccgctggttccgaacccccgcctgccaccacaagcccagaggggcagccaaaggtgcacagggcacggaaaacaatgagcaagcccggaaacggacagccccccgttcccgagaagcggcccccagagatccagcactttagaatgtccgacgacgttcactccctgggaaaggtcaccagtgacctcgcaaagcgcagaaagctgaatagtggcgggggtctaagtgaggagctgggttctgcccggcggtctggggaggtaacccttaccaaaggcgatccagggtccctggaagagtgggaaacagtggtgggggacgatttctcgctctattacgattcttacagcgtagatgaacgtgtggactccgactccaaatctgaggtggaagctcttactgagcagctgagcgaggaggaagaggaggaagaggaagaggaggaagaggaggaagaagaagaggaagaggaagaggaagaggaagatgaggagagcggcaaccaatctgaccgcagtgggtcctccggaagacgtaaagctaagaaaaagtggaggaaggatagcccatgggtgaagccatccagaaagagaaggaagcgtgaaccccctagagctaaggagcccaggggagtgaacggcgtgggttcttccggaccctcagagtatatggaagtgcccttgggcagtctagagctgccctctgaagggactctctccccaaaccatgccggtgtttctaacgatacctcgagtctggagaccgaacgtggctttgaggagctgccactatgcagttgtaggatggaagccccaaagatcgacaggatctccgagagggccgggcataaatgcatggcaaccgaatctgttgacggggagttatccggttgtaacgctgcaatcctaaagcgagagaccatgcgaccctcttctcgagtagcactgatggtgctgtgcgagactcaccgcgcgagaatggtgaagcaccactgttgtccaggttgcggttacttttgcactgcaggcacgttcctggagtgccaccccgattttcgtgtcgcccatcgattccataaggcgtgcgtgagtcagctcaatgggatggtattttgcccccactgcggcgaggacgctagtgaagcacaggaagttacgattccgcgaggggatggtgtcaccccccctgctggcaccgcagcccctgcacccccccctctatcacaagatgtgcccggtagggcagacacaagccagccaagcgctcgcatgaggggacacggggagcctagaagaccaccctgcgaccctctcgcagatacgattgactcctccgggccctctctgacactgccgaacggcggttgtctgtccgccgtgggactcccactgggccctggacgcgaggcactggaaaaagctttggttatccaagaatcggaaaggcggaagaagctcaggttccatcctcgccagctgtatctgtctgttaaacagggggagttgcagaaggtcatcctgatgctgctggataacctcgaccctaactttcagagcgaccaacagtctaagcgtacaccacttcatgccgcagcgcagaaaggatcggtcgagatttgccacgtgctcttgcaagctggggctaatatcaacgccgtcgacaaacagcagaggacacccctcatggaggccgtcgtgaacaatcaccttgaggtggccagatacatggtccagaggggaggttgtgtctattctaaggaggaggatggcagcacttgtttgcaccatgcggccaagattgggaacctggagatggtcagtctgcttctgtccactggccaagtggatgtcaacgcgcaagactcaggcggttggacacccatcatttgggctgctgaacataagcatatcgaagttattaggatgctcctaacccggggggccgatgtgactctcaccgacaatgaggagaatatctgtctacactgggcatcctttactggatcagccgccatcgctgaggtactgctcaacgctaggtgcgatttgcatgccgtaaactatcacggggacacacctctgcatatcgcagccagagagagttatcacgattgtgttctgttattcttgagccggggcgcaaacccagaactgcgtaataaagaaggggatactgcttgggatctgacacctgaaagatcagatgtttggttcgcactgcagttaaatcggaagcttcgacttggagtgggaaaccgcgcaatcagaacggaaaagattatctgcagagacgtagctaggggctatgagaacgtgccaataccatgtgtcaatggagttgatggtgagccatgcccagaggattataaatatatctctgaaaactgtgaaacatcaaccatgaacattgatcgaaatatcacccacttgcagcactgcacttgcgttgatgattgcagctcctctaactgtctgtgtgggcaattgtccatccgatgctggtacgacaaggatggaagactgctccaggagtttaataagattgaacccccactgatctttgaatgtaatcaggcatgttcttgctggcgcaactgcaagaacagagtcgtgcagtcggggatcaaggttcggctgcaactgtaccgcacagcgaagatgggatggggggtgcgcgcgctccagactatcccccagggcacattcatctgcgagtacgtgggggagcttatctctgacgcggaggccgatgtgagagaagatgattcctatctatttgacctagataataaagacggcgaagtctattgtatagacgcacgctactacggcaacatctcgcggttcattaatcacctgtgtgacccaaacattatccccgtgcgcgtttttatgctgcaccaagacctgcgctttcctaggattgcgttcttttcgagccgagatataaggacgggggaggagttgggctttgactatggcgatcgcttctgggacatcaagagcaagtatttcacgtgccagtgcgggagcgaaaaatgtaagcacagcgctgaggctatcgctctggaacagtcccgcttggcgcgcctggacccccaccccgagcttctccccgaactgggtagtttacctcccgtgaacacttag

SEQ ID NO: 268730 - DNA, 3804 bp, Artificial Sequence
  derived and/or modified sequence
atgcggggcctgccccggggccggggcctgatgcgggcccggggccggggaagagccgcacctcctggctcccgaggccgaggccggggcggacctcatagaggcagaggccgtccaaggagcctactcagtctacctcgtgcccaggcatcttggacgcctcaattgtccaccggactgacaagccctccagtgccatgcttgccatcccagggagaggctcccgccgagatgggggcgctcctgctggaaaaggaaacaagaggagccactgagcgtgtgcatggctctctgggagacacacctcgatccgaggagactctgccgaaagcaacaccagatagccttgaacctgcgggcccatccagcccagcctccgtcacagtgacagtgggcgacgagggagctgacacacctgtgggggccacccccctgataggggacgaatcagaaaacctggaaggcgatggcgatctccgaggtggccgtatcctgttgggccatgccacaaagtcttttccatccagtccatctaagggcgggtcttgcccttctcgcgcaaagatgagtatgaccggcgcagggaaatcacctccgtccgtccagagcctggccatgaggctattgagcatgccaggcgcccagggggccgccgccgcaggtagcgagcctcctcccgccacgacttctccggaggggcagcccaaagtgcatcgcgcgcgcaagaccatgtctaaaccgggcaatgggcaacctcccgtccccgagaagcgaccgcccgaaattcaacactttagaatgagtgacgatgtacattctcttggaaaggtgacatcagacctggccaaacggcgcaaactgaactcgggtggagggctgtccgaggagctgggctccgccagaagatccggggaggttaccctgaccaagggtgaccccggcagcctggaagaatgggaaacagtcgtgggagatgactttagtctgtactacgactcctacagtgtagacgaacgcgtggactccgactctaagtccgaggtcgaagcactcaccgaacagctctccgaggaagaggaggaagaagaagaagaagaggaggaggaagaagaggaggaagaagaggaggaagaagaggaagatgaggagtctgggaatcagtctgatcgatccggctccagtggaagacgcaaggctaaaaaaaaatggcggaaggatagcccatgggtgaaaccctcaaggaagagaaggaagagggagcccccccgggctaaagagcctcggggcgtcaacggtgtgggctcgtcaggaccgtcggagtacatggaggtgcccttggggtctctggaacttccttccgaagggacgctctcaccaaatcatgcaggggttagcaacgacacatcgtccctcgaaactgaacgtggattcgaagaactgccactttgcagttgccggatggaagcgcccaaaattgaccgaataagtgagagagccgggcataaatgtatggcgaccgagtctgtggatggcgagctgtccggctgcaatgctgcaatccttaagcgggaaaccatgcgtccctcatcacgggtggcgctcatggttttgtgcgaaactcatagggctcggatggtaaaacatcactgttgtcccggatgtggttatttttgtaccgccggcacatttcttgagtgtcacccagacttcagagtcgcccataggtttcacaaggcgtgtgtgtctcagctcaatgggatggtgttttgtccacattgcggcgaggacgcttccgaagcacaagaagtgacgattccccgaggggatggtgtgaccccgcctgccggtaccgcagccccagcccctcccccactgtctcaggacgtgcccggacgagccgatacatctcagccttcagcacggatgcgcgggcatggagagccacgccgccctccctgcgatcctctcgcggatacaatagattcctccgggccctccctgactcttcccaacggcggttgcctatcggctgtgggcctgcccctcggtcccgggagagaagccctggaaaaggccctcgttattcaagaatctgaacgtcgcaaaaagctgcgatttcacccgcgccaactctacctgtcagtgaaacagggtgagctgcagaaggtcattttgatgttgctggataacttagaccctaattttcagtcagaccagcagagtaagcgaactcccctacatgctgcggcgcaaaaaggttcagtcgagatatgccatgtcctgctccaggctggggcaaatatcaacgccgtagacaaacagcaacgcacccctctcatggaagcagttgtgaataaccatcttgaggtcgccagatacatggttcagcgagggggttgcgtgtacagtaaagaggaagacggtagtacctgtttgcatcacgcagctaagatcgggaacctggagatggtgagccttctgctcagcacgggccaagtggacgtgaacgctcaggacagcggcgggtggacgccaatcatatgggccgcagaacacaaacatatcgaggtgatcagaatgcttctcacccgaggcgcggacgtaaccctaaccgataacgaggagaatatctgcctccactgggcttccttcactggctccgcagcaatcgcagaagtactgcttaatgcaaggtgtgacctacacgcagtaaactatcacggcgacactccacttcacatcgcagctcgggaaagctaccatgactgcgtgctgctgttcctgagtcggggtgcaaatcccgaactacgcaataaggaaggagatacagcgtgggatctgactcctgagcgaagcgatgtctggttcgccctccaactgaatagaaagctgcggctcggagtaggcaaccgcgccattaggacagagaagataatctgcagagacgttgcacggggatacgagaatgtccccatcccctgtgtaaacggggtcgatggtgaaccctgcccagaggattataaatacattagcgagaactgcgaaacttctacgatgaatatcgatcgcaatatcacacacctgcaacattgtacctgtgtcgacgactgttcctcttcaaactgtctctgtgggcaattatccatccgctgctggtatgacaaagacggccgactgctgcaggagtttaacaaaatcgagccccccctcatcttcgagtgcaatcaggcctgctcttgctggaggaactgcaagaacagagtggtgcagagtggaatcaaggtacggcttcagctgtatcgtactgccaaaatgggttggggtgtgcgtgctctccagaccatcccgcaaggcactttcatttgtgaatatgtgggcgaattgatctccgacgcagaggctgacgttagagaagacgactcatatctcttcgatctcgacaacaaagatggggaggtctattgtatcgacgctagatactatggcaatattagccgcttcattaaccatctttgtgatcccaacataataccggtgagagtcttcatgctccatcaggatctgaggttcccccgaatcgcctttttttcaagtagagacattagaacaggagaggagttgggtttcgactatggagatcggttttgggacatcaagagcaaatacttcacttgccagtgcgggagcgaaaaatgtaaacattcggcagaggccatcgccttggaacagtccaggctggcccggttagatccccacccagaactgctgccagagttaggctcgctgccaccagtgaatacatag

SEQ ID NO: 268731 - DNA, 2769 bp, Artificial Sequence
  derived and/or modified sequence
agcgaggtggaggccctgaccgagcagctgagcgaggaggaggaggaggaagaagaagaggaggaggaagaggaggaagaggaagaggaggaagaagaagaggaagacgaagaaagcggaaatcaaagcgatcgctctgggtcctccggaaggagaaaagccaagaaaaaatggaggaaagacagtccctgggtaaagccatctcgaaagagacggaagcgggagcctccgcgggctaaggagcctcgtggcgttaacggcgtcggatcatcagggccctcagagtatatggaggttcctttgggttctttagaattgcctagcgaagggaccctctcacctaaccacgcgggagtgagtaacgacacctcttctcttgagaccgagcgcggtttcgaggagcttccgctgtgttcctgccgtatggaggctccaaaaatcgaccgcatctcagagcgggccggccacaagtgtatggccactgaaagtgtcgatggggagctcagcggctgcaatgccgcgattctcaaaagagagaccatgagaccatcatcacgggtggcactcatggtgctctgtgagactcatcgggcgcggatggtcaagcaccattgttgccctggctgcggatatttttgcaccgcaggaacattcctcgagtgccatccagatttcagggtggcacaccgtttccacaaagcttgtgtgtcccagctcaatggcatggtgttctgcccccactgcggagaggacgcatccgaagctcaggaagtgaccatccctcgaggagacggagtaacgccccccgctggcaccgccgcccctgcaccacctccactgtctcaagacgtgcctgggcgcgcagatacctctcagcccagtgcccgcatgcgtggtcatggggagccccgaagaccaccgtgtgatccattagccgatactattgattcctctgggcctagtcttactctgccaaacggggggtgcctgtccgctgtcggccttcctctggggcccggaagagaagccctggaaaaggcccttgtcatccaggagtccgaacggcgcaagaagcttcggtttcaccctagacagctctatctttcagtgaaacagggtgagctgcagaaagtcatcctgatgctcctcgataatctagacccaaatttccagtctgaccagcaatcgaaacgcacccccctgcatgcagcggctcagaaaggcagcgtggaaatatgtcacgtccttcttcaggccggtgccaacatcaacgccgttgataaacaacaaagaacaccattgatggaagccgtcgttaataatcatttggaggtggcccgatatatggtgcaacgtggcgggtgcgtgtattccaaagaggaggatggaagcacttgtctgcaccacgcggccaagatagggaatcttgaaatggtttctctgctactttccaccggccaagtcgacgtcaatgctcaggattcggggggttggacacctattatttgggctgccgagcacaaacatatagaagttatcaggatgctgctgacccgaggagccgatgtcacacttaccgacaacgaagaaaacatttgtctacactgggctagctttaccggaagtgccgctatcgctgaggttctgctaaacgctagatgcgacctgcacgcagtaaattatcacggcgatacccccctgcacatagctgcccgtgaaagctatcacgactgtgtcctgctgttcttatcaagaggtgccaatcccgagctccgcaacaaagaaggggatactgcatgggacttgacgccggaaaggagtgatgtgtggtttgctctgcagttgaatcgcaagctccggcttggcgttggaaaccgcgcaatccgcacagagaaaattatctgtagagatgtggctagaggctatgaaaacgtccccatcccttgcgttaacggcgttgacggcgaaccctgtcctgaggactacaagtacatctcagaaaactgcgaaactagcactatgaatatcgatcggaacatcacccatcttcagcactgtacatgcgtcgacgactgctccagctcaaattgcctgtgcgggcagctctctattcgctgttggtacgacaaggatggccgccttcttcaggagttcaacaagattgagccacccctgatcttcgagtgtaaccaggcatgcagctgctggaggaactgcaagaatagggtggtgcagtccggcattaaggtccgccttcagctttatagaacggccaagatgggatggggggtgagagctttgcagaccattcctcagggaacgttcatttgtgagtatgtcggtgagctcattagcgatgccgaggccgacgtgagagaggacgactcttacctgtttgatctggacaacaaggatggggaggtttattgtatcgacgcccgatattatggcaacatctctcggtttatcaaccatttgtgcgatccaaacataattccggttagagtctttatgctgcatcaggatctcagatttccgcggatcgcattttttagtagtcgcgatattcggaccggtgaggagctcggctttgactatggagaccgattttgggacatcaagtctaagtactttacttgccagtgcggctctgagaaatgcaaacattccgctgaggccatcgccctggaacagtcacgtcttgcgcgactggacccacaccctgagctcttgccggagctaggctcgctgcctcccgtgaacacgtag

SEQ ID NO: 268732 - DNA, 3633 bp, Artificial Sequence
  derived and/or modified sequence
atggccgccgccgccggcgccgccgccgccgccgccgccgagggcgaggccccagccgagatgggcgcattgcttctggagaaggaaacccgaggggctactgaaagagtccacggtagtctgggtgacacaccgaggtcagaggagaccctcccaaaagctactcccgattccttagaaccggcaggacccagttctccagcttctgtcacagttacagttggcgacgagggagctgacactcctgtcggcgcgacccccttaattggagacgaaagtgagaatttggaaggcgatggggacttgcgggggggtaggattctgttaggccatgccacgaagtctttcccatccagcccctccaaggggggttcctgcccatccagggccaaaatgagtatgacaggcgccggcaagtcccctcccagcgtgcagtctttggccatgagactgctctcaatgccaggagcccagggggcggccgctgcgggttcggagcctcctcccgcaaccacatctcctgagggtcagcctaaggtacacagagcaaggaagaccatgagcaaacccgggaatggccagcccccagttccagaaaagcgaccacctgagatccagcattttagaatgagcgacgatgttcattccttgggaaaagtcacatctgacctcgccaagcgcagaaaactgaatagcgggggaggcctctccgaggagttgggaagcgcccgccgctctggtgaggttaccctcacaaaaggcgatccaggaagtctggaggagtgggaaactgtggtgggtgacgatttttcattatactatgactcctattccgttgatgagcgggtggattctgatagcaagagcgaggttgaagccctgaccgaacaactgagcgaggaggaagaagaggaggaagaggaggaggaggaagaagaggaggaggaggaggaagaggaagaggaggaagacgaggaatctgggaaccaatctgacaggtcaggctcatccggacgccggaaagccaagaagaagtggcgaaaagactccccatgggtcaagccaagcagaaagagaagaaaacgggaacccccacgggccaaggaaccacggggcgttaacggagtgggaagctcgggacctagcgaatatatggaggttcccctgggaagcctggagctgccgtcagaagggaccctgtcgccaaaccatgccggggtgtcaaacgacacgtcctctctggagaccgagagaggattcgaagaactcccactatgctcctgtcgaatggaagcacccaaaattgatcggatcagcgaaagggcaggccacaagtgcatggccacggaaagcgtggacggggaattgtccggctgtaacgcagccatattgaagagagagaccatgcgcccctctagccgcgttgcattgatggtattatgtgagacacaccgtgcgaggatggtcaagcaccactgttgcccagggtgtggttatttttgcaccgccggcaccttcctcgaatgtcacccggacttccgagtggcacatcgctttcacaaagcctgtgtgtcccagctcaatggcatggtgttttgtccacattgcggggaggatgcttccgaggcacaggaggtgaccattccacgaggagacggagtgacacctcccgctgggacagctgccccagcccctccacctttgagccaggatgttcctggacgggctgacacgtctcagccttccgcccgcatgcggggccacggtgagccgagacggcccccgtgcgatccactagccgataccattgattcgtctgggccatcattgactttgccaaacggaggatgtctcagcgctgtgggtctccctctggggccaggcagagaggcactggaaaaggccttagtgatccaggagagcgaacgacggaaaaaactgcggtttcacccaaggcagctgtacctgtccgtgaaacagggcgaactgcagaaggttatccttatgctcctcgataacctggaccccaactttcagtctgatcaacagagtaagcgcactccattacatgccgccgctcagaaggggtcagtcgagatttgccatgtactgttgcaggccggcgcaaatatcaatgcggttgacaaacagcagcgaactccgctcatggaggccgtggtgaacaatcatttagaagtggcccggtacatggtgcagaggggcgggtgtgtgtacagtaaggaagaagacggatccacatgcctccatcatgccgccaagataggcaacctcgagatggtttcccttctattatccaccggtcaggtcgacgtgaacgcccaggacagtggcgggtggacgcctatcatttgggctgctgagcataagcatatagaagtgattcgcatgctgttaacccgtggggccgacgtcactttgaccgataacgaggaaaatatttgtttgcactgggcatcttttaccggaagcgccgctattgctgaggtgctgctgaacgcacgttgcgacttacacgccgtaaactaccatggtgacactcccctgcacatcgccgctagagaatcgtatcatgactgtgtgcttttattcttgtcacgaggcgcaaatcccgagctaaggaacaaagaaggagatactgcgtgggatctgacaccagaacgctccgatgtgtggttcgcacttcagcttaatcgcaagttgcgcctcggcgtcggcaaccgggcaatccggacagagaagatcatctgccgggacgtagcacggggatatgagaacgtccccattccttgcgtaaacggagtggatggggagccgtgcccggaggactataaatacatttcagagaattgcgagacctctactatgaacatagaccgcaatatcactcacctccaacattgcacatgcgtcgacgattgctcaagctctaattgcctgtgtggccagctttccataagatgttggtacgataaggacggaagattgttgcaagagttcaataagattgagcctccactcatctttgagtgcaatcaggcatgttcttgctggcgtaactgtaaaaatcgtgtggtgcagtccggaatcaaggtgaggttacaactataccggacggcaaaaatgggttggggcgtgcgagccttgcagaccattccccagggaactttcatctgtgaatatgtgggggagctgatttcggatgctgaggccgacgtccgcgaggatgatagctacttgtttgatcttgacaataaagatggcgaggtgtactgtatcgacgccaggtactatgggaacatttcaagattcattaaccacctgtgcgaccccaatatcattccagttagggtttttatgctacaccaggatctaaggttccctcggattgccttcttttccagccgggatattagaactggcgaggagctggggttcgactatggcgataggttttgggatatcaagtccaagtactttacttgtcagtgcggatccgaaaagtgcaagcactcagctgaagccattgcattagaacaaagtcgtctggctcggctggacccacaccccgaattactgccagagcttggctccctgccacctgttaacacctag

SEQ ID NO: 268733 - DNA, 3804 bp, Artificial Sequence
  derived and/or modified sequence
atgcggggcctgccccggggccggggcctgatgcgggcccggggccgcggtagagccgcaccccctggatctcgaggtcgaggcagaggcggcccccacagaggcagaggaagaccacgctcactgcttagtttaccacgggctcaggctagttggactccacagctgtccactggcctcaccagtccgcccgtgccttgtctgccctctcagggagaggcacccgccgaaatgggtgcgctactcctggagaaagaaaccagaggtgctaccgagagggtacatggtagcctgggcgatactcctcggtctgaggaaactctcccaaaagccaccccagatagtctggaacctgctggacctagctctccagcatctgttactgtcactgtgggagacgagggcgcagatacgccagttggcgccacccctctgatcggggacgaatccgaaaacctggagggcgatggcgacctacgcgggggaaggattctgctgggacacgcgacaaagtcatttccttcttctcctagtaagggcggcagctgcccttcaagggctaaaatgtcaatgactggggcagggaaatctccaccttctgttcagtctctggccatgcggctgctctctatgcccggagctcaaggagccgcagctgctgggtcagaaccgccacccgcaacgacctctcctgaaggccagccaaaggttcatagggcacggaaaacaatgtccaaacctgggaatggccaaccacctgtgcctgagaaacgcccgcctgagatccagcactttcgaatgagcgatgacgttcattctctaggtaaagtcacgagcgacctggcaaagagaagaaaattgaattctggtggtggcctctctgaggagttgggatctgccagacgcagtggtgaagtgaccctgaccaaaggcgacccgggctccctggaggaatgggagaccgtggtcggtgatgacttttccttgtactacgactcatattccgtcgacgagagagtggactctgactccaagagcgaggtggaggcattgacagaacaactatctgaggaagaagaggaagaagaagaggaggaggaggaagaggaggaagaagaagaggaggaagaagaagaggaagacgaagagtctgggaatcagtccgatcgatccggtagctcaggcagacggaaggccaagaagaaatggaggaaagatagtccctgggttaagccatctcggaaacggaggaagcgggagcccccacgggcaaaagaaccccgaggtgtcaacggggtcggatcatccggaccctccgagtatatggaagtgccattgggatccctcgagctgccctcagaaggtacactttcccccaatcacgcgggcgtctcaaatgataccagctctctggagacagaacgcggttttgaagaactaccactttgctcttgcaggatggaggcacctaagattgaccggatcagcgagcgggctggccataagtgcatggccactgaatctgttgatggagagttatcagggtgtaacgctgcaatcctgaagagggagaccatgcgtccaagctcacgtgttgcgctcatggtactgtgcgagacccaccgggcacgcatggtaaagcatcactgttgtcccggatgcggatatttttgtaccgccggaaccttcttagaatgtcatccggactttcgagtcgcccaccgatttcacaaagcctgtgttagtcagctcaacggcatggtgttttgcccccactgcggcgaagacgcttccgaggctcaggaagtgactattccccgtggcgacggggtgacaccacccgccggtacagcagctcctgcacccccaccactaagccaagatgtccccggacgcgcagacacatcacaaccctctgcgagaatgagagggcacggagagccgaggcgcccgccttgtgaccccttggcagacacaattgactcctctggtccgagcttaacactcccaaatggaggttgcctcagcgccgtcggattgcccctcggcccaggacgcgaagctctagaaaaggcactggtgattcaggagagtgagcggcggaaaaagttgagattccatccgcgtcagctgtatctgagcgttaaacagggggagctgcagaaagtgatcttgatgctcctcgacaatctggaccccaacttccagagtgatcaacagagcaaacgcacccccctgcatgccgccgcccagaaaggaagcgtcgaaatctgccatgtactcctccaagctggcgcaaacatcaatgccgttgataagcagcagcgcaccccactcatggaagccgtcgttaacaatcacctagaggtggcccgttatatggtacagagaggtgggtgtgtctactcaaaggaggaagacggaagtacatgtctgcaccacgctgcaaagattggcaatctggaaatggtgagcctgctcctgtccacaggccaagtcgatgtgaatgcgcaggacagtggcggctggacgcccataatttgggcggcggagcacaaacacattgaggtgatcagaatgctcctgacgaggggagccgacgtcaccttgacggataatgaggagaatatttgcctgcactgggcctcctttaccgggtcagcggccattgctgaagtgctgctcaacgcccggtgtgacttacatgcagtgaattatcatggggatacaccactccacatcgctgctcgggagtcataccatgactgcgtcctgctgttcttgtctcgtggagcgaatcccgagctacggaacaaggaaggtgatactgcctgggatctgactccagagcgttcggacgtatggttcgctctacagttaaaccgaaagctcaggttaggggtggggaacagggctatacgcaccgagaagataatatgccgtgacgttgctcggggttacgaaaacgttccaattccctgcgtgaacggggtggacggggagccttgcccagaggactataaatacatctccgagaactgcgaaacatctactatgaatatcgatcggaacatcacacaccttcagcactgcacttgtgttgacgattgtagctcgagtaattgtttgtgcggccagctctctattagatgctggtacgacaaagacggaagactgctccaggagttcaacaagatcgagccacccctcattttcgagtgcaaccaagcttgtagttgctggagaaattgcaagaaccgcgtggtgcaatcaggcattaaggtaaggctacagctgtacaggacagcgaagatgggatggggggtgcgcgcattgcaaactatccctcaaggaactttcatctgcgagtacgtcggcgagctgataagtgatgccgaggccgacgtgagggaggatgatagttatcttttcgatctggataataaggacggagaggtatattgtatcgatgcccgctattacgggaatatcagcaggtttatcaaccatctgtgcgaccctaatatcattccggtgagagtgtttatgctacaccaggacttgaggttcccaaggatagccttttttagttcaagggacattcggaccggggaggaattaggctttgactatggtgatcggttttgggacatcaaaagtaagtatttcacgtgccagtgcggcagcgagaaatgcaaacattccgcagaagccatcgctcttgaacagagtagattggccaggctcgacccacaccccgagctgttgccagagctgggaagcttacctccagtgaacacttag

SEQ ID NO: 268734 - DNA, 3633 bp, Artificial Sequence
  derived and/or modified sequence
atggccgccgccgccggcgccgccgccgccgccgccgccgagggcgaggcccctgctgaaatgggtgccctgctcctcgagaaagagacgcgcggcgctaccgagagggtgcatggtagcctcggggatacaccccgttctgaagagaccctgccaaaagccacacctgactccctcgagcccgcaggcccgagctcacctgcgtccgtgactgttaccgtgggcgatgagggagccgatacgcccgtgggcgcaactcccctaatcggagatgaaagtgagaatctggaaggggatggagatttacggggcgggcgcatcctgctcggacatgctacgaagagcttccccagctccccttccaaaggtggaagttgtccctcgcgtgcaaaaatgagcatgaccggcgcaggcaagagtcctccgtcagtgcagtccctcgcgatgcgcttactctctatgcccggggcgcaaggcgcagctgcagctggctccgaacccccccccgcgaccacctcccccgaggggcaaccaaaggttcatcgcgcgagaaagaccatgagcaaacccggcaacggtcaaccccctgtccctgagaaaagaccccccgaaattcaacatttcagaatgagtgatgacgtgcacagcctagggaaggtgactagcgatttggccaaaaggagaaagttaaatagcgggggcgggctgagcgaagagctgggctccgcaaggcgttctggcgaggtgacattgaccaaaggagatcctgggtcccttgaggagtgggagaccgtggtaggagacgacttttccttatattatgattcatactccgttgatgaacgcgttgacagtgacagcaagtcagaagtggaagcgctcacggaacagttatctgaagaagaggaagaggaagaggaggaggaggaggaggaggaggaggaggaagaggaggaggaggaagaggaggacgaagagtcaggaaatcagtcggatcgttcaggatccagtggccgacggaaggccaagaaaaaatggcgcaaagacagtccctgggtgaagccatcaaggaaaaggcgtaaacgagagccaccaagggctaaggagccccgtggagtgaacggcgtgggatcctcaggaccttccgaatacatggaggtgcccttggggtccctcgaactgccatcagaaggtacactatccccgaatcatgccggagtgtctaacgacacctctagcctagagaccgagcggggttttgaagagctgccactctgtagctgcaggatggaggcacccaaaattgaccgcatttctgagcgagctgggcacaaatgtatggccacagaaagtgttgatggcgaactctccgggtgtaacgctgccatcttaaagcgggagaccatgcgaccttctagtcgggttgccctgatggttctgtgcgagacgcaccgggcccgcatggtgaaacatcactgttgtcctgggtgtggttatttttgtacagccggtacgtttctggagtgccacccagattttagggttgctcaccggtttcacaaggcttgtgtgtcgcaattgaacggaatggtattttgtcctcattgtggagaggatgcctccgaagcccaagaggttactatcccgcgcggcgacggcgttacccctccggctggaactgccgccccagctcccccacccttgtctcaggatgtccctgggcgggccgacacaagccagccctccgcacggatgcgtggacacggagagccgcgccggcccccctgcgaccccctggctgacactatagattcaagcgggccgtcattgacgctccccaacgggggttgcctgagcgcggttggcctgccattggggccagggagggaggcactggagaaggccttagtgatacaggaaagcgaaaggcgcaagaagttgcggttccaccctagacaactgtacttgtctgtgaagcaaggagagctacagaaggtgatcctcatgttgctcgacaatctagacccaaattttcagagtgaccagcagagcaagaggacgcccctgcatgccgcggcccaaaaaggctctgtggagatctgccacgtgcttctccaggcgggagctaacataaacgccgtggacaagcagcagcggaccccgcttatggaggcagtagtgaataatcatctcgaggttgcccggtacatggtgcagcgaggcgggtgtgtatactccaaagaggaggatgggagcacttgtctgcaccacgcagctaagatcggcaacctcgaaatggtgtctttgttgctgtccactggccaagtcgacgtcaatgcccaggattcaggaggttggacaccaatcatatgggccgcggagcacaagcacatcgaggtgatccggatgctgctgacacgcggagcagacgtgactctcactgacaatgaggagaacatctgtctgcattgggcaagtttcaccggatctgccgccatcgccgaagtcctgttaaatgcacggtgcgacttgcacgcggtgaattatcacggcgacacgccccttcatattgcggctagggaatcgtaccacgactgcgttctcctgttcctttcaaggggagccaatcctgagctgcggaacaaggagggcgatacagcctgggaccttacacctgagaggagcgacgtatggttcgcactccaacttaaccgaaaactccgcctcggggtagggaaccgggccatccgcaccgaaaagatcatttgccgtgatgtggcacgtggatatgaaaatgtacctattccgtgcgtgaacggtgtcgatggcgaaccatgcccagaggattataagtacatcagcgagaattgcgagacatctactatgaacatcgaccgtaacatcacccatctgcagcactgtacgtgtgtcgacgattgttcatcttctaactgtctgtgcggccaactctctatcagatgttggtacgataaagatggcagactgctgcaggaatttaataagatcgagccaccactgatattcgagtgcaatcaggcatgtagctgctggcgcaattgcaagaaccgagtggttcagagtggcatcaaggtccgtctccagctctacaggaccgcaaagatgggttggggggtgcgcgctttacagactattccccaggggacatttatatgcgaatatgtcggcgagctcatctccgatgccgaagccgacgtgcgtgaggatgattcctatttatttgatctcgacaacaaagacggcgaggtgtattgcatcgatgcgcgctattacggtaatatcagcagattcattaaccacctgtgcgaccctaatattataccggttagggtgttcatgcttcatcaagacttgcggttccctcgaattgcttttttctcatcccgcgacatcaggaccggcgaggaactgggatttgactatggcgatcgattctgggacatcaaaagtaagtattttacatgccagtgcggaagcgagaagtgcaagcactccgcagaggctatcgccctggagcaatcaaggttagcacgcctcgacccacaccctgaattgctgccagaactgggcagtttgcctccagtgaacacctag

SEQ ID NO: 268735 - DNA, 2769 bp, Artificial Sequence
  derived and/or modified sequence
agcgaggtggaggccctgaccgagcagctgagcgaggaggaggaggaagaggaagaggaagaggaagaggaggaggaggaagaggaagaagaggaggaggaggaggacgaagagagcggtaaccagtctgaccgatctgggagttcgggacgcaggaaagccaagaaaaaatggagaaaagacagtccatgggtgaagcccagtcgcaagcgtcggaaacgggaaccccctcgggccaaggagcccagaggcgtcaatggagttgggagttcaggcccttccgaatacatggaggtgcctctcggttccctggagcttccctccgagggaaccctctcacctaatcacgccggtgtgagcaatgacacttcgagtctggaaaccgagaggggcttcgaggaactgccactgtgcagctgtcgcatggaggcacctaagatcgatcggatttccgagcgggcggggcataagtgtatggcaacagaatctgttgacggggagctttccggatgcaacgccgctattctgaagcgcgaaactatgaggccttcttctcgggtagccctgatggtcttgtgcgaaacacatcgggcgagaatggttaaacaccactgttgtccaggatgtggctacttctgtacagcgggtacattccttgagtgccatcctgactttcgggtcgcacacaggtttcataaagcgtgcgtctcgcagcttaatggaatggtgttctgccctcactgcggagaagacgcctcggaggcgcaggaggtaaccattccacgtggtgatggagtaacacctcctgctggtacagcagcccctgcccccccaccactgagtcaggatgttcctggccgggctgacacatctcagccctctgcacgtatgaggggccacggtgagccccggaggccgccttgtgaccctctggcagacaccattgactcttccggaccgtctcttacgctgccgaatggtggttgcttgagcgccgtcggcctcccgctgggtcctggccgggaagcgctggaaaaagcgctcgttatccaagaatccgagcggagaaagaagctgaggttccatccaagacaactgtatctatctgtgaagcaaggagagctacagaaggtgattttaatgttgcttgataacctggatccaaattttcagtctgatcagcagagcaaaaggaccccgctgcacgccgccgcacagaagggctctgtggagatctgccacgtactgctccaggcaggcgcaaatattaacgctgtcgacaagcagcaacgcacgccactgatggaagcggtggtgaacaaccacctcgaggttgctagatacatggtgcaaagaggaggctgcgtgtattcaaaagaggaagacggaagcacatgcttacatcatgcggccaagatcgggaacctggaaatggtttcgctcctcttgagcaccggccaagtagacgttaacgcacaggattcaggcggctggacccctatcatctgggcagctgaacacaagcatatcgaggttatccggatgttgctgaccagaggagctgatgtgactctgaccgacaacgaggagaatatctgtcttcactgggcgagttttacagggtccgctgcgatcgccgaggtgctgttgaatgctagatgtgacctgcatgccgtcaattaccatggtgatacacccttgcacatagcagctcgagagtcttaccacgactgcgttcttctgtttcttagcaggggtgctaatccggagttacgcaacaaggagggcgacacagcgtgggacctaacaccagagcgaagcgatgtctggttcgctttacagctgaaccgcaaactgagactcggcgtgggaaatcgagcaatcaggaccgaaaaaattatctgtcgtgatgtcgcacgaggttatgagaacgtaccaatcccctgcgtgaacggcgtggatggcgaaccatgtcccgaggattacaaatatatctctgaaaattgcgagacttccaccatgaacatcgacagaaacattactcacctgcagcattgcacttgcgtggacgattgtagctcaagtaactgtctgtgcggccagctgtccatcaggtgctggtacgataaggatggcagactgctccaggagtttaacaaaatagagccaccgctgatctttgagtgtaaccaggcctgcagctgctggaggaactgcaagaacagggtggttcagtctggaattaaggtccgcctccagctttaccgcaccgcgaagatgggatggggggtcagagccttacagacaatcccccagggaacatttatttgtgagtatgtaggggagctcatttccgacgccgaggccgatgtgagagaggatgactcctacctattcgacctcgacaacaaggacggcgaagtttactgcatcgacgccagatactacggcaatatatcccgctttatcaaccacctatgcgatcctaacataataccagtccgagtgtttatgctgcatcaagatcttcggtttccccgcatcgcatttttctcgagtcgagacatcagaactggggaggaactcggctttgattacggcgacagattttgggacatcaagagcaagtacttcacctgtcaatgtggtagcgaaaagtgcaaacattcagccgaggctatcgcactagaacagtctagactggcacgcctggacccccaccctgaactgctcccggagctgggcagcctgccgcccgtgaacacttag

SEQ ID NO: 268736 - DNA, 3633 bp, Artificial Sequence
  derived and/or modified sequence
atggccgcagccgctggagccgcagcagctgccgctgcagagggcgaggcccctgcagaaatgggagcactcctgttagaaaaggaaacccgcggagccaccgagagggtgcatgggagcttgggggatactcccagatccgaagagactctgcccaaggctaccccggactctttggaaccagcaggccctagcagccctgcttcagtgacagttactgtgggagacgaaggagcggatacgccagtaggcgcaaccccacttattggtgacgagtcagagaatcttgagggggacggcgatctcaggggcggtaggatcctcctgggtcacgcaacaaagtcttttccatcttctcccagcaaaggcggatcttgtccctcccgggctaagatgagcatgacaggagcaggtaagagcccacctagtgttcagtctctcgccatgaggctgctgtccatgccaggggctcagggagctgccgctgccggaagtgagccacctccggcaacaacgagccctgagggacagccaaaggtgcaccgcgcaagaaaaacaatgtctaagcctggaaacggtcagccccctgtaccagagaaaaggccaccggagatccagcactttcggatgtctgacgatgtacactccctggggaaagtgacttcagatctggcaaagcggcgaaaactcaactccggcggtgggctttccgaagaactcggaagcgccagaaggagcggcgaagtgactctcactaaaggcgaccctggctctcttgaggagtgggaaacagtggtaggggacgatttctccctgtactacgactcttactccgttgacgagcgagtggacagcgacagcaaatctgaagtggaggccctaaccgagcaactgtcggaggaggaagaggaggaagaagaagaggaggaagaagaagaggaagaggaggaggaggaggaagaagaagaggacgaggagtcaggaaaccagtccgacaggagcggaagctccggacgccgtaaggctaagaaaaagtggagaaaagatagcccctgggtcaagccttctcggaaacgcagaaaaagagaaccacccagagcaaaggaaccacgcggtgtcaatggtgtggggtcctcaggaccctctgagtatatggaggttcctctgggatcactggaactcccttctgagggaaccttatctccgaaccacgcgggagtgagcaacgacacgagcagtctggagaccgagagaggcttcgaggagcttcccttatgctcctgtaggatggaggccccaaagatcgatagaatctcagaaagagcagggcataaatgcatggccaccgaaagcgtggatggggagctctctggatgtaatgccgcaattttgaaaagggagaccatgaggccttcgagcagggtcgccctcatggtgctgtgcgaaacccatagggccaggatggtgaaacatcactgttgtccaggatgcggatacttctgcaccgccggaacatttctggagtgtcaccctgactttcgggttgcacaccggttccacaaggcgtgcgtctctcagctgaatggcatggtgttctgcccacattgtggagaggacgcctccgaagcccaggaagtgacaattcctcgcggtgacggggttacacccccagctgggaccgccgctccagcccctcccccactatcccaggacgtacccggtcgggcagacaccagccagccgtcagctcgcatgagaggacacggcgagccacgccgtccaccctgcgatccccttgccgacacgattgacagtagcgggccttccctgaccctccccaacggcggttgtttgagcgccgtgggacttcctcttggacctgggcgtgaggcactcgagaaggctttggtgatccaggaaagcgaacgtcggaagaagcttcgctttcaccccagacagctgtatctctccgttaagcagggcgagctccaaaaagtgatcctgatgcttcttgataatctcgatcctaacttccagagtgaccagcaatctaagaggacacccttacatgcagctgcccagaaaggcagcgtcgagatctgccacgttctactgcaggccggtgcgaacattaacgcagttgacaaacaacagcgtacccccctcatggaagctgtagtgaacaaccacctggaggtcgcacggtacatggtacagcggggtgggtgtgtatactccaaagaagaggatggatcaacgtgcctgcaccatgccgctaagattggtaacctggagatggtgtctctgctgctctccacgggccaggtggatgtgaacgcccaggatagcggcggttggactcccatcatatgggccgcagaacataagcatattgaagtgatcaggatgctcctcacccgcggtgctgacgttacacttactgacaacgaggaaaatatctgccttcattgggcgtcttttaccgggagcgctgcgattgcggaggtgctcttgaatgctaggtgtgacctccatgctgttaactaccatggcgatacacctctgcacatagccgcaagggaatcctaccacgattgtgttcttctgttcctgagcaggggggctaatcccgaactgcggaataaagagggggacactgcctgggatctgacccccgaacgaagcgacgtgtggttcgcactgcagctcaacagaaaactcaggcttggcgtgggcaacagagctatccgtactgagaaaatcatttgccgggacgtggcacgcggttacgagaacgtccccatcccgtgcgtcaacggtgtggacggagagccctgcccggaagactacaagtacatttccgaaaattgcgagaccagtacaatgaacatcgatcgaaacattacacacctgcagcactgtacatgtgtcgacgattgctcaagcagcaactgtctgtgcggccagctctctatcaggtgttggtacgacaaagatggtaggttgctgcaggaattcaataaaatcgaaccccctctgatctttgaatgcaatcaggcctgcagttgttggcggaactgcaaaaacagagtggtgcaatcaggaattaaggttaggctacagctctatcggaccgcaaaaatgggctggggcgtccgagccctgcaaaccatcccacagggaacttttatctgtgagtacgtgggcgaactgatctctgacgcagaagcagacgtccgcgaagatgacagctacctgtttgatctggataacaaggatggcgaagtgtattgcatcgatgccaggtattacggtaacattagtcggttcatcaaccatctgtgtgatccgaatattatcccagttcgagtcttcatgctgcaccaggatctacgcttccctcggatagcttttttctcctctcgcgacatcagaaccggagaggaacttggctttgactacggggatagattttgggatattaaatctaagtatttcacatgtcaatgtgggagcgagaagtgtaagcattctgctgaggcaatcgccctggagcaaagtcgactggctagattagatccccatcccgaactcctgcccgagctgggatccttacctcccgtaaatacgtag

SEQ ID NO: 268737 - DNA, 3633 bp, Artificial Sequence
  derived and/or modified sequence
atggctgccgctgccggtgctgcagccgcagccgcagctgaaggagaggctccagccgagatgggagcgctgctactggagaaggaaactaggggagcgactgagcgagttcacggctccctaggagacaccccacggagcgaggagaccttgcccaaagcaacacccgactcactggagcctgctggaccctcttccccagcctccgtgactgtgacagtaggagatgaaggcgctgatactcccgtgggcgcaacaccgttgattggtgatgagtccgagaatctggaaggcgacggagatctgaggggcggacgcatcttactcggtcacgccacaaaaagctttcctagcagtcccagcaaaggcggttcctgtcccagtcgggctaagatgtctatgaccggagcaggtaagagtccaccctccgtacagagcttggccatgaggctgctgtctatgcctggggcacagggcgctgccgctgccggaagtgagccaccgcctgccacaacaagcccagaggggcaacctaaagtgcatagggcaagaaaaaccatgtctaaacccggaaatggccagccacccgtgccggagaaaaggcctcctgagatccagcactttagaatgtcagacgacgtccatagcctggggaaggtgacgagcgatctagcaaagaggaggaaactgaattccggaggtggactcagtgaagagctgggatctgcacgaagaagcggcgaggttacgctgaccaaaggagaccctggctcacttgaggagtgggagacagtggtcggagacgatttcagtctatattatgacagttactcagtggacgaacgcgtggatagcgattcaaaatctgaagtagaggccctcaccgagcagctttccgaagaggaggaggaagaagaggaagaagaagaagaagaggaagaggaggaggaggaagaagaagaggaggaggatgaagaatcagggaatcaatctgaccgaagcggaagcagcggacggaggaaagcgaagaagaaatggcgtaaagattctccctgggtgaaaccttctcgcaagcggaggaagagagagcctcccagggcaaaggagccgaggggagtcaacggcgttgggtcatccgggcctagcgagtatatggaggtccccctcggctccttggagttgcccagcgagggtacactgtctcccaaccacgctggcgtttctaatgatacctcatcactggaaaccgaaagaggttttgaggagctgccactgtgctcttgccggatggaggcccctaaaattgatcgtatcagcgaaagggcaggacacaaatgcatggccacggaaagcgttgacggcgagctttcaggctgtaatgctgccatccttaaacgggaaacaatgcgacctagctcgagggtggcactgatggtattatgcgagacccatcgtgctaggatggttaagcatcattgttgccccggatgcgggtacttctgtaccgctgggacctttttagaatgtcaccccgattttagggtagcccacagattccataaggcatgcgtgtcgcaactgaatgggatggtgttttgtccccactgcggtgaggacgcctcagaagcccaggaggtgacaattccacgcggagatggcgtgacgcctccagctggaacggccgcacctgctccccctccattgtctcaggacgttccagggagagctgacacctcgcagccatccgctcgtatgcggggtcatggcgagcccagaagaccgccatgtgatcctttggcagacacaatcgactcgtctggacctagtctcactctgccgaatggaggctgcctatccgctgtggggctccctctggggccaggacgtgaagcccttgagaaggccctggtgatccaagagtcagagcgacgaaagaaactccgattccacccaagacagctttacctgtcagtgaaacagggcgagctgcaaaaagtgatcctgatgctgctggataacctagatcctaattttcagagcgaccagcagtccaagagaacgccactccacgccgctgctcaaaaggggagcgttgagatttgccacgtgcttctgcaggctggggcaaacatcaacgccgtcgataaacagcagagaacaccgctgatggaagctgtcgtgaataatcacctggaggtcgcacgatatatggtgcaaaggggaggatgcgtgtattcgaaagaggaagatggatcaacttgccttcatcatgcagctaagattgggaacttggagatggtcagcttactattatctacaggccaggtggacgtcaatgcgcaggacagtggcggatggacacctatcatctgggcagccgagcacaagcacatagaggtaatcaggatgctactgactcggggagcagacgtcactttgaccgacaatgaggaaaatatctgcttgcattgggcttctttcacggggtccgctgcaatagccgaagtcctcttgaacgcccgttgtgacttacacgccgttaattaccacggcgacaccccgctgcacattgctgccagagagagttatcatgactgtgtgttgttatttctcagccgaggcgcaaatcctgaactacgcaacaaggagggagacaccgcatgggacttgacaccggagcggtccgacgtgtggttcgcactgcaactaaataggaaacttaggctgggggtgggaaatagagcaataaggacagagaaaattatctgtcgggacgtggcgaggggttatgagaatgtaccaatcccctgtgtcaacggcgttgacggtgaaccttgcccggaggactacaagtacataagtgaaaattgtgagacatcaacgatgaatattgaccgtaacatcactcacctgcagcactgcacctgtgtagacgactgctctagctctaactgtctatgtggacagcttagtatcagatgttggtatgataaggacggcaggctccttcaggagtttaataaaatcgaaccaccactgatcttcgaatgcaatcaggcatgcagttgttggagaaactgcaagaaccgggtcgttcagtcagggattaaggtgaggcttcaactgtacaggaccgcaaagatgggatggggtgtccgagcactgcagactattccccagggcacctttatttgtgagtacgtgggtgaactgatctccgacgcagaagcagacgtgcgcgaagacgactcctacctgtttgatctggataacaaggacggcgaagtgtattgtatcgacgcacggtactacggcaacatctcacgcttcatcaaccacctgtgcgaccctaacattattccagtccgagtgtttatgcttcatcaagacctcagattccctaggattgccttcttctcatcgagagatatacgcaccggagaggagctaggattcgactatggagatcgattttgggatatcaaaagtaagtacttcacctgccagtgcggctccgaaaaatgtaagcacagcgccgaggccattgccttagagcagtccaggctcgcccgactggacccccatcccgagttactgccagaactcggcagtctccctcctgtgaatacatag

SEQ ID NO: 268738 - DNA, 3804 bp, Artificial Sequence
  derived and/or modified sequence
atgcggggattgccgcgtggcagaggattgatgcgcgctcgagggcgaggccgagccgctccgccagggagccggggtaggggccgtgggggaccccatcgaggccgtgggcgaccaagatctctgttgagtctcccaagagcacaggctagctggactcctcagctcagcacaggactaacatctccccctgtgccatgcctgcccagccagggcgaggctcccgcagagatgggcgctctcctgctggagaaggaaacgcggggagccactgaaagagtgcatgggagcctgggggatacccccagatccgaagaaacattacccaaggccaccccagatagcctcgagccagccggaccctcttcacccgcttctgtaacagtcacagtgggtgacgaaggagctgacacacctgtgggcgcaactccccttatcggcgacgagtccgaaaacttggaaggggatggcgatctgcggggtggaagaatccttctgggtcacgcaaccaaaagttttccatccagcccctccaagggtggctcttgtccttctagggccaagatgtcaatgacaggtgcagggaagtccccaccaagcgtacagagcttagctatgcgcctgctctctatgcctggggctcagggggctgccgctgcaggaagcgaaccccctcctgccactacgtcacccgaaggacagccaaaagtgcatagagccagaaaaaccatgtcaaagccaggcaacgggcaacccccagtccctgagaagcggccaccagaaattcagcattttcggatgagtgacgacgtccattccctgggaaaagtgacaagtgacttagctaagcgacgtaagctgaactccggcggagggttatcagaggaactgggctctgcccgacggtcaggggaagtgacactgaccaaaggtgatcccggaagtctggaggagtgggagacggttgtcggtgatgacttttccctgtattatgattcttacagcgtggacgaaagagtggattcagattctaaatcagaggtagaagccctaaccgaacagctttccgaagaggaggaagaggaggaagaagaggaagaagaagaagaggaggaggaggaggaagaggaggaggaagaagatgaagagtcaggcaatcaatcggatcggtcggggagctccggcagacgtaaagcaaagaaaaagtggcggaaagattctccgtgggtgaaaccttcacgaaagcggcgtaagagagagccgcctcgggcaaaggaaccacggggagtcaatggagtcggatcctccggtcccagcgagtatatggaagtgcctctcgggtcactagagctgcccagtgaagggaccctgagtccaaatcatgcgggagtgtctaatgatacatcttccctcgaaactgagcgagggttcgaagaacttccactttgtagctgtagaatggaggcccctaagatcgaccggattagtgaaagggctgggcacaaatgcatggccaccgagtctgttgacggtgagctctcggggtgcaacgcagcaatacttaagagggagaccatgaggccgtctagcagagtagcgctcatggtactctgtgaaacacaccgcgcacgcatggtgaaacaccattgctgtccaggctgtggctatttctgcaccgcaggaaccttcttagaatgccatccagacttcagggtggcgcaccgatttcacaaggcctgcgtgagccagctgaatggcatggtgttctgtccccattgcggggaggatgctagtgaagcccaggaggtaaccatccctaggggggacggtgttacacccccagccggaacagccgctcctgcacccccacctctgtcacaggacgttcctgggagagctgatacttcccagccaagtgcgaggatgcgcggacacggcgagccccgacggcctccatgtgaccccctggctgacactatcgattcctccggccctagtctcaccctgccaaacggcggttgtctctcggccgtgggcctccctttagggcctggcagggaggcattagagaaggcacttgtgatccaggagtctgagcgtcggaaaaagctcaggtttcatcctcgccagttatacctgtctgtgaagcagggcgaactgcagaaggttattctcatgctcctcgacaaccttgaccccaactttcaatctgaccagcaatcgaaaaggacgcctttacatgccgcagcgcagaaaggttccgtggaaatctgtcacgtgttattgcaagccggtgctaacatcaatgctgtggacaaacagcagcgcactccacttatggaagctgtggtcaacaatcacttggaagtggctaggtacatggtacagaggggaggctgtgtgtattccaaggaggaggacggtagtacttgcctgcaccacgcagctaaaatcggtaacctggaaatggtgtcactgctgctctctacgggacaggtggacgttaacgctcaggattccggtggctggacccctattatatgggccgctgaacacaagcatattgaggtgatcaggatgttactcacgcgcggagccgacgtgaccctcacagacaatgaagagaacatctgcctgcactgggcttcgttcacagggtcggctgctatcgctgaggtgctgctgaacgcccgttgtgacctgcacgctgttaactaccacggcgacacccctcttcatatagcggcacgggaaagctaccatgactgcgttttgttattccttagccggggtgctaatccagagcttcgcaataaggaaggtgatacagcttgggacctgacacctgagcgcagcgatgtctggtttgctctccagctcaaccggaaactgcgcctgggcgtgggtaatcgtgcaattcgaaccgagaaaattatttgccgcgatgtggcaagaggatatgagaacgtacccataccttgcgtgaatggagtggacggtgaaccatgccccgaagattataagtatatctcagagaactgtgagacttcaactatgaacatcgacagaaacatcacccacttgcagcactgcacatgcgttgacgactgctcctcctcaaattgtttatgtgggcagctctcaatccgatgttggtatgataaggacggcagactgctgcaagagtttaacaaaattgagccacctctgatcttcgagtgcaaccaagcttgtagctgttggagaaactgtaaaaatagagtcgtgcagagcggcatcaaggtgagactccaactgtaccggacggctaaaatggggtggggagtgagggccctgcagacaattccacagggcacattcatttgtgagtacgtgggtgagcttatctccgacgctgaggcagatgtgcgcgaagacgattcgtatctatttgatctggacaacaaggacggagaggtctactgtatagatgcgcgatattacggtaatatttctcgctttattaaccatttatgtgatcctaacattattcctgtgcgcgtgttcatgcttcatcaggacctgcgcttccccagaattgcatttttttctagccgggacatccgaacaggcgaggagctgggctttgactacggagaccggttctgggatatcaaatctaaatactttacatgtcaatgcggaagcgaaaagtgcaaacattcagcagaagcaatagcccttgaacagtctcgactggctcgactggacccacaccctgagctgctgcctgaattggggtctctgccccctgtcaatacctag

SEQ ID NO: 268739 - DNA, 3804 bp, Artificial Sequence
  derived and/or modified sequence
atgagggggctccctcggggacggggactcatgagggccagggggcgtgggcgtgccgcacccccaggcagtcgcggtagaggcaggggagggccacaccggggaagaggacgcccacgcagcttgttgtccctgcctcgcgcacaggcttcctggaccccccagctgagcacagggttgactagtccccctgtgccttgtctgcccagtcaaggcgaggcgcctgcggaaatgggcgcactcttattagagaaagagacgaggggggctactgaacgtgtgcatggctctcttggggataccccacgaagcgaagaaacactgcccaaggccaccccggattccctcgagccagctggcccttcttccccggcttctgtgactgtgaccgtaggcgatgaaggcgcagatacacctgtaggggcaacaccccttattggcgacgaaagcgagaatctggaaggtgacggcgacctacgcggaggacgaatcctgttaggccacgcgactaagagcttcccttcctctccttccaagggcggatcctgcccctctagagcgaaaatgagcatgaccggggctggcaagagtcccccatctgtgcagtccctggctatgaggctcctctccatgcctggagctcaaggcgctgccgctgcagggtccgagcctccccctgccaccacttcgccagaagggcagccaaaggttcacagggcccgaaaaacaatgtctaaaccgggaaatgggcagccccctgtgcccgaaaagcgccctcccgaaattcagcattttagaatgtccgacgacgtacactctttgggaaaagttacttccgacttggccaagagacgcaagctgaattccggcggagggctgtccgaggagctaggatccgcacgccgatctggtgaggtaacgctgaccaagggagaccctggatccctcgaagagtgggaaaccgtggtgggagacgatttctcactctactatgatagctactcagtcgatgaacgggtcgactccgattcaaaaagcgaagtggaggccctgaccgagcagctgtccgaggaggaagaggaagaggaggaagaggaggaagaagaggaggaggaagaagaggaggaggaagaagaagaggatgaggagtccggaaatcagagtgaccgaagcggctcctcaggcagaagaaaggctaagaagaagtggcggaaggattccccttgggtcaagccatcccggaagcgaaggaagagagagccccctagggccaaggaacccaggggcgtcaatggcgtggggtcaagtggtccttccgaatatatggaggtgcctttgggctctcttgagctgccgagtgagggcaccctgagtcccaatcacgcgggtgtttctaacgatacgtccagcttggaaacagagcgcggattcgaggaattgcccctctgttcttgtcgaatggaagccccaaagattgataggatttctgagcgggctggccataaatgcatggcaaccgagtcagtagatggagagctgagtggatgtaacgcggctattctcaaaagggagaccatgaggccctctagcagagtcgccctgatggttctgtgtgaaactcacagggcgaggatggtgaagcaccattgctgtcctggatgtgggtacttttgcaccgcaggaacctttctagagtgtcacccagacttcagagtggctcaccgttttcataaagcatgcgtttctcagctgaatggtatggtgttttgtccacactgtggcgaggacgcaagcgaggcccaggaggtcactattccccgaggcgatggtgtaacccctcccgcaggaactgctgccccagctccacctccattgagtcaggacgtgcctggcagagcagatacttcacaaccctccgctaggatgagaggtcacggtgaaccgagaaggcctccctgcgaccctctggcagataccattgacagctccgggcctagtctgacactgccaaacggaggctgcttgtctgcggtgggacttcccctggggcctggccgtgaagcgttggagaaagcgttggtgatccaggagagtgagcgccgaaagaagcttcggttccaccctaggcagctctaccttagtgttaagcagggggagttgcaaaaagtcattttaatgcttttagataatcttgatccgaatttccagagtgatcaacagagtaaacgcactcccctacacgcggctgcccagaaggggtcggtggaaatctgccacgtcctcctccaagccggagcaaacattaacgccgttgataaacagcaacgcacccccctgatggaagcagtggttaataatcacttggaggtcgccaggtacatggtccagcgtggcggatgtgtgtactcgaaagaggaggatggcagcacatgcctccaccacgctgctaagataggtaaccttgagatggtgtcacttttgctgtctactggccaggtcgacgtgaacgcacaggactccggcggatggacccccattatctgggcggctgagcacaaacatatcgaagttatccggatgctactgaccaggggagcagatgtaacactcaccgacaacgaggaaaacatctgtctacattgggcttcatttacgggatctgccgcaattgcggaagtgctcttaaacgcgagatgtgacctgcacgctgtgaactatcacggcgacaccccgctgcatattgccgctcgcgagagctaccacgactgcgtgttattgtttttgtccagaggagctaaccccgaactgcgcaacaaggaaggggataccgcctgggatctgacccccgagcgcagtgatgtctggttcgctctgcaactaaatcgtaagttgcggctgggggtcggaaacagggccattcgcactgaaaaaattatatgccgcgatgtggcaagaggttacgagaatgtaccaataccatgcgtcaatggcgtggatggggagccttgcccagaagactacaagtacatcagcgaaaattgcgagaccagtaccatgaatattgaccgaaatatcactcatctgcagcactgcacctgtgtggatgactgttcctctagtaactgcctttgcggccagctgtccatccgctgttggtatgataaggacggtaggttgcttcaggagtttaacaagatcgaacctcctttgatctttgagtgtaaccaggcatgcagctgctggaggaactgcaagaatagagtggtccagtcaggaattaaggttcgtttgcagctctacagaactgcgaaaatggggtggggcgtcagagcattacagactatcccccaaggaactttcatttgcgagtacgtcggtgaactgatttctgatgcagaagctgatgtgagggaggacgactcctatcttttcgacctggataataaggatggcgaggtgtattgcatcgatgccaggtattacggaaatataagtagatttattaatcatttgtgcgatcccaatattatccctgtccgggtctttatgctgcaccaggatctgcgtttcccacggattgcatttttcagttctcgggatatcaggaccggagaggagctggggtttgattatggggaccgattctgggatattaagtctaagtacttcacatgccagtgtggtagtgagaagtgcaagcattcggcagaggcgatcgccctcgagcaatcgcgactcgctcgtctagatccccatcctgagttattgcccgagttgggaagcctgcctccagtgaacacttag

SEQ ID NO: 268740 - DNA, 3804 bp, Artificial Sequence
  derived and/or modified sequence
atgagaggtctccccagaggaaggggcctcatgagggctcgcggtcggggacgggcagccccacctgggagcaggggacgcggtcggggtggaccgcaccggggtcgcggacgcccacgttccctgctgtccctccccagggctcaagcaagttggacaccccaactcagcaccggcctgacctccccaccagtcccttgtcttccatctcaaggagaggcccctgcggaaatgggagctttgctccttgagaaggaaacccgcggagcaacagagcgtgtccatgggtctctcggcgacacaccccgtagtgaagaaactctgcccaaagctaccccggacagcctggagccagcagggcctagtagtcctgcctccgtcactgtgaccgtgggcgacgagggcgctgacactccagttggtgctactccactcattggcgacgagtctgagaacttagagggcgatggcgatctcagagggggacggattctcctgggacacgcgaccaaaagttttccctcaagcccctccaagggtggatcttgtccgtcacgagccaagatgtctatgacgggtgccggaaaatcccccccatccgtgcagagcctggcaatgcgtctgttgtccatgcctggagcacaaggggcagctgcagccggttccgagccccctccggcaacaacatcccccgagggccagccaaaagtccaccgcgctcgtaaaacaatgtccaaaccgggaaacggccaaccgccagtgcccgagaaaagacctcctgagattcagcattttaggatgagtgatgacgtacactctcttggtaaggtgacaagtgacctggccaagagaaggaaactgaacagtgggggagggctcagcgaagaacttggatcagcaaggcggtccggcgaggtaacgctcacaaagggggatcccggaagtctggaggagtgggagaccgtggtcggcgatgatttcagcctctactacgactcctatagcgtcgacgagcgcgttgactcagattccaaatctgaagtggaggctcttacggagcagctctccgaggaggaagaggaagaggaagaggaggaggaggaggaggaagaagaggaggaggaggaagaggaggaggaggacgaggagtcggggaaccagtctgacagatccggctcctcaggacgcaggaaagccaagaaaaaatggagaaaagacagtccttgggtaaaaccttcccggaagaggcggaagagagagccgcctagagcaaaggaacctcgtggtgtcaatggagtgggctcaagcggacccagcgagtatatggaggtgcctttagggagcctggagctccctagcgaaggtactttgagtcccaaccacgcaggcgtgtccaatgacacatctagtcttgagactgagaggggctttgaggagctgcctctgtgctcttgcaggatggaggccccaaaaatcgatcgcattagcgagcgggcaggccacaagtgtatggccacggaaagtgtggatggggagctgtctggatgcaatgcagccattcttaaaagggagacaatgcggccatcatcgcgggtcgccctgatggtcttatgcgaaacacaccgtgcccgaatggttaagcaccactgttgtcccggttgcggttatttttgcaccgcgggaacctttcttgagtgtcatcccgactttagggttgcccatcggttccacaaagcttgcgttagccagctaaacggcatggttttttgtcctcactgcggcgaggacgccagtgaggctcaggaggtgaccattccgagaggtgacggcgtcactcctcctgccggaactgctgcccctgcccctcctccactgtcccaggacgtgcctggcagggctgatacgtctcagccaagtgctaggatgcgagggcacggagagccacggcgacctccttgtgaccccctggcggacactattgactcctcagggccatcgctaactctgccaaatggaggatgtctgagcgctgtaggcttaccactggggcctggcagggaagcgctggaaaaagccttagtcattcaggagagcgagagacgcaagaaattgcgattccaccctcgccaactttatcttagcgttaaacagggtgaactgcagaaggtgatccttatgctgctggataacctagatcctaactttcagagcgatcaacagagtaagaggacacctctgcatgccgcagcccagaaaggaagcgtggagatctgtcacgtcctgctccaggccggagctaacatcaatgccgtcgacaaacaacagcgtacaccacttatggaagcagtggtgaacaaccatctcgaggtagctaggtacatggtacaacggggagggtgtgtgtactccaaagaagaggacggcagcacttgcctgcaccacgctgctaagattggcaatctagagatggtgtccctgctgctctccacagggcaggtggacgttaatgctcaggactctgggggatggaccccgataatttgggccgcagagcacaagcatatagaggttataagaatgctgttgacccgtggtgccgacgttacgctcacggacaacgaggagaacatctgcctgcactgggcttcttttactggcagcgccgctattgctgaggttctcttgaacgcacgctgcgatttacacgcagtgaactatcacggggacacaccactgcacattgcagcgcgagaatcttaccacgattgtgtgctcctctttctgtcccgcggtgcaaacccggagttgcgaaacaaagagggtgatactgcgtgggacctaacccccgaaagatcggatgtctggttcgcattgcagctcaaccgtaaactgaggctcggggtgggtaaccgggctatcagaactgagaaaatcatatgtagagatgttgccagaggttacgagaatgtccctatcccttgtgtaaatggagtcgacggggagccttgtcctgaggactacaagtacatcagtgagaattgcgaaacatcaaccatgaacatcgataggaatattacccacctgcagcactgtacatgtgtggatgactgttctagctcaaactgtctgtgtggtcagcttagcatccggtgctggtacgacaaggacggtaggctgctgcaggaatttaataagatagaaccaccactgattttcgagtgcaatcaggcctgctcatgttggcggaactgcaagaaccgcgtggtgcagagcgggattaaggtaaggctgcagctgtacagaactgccaaaatgggatggggcgtgcgggcactgcagaccataccccagggaacgttcatttgcgaatatgttggggagttgatctccgatgctgaagcggatgtacgcgaagatgattcctatctatttgatctcgataataaagatggagaggtttattgcattgacgctagatactacggcaatatctcccggtttatcaatcacctgtgtgatcctaacatcattccagtgagggtattcatgctgcaccaggatttgcgcttcccccgaattgcttttttttccagtcgggatattcgaacgggtgaagagctcggcttcgactacggagaccgcttctgggacatcaagtccaagtacttcacatgtcaatgcggctcagagaagtgcaagcatagcgctgaggcaatagctcttgaacagagtcgccttgcgcgtcttgaccctcatccagaactgctgccagaattgggtagcttgcctcccgtcaacacatag

SEQ ID NO: 268741 - DNA, 2769 bp, Artificial Sequence
  derived and/or modified sequence
tctgaggtggaagctctcaccgagcagctgtccgaggaggaggaggaggaggaggaagaagaagaggaagaagaagaagaggaagaagaagaggaggaggaggaggacgaagagagcggaaatcaaagcgataggagcggctcttcgggtcgcaggaaggccaagaagaaatggcgaaaggacagcccctgggtaaagccctctcggaaacggagaaaaagagagccgccaagggcaaaggaaccacgcggagtaaacggagtaggttcatccggccctagcgaatatatggaggtcccattaggctcgctggagttgccgagtgaggggaccctgagtcccaaccatgcaggcgtttcaaacgatacttcgagtttggagacagagcggggtttcgaggagctgcctctgtgcagttgccgaatggaggcccctaagatcgatcgcatctctgagagggcaggacacaagtgcatggccaccgagagcgtggacggggagctgtcaggatgcaatgccgcaatcctgaagcgggagaccatgcggccaagcagcagggtggcactcatggtcctgtgcgagacccatcgggctcgcatggtgaaacaccactgttgccccggatgtggctatttctgtactgcaggtacattcctggagtgccaccccgatttccgagtggcacaccgattccacaaagcttgtgtgtctcaacttaatggcatggtgttttgtccccactgtggagaagacgcctccgaagctcaggaggtcacaataccacgcggagacggggtcacaccccctgctggaactgcggctccagccccacctccactctctcaggatgtccccggaagggctgatacctctcaaccatcggcgcgaatgcgtggccacggagagccccgacggccaccttgtgacccactcgctgataccatagattcctccggaccaagcttgaccctgcccaatggcggatgcttgtctgccgtgggcttgccactcgggcctggacgggaagccttggaaaaggccctagtgatacaggagtctgaacgcagaaagaaactgagatttcatccaaggcagctctacttaagcgtcaagcagggcgagctccaaaaagtgatacttatgctgttagacaacctggacccaaacttccagtctgaccagcagagcaaaaggacaccattgcacgcagctgcacagaagggcagcgtcgagatctgccatgtgctccttcaagctggggcaaacataaacgctgtggacaaacagcagcgcactcctttgatggaggctgttgtgaacaaccaccttgaagtggcccgttacatggtgcagcggggaggttgcgtgtactctaaggaggaggacggatcaacctgccttcatcacgctgcaaaaattggcaacctcgagatggtgagtctgttactgtctacgggccaggtcgatgtgaatgcgcaggattccggtggatggacccccataatatgggcggcagagcacaagcatattgaagtgattcgtatgttactgactcggggagcagacgttactctcaccgataacgaggaaaatatttgtttacattgggctagtttcaccggctccgctgcaatcgccgaggtattattaaatgccagatgcgacctgcatgccgtgaactaccacggggatacccctctgcacattgctgccagagaatcctaccacgactgtgtcctgctgtttctgtcccgcggagccaaccctgagcttcgcaataaggagggcgatacagcatgggatctgacccccgagagatccgacgtgtggttcgcccttcaattaaaccgcaagcttcgcctgggcgtgggaaatcgagccatccgcacagagaaaataatctgccgggacgtggccaggggctatgaaaatgtgcctatcccctgcgtgaacggtgtggacggcgagccatgtcctgaggactacaagtacatctcagaaaattgcgagacgagtaccatgaatattgaccggaacataactcacctccaacattgtacctgtgtcgatgattgctcctcctccaattgtctctgtggccagctctccattcgttgctggtatgacaaggatggtcgcttattgcaggagttcaacaagattgaacctccactcatttttgaatgcaaccaggcctgtagctgttggagaaactgtaagaatagagtggtccaaagcggcataaaggtgcgcttgcagctgtaccgcactgctaagatgggttggggggtacgtgcactccagacaatcccacagggtacctttatctgtgaatatgttggagaacttatctccgacgccgaggctgatgtacgggaggacgattcgtatctgttcgacctggacaataaggatggcgaggtctactgcatcgacgccaggtactacgggaatatctcccgttttattaatcacctctgtgaccccaatataataccagtcagggtgttcatgctccatcaggatctgagattccccagaatagccttcttttcaagcagagatatccgcacgggagaggaattgggttttgattacggggatcgattttgggacataaaaagtaaatactttacttgccagtgcggctccgagaagtgtaaacatagcgcagaggcgattgctctggagcagtctcgtttggcacgcctggacccccacccagagttgctaccagagctgggctcgctgccacccgttaacacatag

SEQ ID NO: 268742 - DNA, 3633 bp, Artificial Sequence
  derived and/or modified sequence
atggccgcagcagccggagccgcagcagccgctgccgcagagggggaggccccagccgaaatgggcgctcttctgctggagaaggagacgcgtggagccaccgagagagttcatgggtctttgggggatacaccaaggtccgaggaaactttaccaaaagccacacccgactcattagagccagccggaccatcttctcccgcaagtgtcacagtgacagtcggtgacgaaggcgcagacacccccgtcggggcaactcctctgatcggggatgagtccgaaaatttagaaggcgatggcgatctccgaggcggacgtatcttgctgggccatgctaccaaatcatttccatcttcgccgagcaagggtggctcttgccctagtcgggctaaaatgtccatgacaggggcaggtaaatctccaccatcagttcagagtctcgctatgagattgttaagcatgccaggggcacaaggcgctgctgcagccggatccgaacctccaccagctaccacatctccggaaggccaacctaaggtccacagggctagaaagacaatgtccaaaccagggaacggtcaacccccagtccccgagaagcgtccgcctgagatccagcattttcgcatgagtgatgacgtgcattcactaggcaaggtcacaagcgatctggccaagcggaggaagcttaactctggcggtggcctgagcgaggagcttgggtctgcaagacgaagtggtgaggtcactctcacaaagggggatcccggatctcttgaagaatgggagactgttgtcggcgatgactttagcttatattacgactcatatagcgtggatgaacgggtcgactctgatagtaagagtgaggtcgaggctcttacagagcagttatctgaggaggaggaggaggaagaggaagaggaggaagaagaagaagaggaagaggaagaagaggaggaggaagaggacgaagagagtggaaaccagagcgaccgctctggctcaagcggccgacgtaaggcgaagaagaagtggcggaaagacagcccttgggtaaaaccctctcggaaacggagaaagagggaaccgcctcgcgcaaaggagccccgaggtgtgaacggtgtaggcagctctggccctagcgagtacatggaggtgcctctcggaagtttagagcttccatcggaaggcaccctgagccctaatcatgcgggagtctccaatgatactagttccctggagacagagcgcggattcgaggaactgccgctctgctcgtgccgcatggaggcccctaagatcgatcggatctccgaaagagccggtcacaaatgtatggctactgagagcgtcgatggagaactttcaggctgcaacgccgcaatcttgaagagagaaacgatgagacccagttcccgcgtggctctgatggtgctctgcgagacccatcgcgcaagaatggtcaagcatcattgctgtcctggatgtggctacttttgtaccgccggaactttccttgagtgccatccagacttccgggtggcccatagatttcataaggcatgtgtcagccagctgaacggcatggtcttttgccctcactgtggggaggatgcatcagaagcccaggaagttaccattcccagaggagatggggtgacccctccagcaggtacggccgcaccagctccccctccactgagccaggatgtgccgggacgggcagacacctctcagcccagtgccaggatgcgcggtcacggcgagccacgaagacccccttgcgatcccctggccgacaccatagacagttcgggtcctagtctgaccctgccgaacggtggatgcctgagtgcagtcggcttgccactcggtcccggtcgtgaggcactggagaaggccctcgtgatccaggagagcgaacgacgtaaaaagctccggtttcatccgagacaactttacctgtccgttaaacaaggagagttgcagaaagtcatcctgatgctgctcgacaatcttgacccaaatttccaatcggatcagcagagcaagaggactccacttcacgctgcagcccagaagggctctgtggaaatatgtcacgtgttgctccaggcgggtgccaacattaatgctgtggacaaacaacagcgaacgccccttatggaagccgtcgtcaataatcacctggaggtggctaggtacatggtgcagagaggcggatgcgtgtatagcaaagaagaggatggcagcacttgtttgcatcatgctgccaaaatcgggaatctggaaatggtgtcccttttgctgagtacgggccaggtcgatgtcaacgcccaggactctgggggttggactccaattatctgggctgcagaacacaagcatatcgaggtcatcaggatgctgcttacccgaggcgcagatgttactctcacagataatgaggagaacatttgcctccattgggcttcatttactggctccgccgctatcgccgaggtgctgctgaacgcccgatgcgacctgcacgccgtcaactaccacggcgacacacctctgcacatcgctgccagggagtcctatcacgactgtgtcctcttgttcctgtcccgcggagccaaccccgaactacggaacaaggaaggcgataccgcctgggacctcacacctgagaggtctgatgtgtggtttgccctgcagctgaatagaaagcttcgtcttggcgtcggcaatagggccattcgcaccgaaaagataatttgtcgcgatgtcgcgcgaggatacgaaaacgtcccaattccctgcgtgaacggtgttgacggtgaaccgtgtccagaggactacaagtacatttccgaaaactgtgagactagcactatgaacatagatcggaatatcacccatctgcagcattgcacttgtgtggatgactgcagttcaagtaattgcctgtgcggccagctcagcatccgatgttggtatgacaaggacggccgattgctgcaggaattcaataaaattgagccccctctcatttttgagtgcaaccaagcctgttcctgctggcggaactgcaagaacagagttgtgcaatccggcattaaggtccgcctgcagttataccgcacggcaaagatgggttggggggtccgggctctgcagactattccccagggcacattcatttgcgaatatgtcggcgagcttatctcggatgccgaagccgacgtccgtgaggatgacagctacctgttcgatctggataacaaagatggtgaggtgtactgtattgacgcccgatactacggcaatatttccagattcatcaatcatttgtgtgacccaaacattatcccagtgagggtttttatgttgcatcaggatctgaggttcccccgtatagcgttttttagctcccgcgacatccgcactggggaggagctcggcttcgattatggcgaccggttctgggatattaagtccaagtatttcacctgccaatgtggctctgaaaagtgtaagcactctgcggaagcaatcgccctggaacaatcccggttggctcgactcgacccccacccggagctcctgccagagttgggatcgttgccccctgtgaacacgtag

SEQ ID NO: 268743 - DNA, 3804 bp, Artificial Sequence
  derived and/or modified sequence
atgcgcggactcccacggggtcgtggtctcatgagagctcgcggtcgcggacgggctgcgcctccagggtcaagaggtagaggaagagggggaccacatcgcggtcggggacggccacgtagcctgctgagcctgcctcgagcccaagctagttggacaccccaactctccacaggattaacctcacctcctgtgccctgcttacctagccaaggagaggctccagctgagatgggtgcactcctgttggagaaggagactcggggtgctaccgaacgggtccacggatcactcggagacacccctcgctcagaagaaacgctgccaaaggccacccctgacagcctggagccagccggacctagctcccccgcatctgttaccgtcaccgtcggcgatgaaggcgctgacacacctgtgggcgctacgcctttgattggagacgagtcagagaaccttgagggagatggcgaccttagaggtggccgaatactgttggggcacgccactaaatcgttcccatcgagtcccagcaaagggggatcttgtcccagcagagctaagatgagtatgacaggtgctgggaaatctccaccatccgtccagtctctggccatgcgtctcctgagcatgcccggagctcagggggctgcagcggctggaagcgagccaccgcctgcaaccacgtcgcccgagggtcagccaaaagttcatagggctagaaagactatgtctaaaccaggtaatgggcagccaccagtacccgagaaaaggccccctgaaatccagcactttcgcatgagtgacgatgtccatagtcttggcaaagtgacttcagatctcgcaaaaagacggaagctgaactcaggcggtggcttgagcgaggaacttggatctgctagaagaagtggtgaagttacacttactaagggtgatcccggtagcctggaagagtgggaaacagtcgtgggcgatgacttctccctctattacgactcttactcagtggatgaaagggttgacagcgatagcaagagtgaggtggaagcgctgacagagcagctgtccgaagaagaggaggaggaagaagaagaagaggaagaggaggaggaggaggaggaggaggaggaggaggaagaagacgaagagtctggcaaccagtctgatcgctccggtagttctggcaggaggaaggctaagaaaaagtggcgtaaggactcgccttgggtcaagccgtcacggaagaggcgcaagagagagcccccaagggctaaagaacctaggggggttaatggggtaggctcctccggaccctcagagtacatggaggtcccattgggttctcttgagctgccatccgaggggaccctgtcacccaatcatgcaggagtgtccaatgatacaagctctttggagaccgagagagggtttgaggagctgccgctctgctcctgcagaatggaagcgccaaagattgacaggatctccgagagagcgggtcacaagtgtatggctactgaatctgttgatggcgaactgagtggttgtaacgctgccatcctgaagagggagactatgagacccagctctagagtggccctcatggttttgtgcgaaacacacagggctagaatggtcaagcaccattgttgccccggttgcggctatttctgcaccgctggaacgttccttgagtgtcatccggactttagggtggcgcacaggttccacaaggcatgcgtctcacaacttaatggtatggtgttctgcccccactgcggcgaggatgcaagtgaagcgcaggaggtcactataccaagaggggatggtgtgacaccaccagccggaaccgctgctccagcacctccacccttgagccaggatgtgcccggtcgggcagacacctcgcagccatccgctagaatgcgagggcatggtgagcctcgaaggccaccttgcgatccactagcagatactattgatagcagcgggccttctctcactctccctaacggaggctgcctatcagcggtcggactcccactgggtcccggaagggaggctctggaaaaagctttagtgatccaggaaagcgagcgccgtaagaagcttcgctttcatcccagacagttgtatcttagtgtaaagcagggagagcttcagaaggtcattcttatgctgctggacaatcttgatcccaacttccagtccgatcaacagagtaaaaggacccctcttcatgctgccgcacagaaaggatcagttgaaatatgtcacgtgctactccaggcaggcgcaaatattaatgccgttgataagcaacagcgcactcccctcatggaggcagtagtaaataaccacctcgaagtcgcccgatacatggttcaacgtggcggatgcgtgtacagcaaagaggaagacggctccacatgcctacaccacgccgctaagataggaaatctcgagatggtaagcctgttactgtctactggacaggtggacgttaatgctcaggacagtgggggatggacaccaattatttgggctgccgaacacaagcatatcgaagtgatcaggatgctcctcactaggggagccgacgtgactctaaccgacaacgaggagaatatctgtctgcattgggcttccttcaccggctccgcagccatcgccgaagtattactaaacgcacgttgtgatctgcacgccgttaattatcatggtgacactccactgcacatcgccgctcgtgagtcttaccacgactgcgttctactctttctatccagaggcgctaatcctgaactgcggaataaggaaggcgacactgcatgggatctgacacctgagcggtctgatgtgtggtttgccttgcagctgaaccgcaaactgcgactgggagtcggaaatagggctatccgcactgagaaaattatttgtcgagacgttgctagggggtatgagaacgtgccaataccttgtgtcaacggtgtggatggggaaccatgccccgaggactataaatacatctctgaaaattgcgaaacaagcaccatgaatatcgaccgcaatattacgcacctgcaacactgtacatgcgtggacgactgtagctcctccaattgcctttgcggacagctgagtattcgatgttggtatgacaaggatggtaggctgcttcaagagttcaacaagattgaacctcccttaatctttgagtgtaaccaggcttgctcctgctggcgcaactgtaaaaaccgagtcgtgcagtctgggattaaagtgcggcttcagttgtaccgcaccgccaagatgggatggggggttagagcactgcagacaatccctcagggtacatttatttgcgaatacgtgggcgaacttatttcagatgcggaggctgacgttagggaggatgactcatatctgtttgacctggacaataaggacggcgaggtgtactgcattgacgccaggtactacggcaacatcagccgtttcatcaatcacctctgcgaccctaatataattcccgtccgagtcttcatgcttcaccaggatcttaggtttccccgtatagccttcttttcttcacgagatattcgcactggggaggaacttgggtttgattacggcgaccgcttctgggatatcaaaagtaagtatttcacatgtcagtgtggcagcgaaaaatgcaaacactctgccgaagccatagctctggaacaaagcaggcttgcacgcctggaccctcaccccgaactgctgccagagctcggttctttgccgccagtcaacacatag

SEQ ID NO: 268744 - DNA, 3633 bp, Artificial Sequence
  derived and/or modified sequence
atggccgctgccgctggcgctgcagccgcagccgctgctgaaggcgaagctcccgcagagatgggggcactcctccttgagaaggaaactagaggagctactgagagggtgcacgggagcctcggggacactccgagaagtgaggagacactgccaaaagcgacccctgactccctggaaccggcaggcccatcatccccggcaagcgtgacagttaccgttggcgatgagggagctgacacccccgtgggcgctacaccattgattggtgatgagagcgaaaacctcgagggggacggagacctccgtggtgggcgaatcctgttgggacacgcaaccaaatcctttccgtcctcaccctccaaggggggatcttgcccctcgagagccaagatgagcatgactggagcaggcaagtccccaccatccgtccagagtctggcaatgcgcctcctcagtatgcctggcgctcagggggctgctgccgctgggagtgaacccccaccagcaaccacaagcccagaggggcagcctaaggtgcatagggctaggaagacaatgagcaagccaggcaacggacaacccccagttcccgagaagaggcctccagaaatccagcacttccgcatgagcgacgatgtgcattccctggggaaggtgacgtccgatctcgcaaagcggcgaaagctgaacagcggtggtggattatccgaagaactgggctctgcacgacgttcgggcgaggtcactctgaccaaaggggatcctggcagcttggaagaatgggaaactgtagtgggcgatgacttttccctctattatgattcatatagtgtcgatgaacgtgttgatagcgactctaagagcgaagtcgaggccctcacagaacagctgagcgaagaagaggaagaagaggaggaggaggaggaggaagaggaagaagaagaagaagaggaggaggaggaggaagatgaggagagcggaaaccagtccgaccggtcaggatctagcggcaggcgaaaagctaagaagaaatggcgcaaggattctccttgggtgaagccttctcggaaacgcagaaagagggaaccaccacgcgcaaaggaaccaaggggagttaacggtgtggggtccagtgggccttctgagtacatggaggttcctttggggtctttagagttgccgtcagaagggacgctcagccctaaccacgctggagtgtcaaacgatacgagctccctcgagaccgaacggggttttgaggagttgcctttgtgctcttgtaggatggaggcccctaaaatagaccgcatatctgagcgcgctggacataaatgtatggcgacagagtccgtagatggcgagctgtcaggctgtaatgccgctattttgaagcgcgaaacaatgagacctagcagtcgtgtagcactgatggtactctgcgaaacacacagggcacgcatggtcaagcaccattgctgccccggttgcggatacttctgtacagcgggaacattcttagaatgccatcctgacttcagagtagctcatcggttccacaaagcatgcgtctcccaattgaatggcatggtcttttgtccacattgcggggaagatgcctccgaggcgcaggaggtgacgatcccacgcggtgatggtgtgacccccccagctgggacggctgccccagcaccccctccgctcagtcaggacgtgccaggtcgcgctgacaccagccagccatccgcgagaatgaggggtcatggtgagccgagaagacccccttgcgatcctcttgctgatacaatcgattcctcagggccttctttgactctgcctaacggcggttgcctgtctgctgtggggttgcccttgggcccaggtcgggaggctctcgagaaagcgttagtcatccaagagtctgagcgcaggaaaaaactgcgctttcacccaaggcagctgtacctgagcgtcaagcagggggaactgcaaaaagtcatcctgatgcttctcgataaccttgaccccaatttccagagtgaccaacagtctaagcggacacctctgcacgcggcagcacagaagggttctgtggagatctgtcatgttttactccaagcgggagccaatataaatgccgtagacaaacagcaacgcacccccctgatggaagcggttgtgaacaaccacctggaggtggcgagatacatggtccagagaggtggctgcgtttacagcaaggaggaggacgggtctacttgccttcaccatgcagccaagatcggtaatctggagatggtgagtcttttattgtctacggggcaggtggacgtcaacgcccaggacagtggaggctggaccccaatcatctgggccgctgagcataagcacattgaagttatccgcatgcttctgactaggggggcagatgtgactctgactgacaatgaggagaacatatgtttgcactgggcatcatttaccggcagtgcagctatcgcagaggtccttctcaacgccaggtgcgacttacacgctgtcaattaccacggtgacacaccacttcacattgctgcaagggagtcgtaccacgattgtgttctgcttttcctcagcaggggtgccaatccagagctgaggaacaaagaaggcgacacagcttgggatcttactcccgaacggtctgatgtctggttcgcccttcagctcaaccggaagctccggcttggggtcggcaacagagccattagaaccgaaaaaattatctgtcgggacgtggcacgagggtacgagaatgtaccaataccttgcgttaatggcgtggatggcgaaccctgcccagaggactataagtatatttcggagaactgtgaaacatcgacaatgaatattgacaggaacattacacatctgcagcactgcacctgcgtggatgattgtagctcgagtaactgcctgtgcggccaattatctatccgctgctggtatgataaggatggcagactgcttcaggaatttaacaagattgagcctcctctaatcttcgaatgtaaccaggcatgcagctgttggcgaaactgtaagaatcgtgtagtacagtctggcataaaggtacggctgcaactctataggaccgcaaaaatgggatggggggtgcgcgctctacagacaattcctcaggggacatttatatgtgaatacgtgggggagctcatctctgacgccgaagctgacgtgcgggaggacgacagttacttgtttgacctcgataacaaggacggggaagtgtactgcatcgatgcacgatactatgggaacatctcccgtttcatcaaccacctgtgtgaccccaacattatccctgtgagggttttcatgctgcatcaggatcttcgtttcccgaggattgcatttttttcttcgagggatatcagaacaggggaggagctgggcttcgattacggtgatcggttctgggacatcaaaagtaaatatttcacctgtcagtgcggatctgagaaatgcaagcacagcgccgaagctatcgcgctggaacagtcccggctagctcgcctggacccacacccagagctgttgccggagctaggctctctgccgccagtgaatacctag

SEQ ID NO: 268745 - DNA, 2769 bp, Artificial Sequence
  derived and/or modified sequence
agtgaggttgaggctctgacagagcagttatctgaagaagaagaagaagaagaagaagaggaggaggaggaagaggaggaggaggaagaggaggaagaggaagaagatgaagagagtggaaatcagagcgaccgctccggttcctctggccgtagaaaggcgaagaaaaaatggcgcaaggattctccctgggtaaagccatctcgaaaaaggcgtaagcgggagccccctagggccaaagagcccagaggggtcaacggagttgggagctcgggcccaagtgaatacatggaggttccactgggctcacttgaactcccgtccgaaggcacgctgagtcctaatcatgctggcgtgagcaacgacacaagctccctcgagacggaaagaggcttcgaagagctgcccctttgttcatgtcgaatggaagctcccaagattgataggatctctgagcgtgccggacacaaatgtatggctactgaaagcgtggatggggaactgtctggctgcaatgccgcaattttaaagagggaaaccatgagaccaagctcacgggtcgccctaatggtgctgtgtgagactcatagagctaggatggttaaacaccactgttgtcccggatgtggatacttttgcactgccggtaccttcctcgagtgccaccctgacttccgcgtagcccaccggttccataaggcttgtgttagtcagttaaacggtatggtgttctgccctcattgcggagaggatgccagcgaggcccaggaagttacaatccccaggggtgatggcgtgactccacccgctggtacagctgctccagcacctccacctcttagccaggacgttcccggaagggcggatacaagccagccgtcagcccgtatgcgcggtcatggtgagccacgacgtcccccttgcgatcctcttgcagacacaattgactcctccggcccttcccttactctcccgaatgggggatgtctgtccgcagtgggtctcccgttaggtcccggaagggaggcccttgagaaggccctggtgattcaggagagtgagaggaggaaaaagctcaggttccacccaaggcagctctacctgagtgtgaagcaaggcgagctgcagaaggtgatccttatgctgctggacaacctcgacccaaactttcagtccgaccagcagtctaagcggactccactccacgctgctgctcagaaaggctctgttgagatctgtcatgttttgctacaagcgggagctaacatcaacgcggtggataaacagcaacgcacacccctgatggaggcagtggtgaacaatcatctggaagtggccagatatatggttcagcgaggcggttgcgtgtattctaaagaggaagatgggagcacatgcctccatcatgctgccaaaatcggaaacttggaaatggtgtcacttctgctgtccaccggacaagtggatgtgaacgcccaggattcaggtggctggacacccatcatttgggctgctgagcataaacacatagaggtgataaggatgctcctgactcggggagcggatgtcactctcacagataatgaggaaaatatctgtctacattgggcgagttttactggttcagccgcaatcgccgaagttttgctgaacgccaggtgcgatctacatgcggttaactaccacggggacacccccctccacatcgctgcacgcgaaagctatcatgattgtgttttgctgttcctctctcggggagccaatccagaactacgtaacaaggagggcgataccgcctgggaccttacacccgagcgtagcgatgtgtggttcgccctgcaattgaatcggaaactccgtctcggagtcggaaaccgggctattcgcaccgagaaaatcatttgtagagatgtggcacgaggctacgagaacgtgcccattccctgtgtcaatggcgtggacggcgaaccgtgtcctgaagattataaatatattagtgaaaattgtgaaaccagcacaatgaacatcgaccggaatattactcatttgcagcactgtacatgcgtcgacgactgtagctcttccaattgtctgtgtggccagctgtctattagatgctggtacgacaaagacgggagactactgcaggaattcaacaagattgagcccccacttatctttgagtgtaaccaggcgtgcagctgctggcgcaattgcaagaacagagtcgtgcagtccggcatcaaagtgcggctgcagttgtatcgtacagccaaaatgggttggggcgtgcgggcattgcagacaatcccccaggggaccttcatctgtgagtacgtgggagaactcatatcggatgccgaggccgacgttcgggaagacgatagctacctgtttgatctagacaacaaagatggagaagtctactgtatagacgctagatattacggcaacatttcaagatttatcaatcatttgtgtgacccaaatattataccagttcgggtatttatgctccatcaggacctcagattccctcggattgccttcttctcctctcgagacatccgtacgggcgaagaattgggcttcgattacggagacaggttctgggacattaaatccaagtatttcacttgccagtgtggtagcgagaaatgcaaacactccgccgaagcaatcgcactggaacagtcaaggctggcgaggttggatcctcacccggagttactcccagaactcgggagcctaccgccagtcaacacatag

SEQ ID NO: 268746 - DNA, 3633 bp, Artificial Sequence
  derived and/or modified sequence
atggccgccgccgccggcgccgccgccgccgccgccgccgagggcgaggcccccgccgagatgggcgccctgctgctggagaaggagaccagaggcgccaccgagagagtgcacggcagcctgggcgacacccccagaagcgaggagaccctgcccaaggccacccccgacagcctggagcccgccggccccagcagccccgccagcgtgaccgtgaccgtgggcgacgagggcgccgacacccccgtgggcgccacccccctgatcggcgacgagagcgagaacctggagggcgacggcgacctgagaggcggcagaatcctgctgggccacgccaccaagagcttccccagcagccccagcaagggcggcagctgccccagcagagccaagatgagcatgaccggcgccggcaagagcccccccagcgtgcagagcctggccatgagactgctgagcatgcccggcgcccagggcgccgccgccgccggcagcgagcccccccccgccaccaccagccccgagggccagcccaaggtgcacagagccagaaagaccatgagcaagcccggcaacggccagccccccgtgcccgagaagagaccccccgagatccagcacttcagaatgagcgacgacgtgcacagcctgggcaaggtgaccagcgacctggccaagagaagaaagctgaacagcggcggcggcctgagcgaggagctgggcagcgccagaagaagcggcgaggtgaccctgaccaagggcgaccccggcagcctggaggagtgggagaccgtggtgggcgacgacttcagcctgtactacgacagctacagcgtggacgagagagtggacagcgacagcaagagcgaggtggaggccctgaccgagcagctgagcgaggaggaggaggaggaggaggaggaggaggaggaggaggaggaggaggaggaggaggaggaggaggaggaggacgaggagagcggcaaccagagcgacagaagcggcagcagcggcagaagaaaggccaagaagaagtggagaaaggacagcccctgggtgaagcccagcagaaagagaagaaagagagagccccccagagccaaggagcccagaggcgtgaacggcgtgggcagcagcggccccagcgagtacatggaggtgcccctgggcagcctggagctgcccagcgagggcaccctgagccccaaccacgccggcgtgagcaacgacaccagcagcctggagaccgagagaggcttcgaggagctgcccctgtgcagctgcagaatggaggcccccaagatcgacagaatcagcgagagagccggccacaagtgcatggccaccgagagcgtggacggcgagctgagcggctgcaacgccgccatcctgaagagagagaccatgagacccagcagcagagtggccctgatggtgctgtgcgagacccacagagccagaatggtgaagcaccactgctgccccggctgcggctacttctgcaccgccggcaccttcctggagtgccaccccgacttcagagtggcccacagattccacaaggcctgcgtgagccagctgaacggcatggtgttctgcccccactgcggcgaggacgccagcgaggcccaggaggtgaccatccccagaggcgacggcgtgaccccccccgccggcaccgccgcccccgcccccccccccctgagccaggacgtgcccggcagagccgacaccagccagcccagcgccagaatgagaggccacggcgagcccagaagacccccctgcgaccccctggccgacaccatcgacagcagcggccccagcctgaccctgcccaacggcggctgcctgagcgccgtgggcctgcccctgggccccggcagagaggccctggagaaggccctggtgatccaggagagcgagagaagaaagaagctgagattccaccccagacagctgtacctgagcgtgaagcagggcgagctgcagaaggtgatcctgatgctgctggacaacctggaccccaacttccagagcgaccagcagagcaagagaacccccctgcacgccgccgcccagaagggcagcgtggagatctgccacgtgctgctgcaggccggcgccaacatcaacgccgtggacaagcagcagagaacccccctgatggaggccgtggtgaacaaccacctggaggtggccagatacatggtgcagagaggcggctgcgtgtacagcaaggaggaggacggcagcacctgcctgcaccacgccgccaagatcggcaacctggagatggtgagcctgctgctgagcaccggccaggtggacgtgaacgcccaggacagcggcggctggacccccatcatctgggccgccgagcacaagcacatcgaggtgatcagaatgctgctgaccagaggcgccgacgtgaccctgaccgacaacgaggagaacatctgcctgcactgggccagcttcaccggcagcgccgccatcgccgaggtgctgctgaacgccagatgcgacctgcacgccgtgaactaccacggcgacacccccctgcacatcgccgccagagagagctaccacgactgcgtgctgctgttcctgagcagaggcgccaaccccgagctgagaaacaaggagggcgacaccgcctgggacctgacccccgagagaagcgacgtgtggttcgccctgcagctgaacagaaagctgagactgggcgtgggcaacagagccatcagaaccgagaagatcatctgcagagacgtggccagaggctacgagaacgtgcccatcccctgcgtgaacggcgtggacggcgagccctgccccgaggactacaagtacatcagcgagaactgcgagaccagcaccatgaacatcgacagaaacatcacccacctgcagcactgcacctgcgtggacgactgcagcagcagcaactgcctgtgcggccagctgagcatcagatgctggtacgacaaggacggcagactgctgcaggagttcaacaagatcgagccccccctgatcttcgagtgcaaccaggcctgcagctgctggagaaactgcaagaacagagtggtgcagagcggcatcaaggtgagactgcagctgtacagaaccgccaagatgggctggggcgtgagagccctgcagaccatcccccagggcaccttcatctgcgagtacgtgggcgagctgatcagcgacgccgaggccgacgtgagagaggacgacagctacctgttcgacctggacaacaaggacggcgaggtgtactgcatcgacgccagatactacggcaacatcagcagattcatcaaccacctgtgcgaccccaacatcatccccgtgagagtgttcatgctgcaccaggacctgagattccccagaatcgccttcttcagcagcagagacatcagaaccggcgaggagctgggcttcgactacggcgacagattctgggacatcaagagcaagtacttcacctgccagtgcggcagcgagaagtgcaagcacagcgccgaggccatcgccctggagcagagcagactggccagactggacccccaccccgagctgctgcccgagctgggcagcctgccccccgtgaacacctag

SEQ ID NO: 268747 - DNA, 3804 bp, Artificial Sequence
  derived and/or modified sequence
atgagaggcctgcccagaggcagaggcctgatgagagccagaggcagaggcagagccgccccccccggcagcagaggcagaggcagaggcggcccccacagaggcagaggcagacccagaagcctgctgagcctgcccagagcccaggccagctggaccccccagctgagcaccggcctgaccagcccccccgtgccctgcctgcccagccagggcgaggcccccgccgagatgggcgccctgctgctggagaaggagaccagaggcgccaccgagagagtgcacggcagcctgggcgacacccccagaagcgaggagaccctgcccaaggccacccccgacagcctggagcccgccggccccagcagccccgccagcgtgaccgtgaccgtgggcgacgagggcgccgacacccccgtgggcgccacccccctgatcggcgacgagagcgagaacctggagggcgacggcgacctgagaggcggcagaatcctgctgggccacgccaccaagagcttccccagcagccccagcaagggcggcagctgccccagcagagccaagatgagcatgaccggcgccggcaagagcccccccagcgtgcagagcctggccatgagactgctgagcatgcccggcgcccagggcgccgccgccgccggcagcgagcccccccccgccaccaccagccccgagggccagcccaaggtgcacagagccagaaagaccatgagcaagcccggcaacggccagccccccgtgcccgagaagagaccccccgagatccagcacttcagaatgagcgacgacgtgcacagcctgggcaaggtgaccagcgacctggccaagagaagaaagctgaacagcggcggcggcctgagcgaggagctgggcagcgccagaagaagcggcgaggtgaccctgaccaagggcgaccccggcagcctggaggagtgggagaccgtggtgggcgacgacttcagcctgtactacgacagctacagcgtggacgagagagtggacagcgacagcaagagcgaggtggaggccctgaccgagcagctgagcgaggaggaggaggaggaggaggaggaggaggaggaggaggaggaggaggaggaggaggaggaggaggaggaggacgaggagagcggcaaccagagcgacagaagcggcagcagcggcagaagaaaggccaagaagaagtggagaaaggacagcccctgggtgaagcccagcagaaagagaagaaagagagagccccccagagccaaggagcccagaggcgtgaacggcgtgggcagcagcggccccagcgagtacatggaggtgcccctgggcagcctggagctgcccagcgagggcaccctgagccccaaccacgccggcgtgagcaacgacaccagcagcctggagaccgagagaggcttcgaggagctgcccctgtgcagctgcagaatggaggcccccaagatcgacagaatcagcgagagagccggccacaagtgcatggccaccgagagcgtggacggcgagctgagcggctgcaacgccgccatcctgaagagagagaccatgagacccagcagcagagtggccctgatggtgctgtgcgagacccacagagccagaatggtgaagcaccactgctgccccggctgcggctacttctgcaccgccggcaccttcctggagtgccaccccgacttcagagtggcccacagattccacaaggcctgcgtgagccagctgaacggcatggtgttctgcccccactgcggcgaggacgccagcgaggcccaggaggtgaccatccccagaggcgacggcgtgaccccccccgccggcaccgccgcccccgcccccccccccctgagccaggacgtgcccggcagagccgacaccagccagcccagcgccagaatgagaggccacggcgagcccagaagacccccctgcgaccccctggccgacaccatcgacagcagcggccccagcctgaccctgcccaacggcggctgcctgagcgccgtgggcctgcccctgggccccggcagagaggccctggagaaggccctggtgatccaggagagcgagagaagaaagaagctgagattccaccccagacagctgtacctgagcgtgaagcagggcgagctgcagaaggtgatcctgatgctgctggacaacctggaccccaacttccagagcgaccagcagagcaagagaacccccctgcacgccgccgcccagaagggcagcgtggagatctgccacgtgctgctgcaggccggcgccaacatcaacgccgtggacaagcagcagagaacccccctgatggaggccgtggtgaacaaccacctggaggtggccagatacatggtgcagagaggcggctgcgtgtacagcaaggaggaggacggcagcacctgcctgcaccacgccgccaagatcggcaacctggagatggtgagcctgctgctgagcaccggccaggtggacgtgaacgcccaggacagcggcggctggacccccatcatctgggccgccgagcacaagcacatcgaggtgatcagaatgctgctgaccagaggcgccgacgtgaccctgaccgacaacgaggagaacatctgcctgcactgggccagcttcaccggcagcgccgccatcgccgaggtgctgctgaacgccagatgcgacctgcacgccgtgaactaccacggcgacacccccctgcacatcgccgccagagagagctaccacgactgcgtgctgctgttcctgagcagaggcgccaaccccgagctgagaaacaaggagggcgacaccgcctgggacctgacccccgagagaagcgacgtgtggttcgccctgcagctgaacagaaagctgagactgggcgtgggcaacagagccatcagaaccgagaagatcatctgcagagacgtggccagaggctacgagaacgtgcccatcccctgcgtgaacggcgtggacggcgagccctgccccgaggactacaagtacatcagcgagaactgcgagaccagcaccatgaacatcgacagaaacatcacccacctgcagcactgcacctgcgtggacgactgcagcagcagcaactgcctgtgcggccagctgagcatcagatgctggtacgacaaggacggcagactgctgcaggagttcaacaagatcgagccccccctgatcttcgagtgcaaccaggcctgcagctgctggagaaactgcaagaacagagtggtgcagagcggcatcaaggtgagactgcagctgtacagaaccgccaagatgggctggggcgtgagagccctgcagaccatcccccagggcaccttcatctgcgagtacgtgggcgagctgatcagcgacgccgaggccgacgtgagagaggacgacagctacctgttcgacctggacaacaaggacggcgaggtgtactgcatcgacgccagatactacggcaacatcagcagattcatcaaccacctgtgcgaccccaacatcatccccgtgagagtgttcatgctgcaccaggacctgagattccccagaatcgccttcttcagcagcagagacatcagaaccggcgaggagctgggcttcgactacggcgacagattctgggacatcaagagcaagtacttcacctgccagtgcggcagcgagaagtgcaagcacagcgccgaggccatcgccctggagcagagcagactggccagactggacccccaccccgagctgctgcccgagctgggcagcctgccccccgtgaacacctag

SEQ ID NO: 268748 - DNA, 2769 bp, Artificial Sequence
  derived and/or modified sequence
agcgaggtggaggccctgaccgagcagctgagcgaggaggaggaggaggaggaggaggaggaggaggaggaggaggaggaggaggaggaggaggaggaggaggaggacgaggagagcggcaaccagagcgacagaagcggcagcagcggcagaagaaaggccaagaagaagtggagaaaggacagcccctgggtgaagcccagcagaaagagaagaaagagagagccccccagagccaaggagcccagaggcgtgaacggcgtgggcagcagcggccccagcgagtacatggaggtgcccctgggcagcctggagctgcccagcgagggcaccctgagccccaaccacgccggcgtgagcaacgacaccagcagcctggagaccgagagaggcttcgaggagctgcccctgtgcagctgcagaatggaggcccccaagatcgacagaatcagcgagagagccggccacaagtgcatggccaccgagagcgtggacggcgagctgagcggctgcaacgccgccatcctgaagagagagaccatgagacccagcagcagagtggccctgatggtgctgtgcgagacccacagagccagaatggtgaagcaccactgctgccccggctgcggctacttctgcaccgccggcaccttcctggagtgccaccccgacttcagagtggcccacagattccacaaggcctgcgtgagccagctgaacggcatggtgttctgcccccactgcggcgaggacgccagcgaggcccaggaggtgaccatccccagaggcgacggcgtgaccccccccgccggcaccgccgcccccgcccccccccccctgagccaggacgtgcccggcagagccgacaccagccagcccagcgccagaatgagaggccacggcgagcccagaagacccccctgcgaccccctggccgacaccatcgacagcagcggccccagcctgaccctgcccaacggcggctgcctgagcgccgtgggcctgcccctgggccccggcagagaggccctggagaaggccctggtgatccaggagagcgagagaagaaagaagctgagattccaccccagacagctgtacctgagcgtgaagcagggcgagctgcagaaggtgatcctgatgctgctggacaacctggaccccaacttccagagcgaccagcagagcaagagaacccccctgcacgccgccgcccagaagggcagcgtggagatctgccacgtgctgctgcaggccggcgccaacatcaacgccgtggacaagcagcagagaacccccctgatggaggccgtggtgaacaaccacctggaggtggccagatacatggtgcagagaggcggctgcgtgtacagcaaggaggaggacggcagcacctgcctgcaccacgccgccaagatcggcaacctggagatggtgagcctgctgctgagcaccggccaggtggacgtgaacgcccaggacagcggcggctggacccccatcatctgggccgccgagcacaagcacatcgaggtgatcagaatgctgctgaccagaggcgccgacgtgaccctgaccgacaacgaggagaacatctgcctgcactgggccagcttcaccggcagcgccgccatcgccgaggtgctgctgaacgccagatgcgacctgcacgccgtgaactaccacggcgacacccccctgcacatcgccgccagagagagctaccacgactgcgtgctgctgttcctgagcagaggcgccaaccccgagctgagaaacaaggagggcgacaccgcctgggacctgacccccgagagaagcgacgtgtggttcgccctgcagctgaacagaaagctgagactgggcgtgggcaacagagccatcagaaccgagaagatcatctgcagagacgtggccagaggctacgagaacgtgcccatcccctgcgtgaacggcgtggacggcgagccctgccccgaggactacaagtacatcagcgagaactgcgagaccagcaccatgaacatcgacagaaacatcacccacctgcagcactgcacctgcgtggacgactgcagcagcagcaactgcctgtgcggccagctgagcatcagatgctggtacgacaaggacggcagactgctgcaggagttcaacaagatcgagccccccctgatcttcgagtgcaaccaggcctgcagctgctggagaaactgcaagaacagagtggtgcagagcggcatcaaggtgagactgcagctgtacagaaccgccaagatgggctggggcgtgagagccctgcagaccatcccccagggcaccttcatctgcgagtacgtgggcgagctgatcagcgacgccgaggccgacgtgagagaggacgacagctacctgttcgacctggacaacaaggacggcgaggtgtactgcatcgacgccagatactacggcaacatcagcagattcatcaaccacctgtgcgaccccaacatcatccccgtgagagtgttcatgctgcaccaggacctgagattccccagaatcgccttcttcagcagcagagacatcagaaccggcgaggagctgggcttcgactacggcgacagattctgggacatcaagagcaagtacttcacctgccagtgcggcagcgagaagtgcaagcacagcgccgaggccatcgccctggagcagagcagactggccagactggacccccaccccgagctgctgcccgagctgggcagcctgccccccgtgaacacctag

SEQ ID NO: 268749 - DNA, 3965 bp, Artificial Sequence
  derived and/or modified sequence
agcggcgatggcggcggcggcgggagctgcagcggcggcggccgccgagggggaggcccccgctgagatgggggcgctgctgctggagaaggaaaccagaggagccaccgagagagttcatggctctttgggggacacccctcgtagtgaagaaaccctgcccaaggccacccccgactccctggagcctgctggcccctcatctccagcctctgtcactgtcactgttggtgatgagggggctgacacccctgtaggggctacaccactcattggggatgaatctgagaatcttgagggagatggggacctccgtgggggccggatcctgctgggccatgccacaaagtcattcccctcttcccccagcaaggggggttcctgtcctagccgggccaagatgtcaatgacaggggcgggaaaatcacctccatctgtccagagtttggctatgaggctactgagtatgccaggagcccagggagctgcagcagcagggtctgaaccccctccagccaccacgagcccagagggacagcccaaggtccaccgagcccgcaaaaccatgtccaaaccaggaaatggacagcccccggtccctgagaagcggccccctgaaatacagcatttccgcatgagtgatgatgtccactcactgggaaaggtgacctcagatctggccaaaaggaggaagctgaactcaggaggtggcctgtcagaggagttaggttctgcccggcgttcaggagaagtgaccctgacgaaaggggaccccgggtccctggaggagtgggagacggtggtgggtgatgacttcagtctctactatgattcctactctgtggatgagcgcgtggactccgacagcaagtctgaagttgaagctctaactgaacaactaagtgaagaggaggaggaggaagaggaggaagaagaagaagaggaagaggaggaggaagaggaagaagaagaggaagatgaggagtcagggaatcagtcagataggagtggttccagtggccggcgcaaggccaagaagaaatggcgaaaagacagcccatgggtgaagccgtctcggaaacggcgcaagcgggagcctccgcgggccaaggagccacgaggagtgaatggtgtgggctcctcaggccccagtgagtacatggaggtccctctggggtccctggagctgcccagcgaggggaccctctcccccaaccacgctggggtgtccaatgacacatcttcgctggagacagagcgagggtttgaggagttgcccctgtgcagctgccgcatggaggcacccaagattgaccgcatcagcgagagggcggggcacaagtgcatggccactgagagtgtggacggagagctgtcaggctgcaatgccgccatcctcaagcgggagaccatgaggccatccagccgtgtggccctgatggtgctctgtgagacccaccgcgcccgcatggtcaaacaccactgctgcccgggctgcggctacttctgcacggcgggcaccttcctggagtgccaccctgacttccgtgtggcccaccgcttccacaaggcctgtgtgtctcagctgaatgggatggtcttctgtccccactgtggggaggatgcttctgaagctcaagaggtgaccatcccccggggtgacggggtgaccccaccggccggcactgcagctcctgcacccccacccctgtcccaggatgtccccgggagagcagacacttctcagcccagtgcccggatgcgagggcatggggaaccccggcgcccgccctgcgatcccctggctgacaccattgacagctcagggccctccctgaccctgcccaatgggggctgcctttcagccgtggggctgccactggggccaggccgggaggccctggaaaaggccctggtcatccaggagtcagagaggcggaagaagctccgtttccaccctcggcagttgtacctgtccgtgaagcagggcgagctgcagaaggtgatcctgatgctgttggacaacctggaccccaacttccagagcgaccagcagagcaagcgcacgcccctgcatgcagccgcccagaagggctccgtggagatctgccatgtgctgctgcaggctggagccaacataaatgcagtggacaaacagcagcggacgccactgatggaggccgtggtgaacaaccacctggaggtagcccgttacatggtgcagcgtggtggctgtgtctatagcaaggaggaggacggttccacctgcctccaccacgcagccaaaatcgggaacttggagatggtcagcctgctgctgagcacaggacaggtggacgtcaacgcccaggacagtggggggtggacgcccatcatctgggctgcagagcacaagcacatcgaggtgatccgcatgctactgacgcggggcgccgacgtcaccctcactgacaacgaggagaacatctgcctgcactgggcctccttcacgggcagcgccgccatcgccgaagtccttctgaatgcgcgctgtgacctccatgctgtcaactaccatggggacacccccctgcacatcgcagctcgggagagctaccatgactgcgtgctgttattcctgtcacgtggggccaaccctgagctgcggaacaaagagggggacacagcatgggacctgactcccgagcgctccgacgtgtggtttgcgcttcaactcaaccgcaagctccgacttggggtgggaaatcgggccatccgcacagagaagatcatctgccgggacgtggctcggggctatgagaacgtgcccattccctgtgtcaacggtgtggatggggagccctgccctgaggattacaagtacatctcagagaactgcgagacgtccaccatgaacatcgatcgcaacatcacccacctgcagcactgcacgtgtgtggacgactgctctagctccaactgcctgtgcggccagctcagcatccggtgctggtatgacaaggatgggcgattgctccaggaatttaacaagattgagcctccgctgattttcgagtgtaaccaggcgtgctcatgctggagaaactgcaagaaccgggtcgtacagagtggcatcaaggtgcggctacagctctaccgaacagccaagatgggctggggggtccgcgccctgcagaccatcccacaggggaccttcatctgcgagtatgtcggggagctgatctctgatgctgaggctgatgtgagagaggatgattcttacctcttcgacttagacaacaaggatggagaggtgtactgcatagatgcccgttactatggcaacatcagccgcttcatcaaccacctgtgtgaccccaacatcattcccgtccgggtcttcatgctgcaccaagacctgcgatttccacgcatcgccttcttcagttcccgagacatccggactggggaggagctagggtttgactatggcgaccgcttctgggacatcaaaagcaaatatttcacctgccaatgtggctctgagaagtgcaagcactcagccgaagccattgccctggagcagagccgtctggcccgcctggacccacaccctgagctgctgcccgagctcggctccctgccccctgtcaacacatgagaacggaccacaccctctctccccagcatggatggccacagctcagccgcctcctctgccaccagctgctcgcagcccatgcctgggggtgctgccatcttctctccccaccaccctttcacacattcctgaccagagatcccagccaggccctggaggtctgacagcccctccctcccagagctggttcctccctgggagggcaacttcagggctggccaccccccgtgttccccatcctcagttgaagtttgatgaattgaagtcgggcctctatgccaactggttccttttgttctcaataaatgttgggtttggtaataaa

SEQ ID NO: 268750 - DNA, 3980 bp, Artificial Sequence
  derived and/or modified sequence
tcggcccccagcgcaagcggcgatggcggcggcggcgggagctgcagcggcggcggccgccgagggggaggcccccgctgagatgggggcgctgctgctggagaaggaaaccagaggagccaccgagagagttcatggctctttgggggacacccctcgtagtgaagaaaccctgcccaaggccacccccgactccctggagcctgctggcccctcatctccagcctctgtcactgtcactgttggtgatgagggggctgacacccctgtaggggctacaccactcattggggatgaatctgagaatcttgagggagatggggacctccgtgggggccggatcctgctgggccatgccacaaagtcattcccctcttcccccagcaaggggggttcctgtcctagccgggccaagatgtcaatgacaggggcgggaaaatcacctccatctgtccagagtttggctatgaggctactgagtatgccaggagcccagggagctgcagcagcagggtctgaaccccctccagccaccacgagcccagagggacagcccaaggtccaccgagcccgcaaaaccatgtccaaaccaggaaatggacagcccccggtccctgagaagcggccccctgaaatacagcatttccgcatgagtgatgatgtccactcactgggaaaggtgacctcagatctggccaaaaggaggaagctgaactcaggaggtggcctgtcggaggagttaggttctgcccggcgttcaggagaagtgaccctgacgaaaggggaccccgggtccctggaggagtgggagacggtggtgggtgatgacttcagtctctactatgattcctactctgtggatgagcgcgtggactccgacagcaagtctgaagttgaagctctaactgaacaactaagtgaagaggaggaggaggaagaggaggaagaagaagaagaggaagaggaggaggaagaggaagaagaagaggaagatgaggagtcagggaatcagtcagataggagtggttccagtggccggcgcaaggccaagaagaaatggcgaaaagacagcccatgggtgaagccgtctcggaaacggcgcaagcgggagcctccgcgggccaaggagccacgaggagtgaatggtgtgggctcctcaggccccagtgagtacatggaggtccctctggggtccctggagctgcccagcgaggggaccctctcccccaaccacgctggggtgtccaatgacacatcttcgctggagacagagcgagggtttgaggagttgcccctgtgcagctgccgcatggaggcacccaagattgaccgcatcagcgagagggcggggcacaagtgcatggccactgagagtgtggacggagagctgtcaggctgcaatgccgccatcctcaagcgggagaccatgaggccatccagccgtgtggccctgatggtgctctgtgagacccaccgcgcccgcatggtcaaacaccactgctgcccgggctgcggctacttctgcacggcgggcaccttcctggagtgccaccctgacttccgtgtggcccaccgcttccacaaggcctgtgtgtctcagctgaatgggatggtcttctgtccccactgtggggaggatgcttctgaagctcaagaggtgaccatcccccggggtgacggggtgaccccaccggccggcactgcagctcctgcacccccacccctgtcccaggatgtccccgggagagcagacacttctcagcccagtgcccggatgcgagggcatggggaaccccggcgcccgccctgcgatcccctggctgacaccattgacagctcagggccctccctgaccctgcccaatgggggctgcctttcagccgtggggctgccactggggccaggccgggaggccctggaaaaggccctggtcatccaggagtcagagaggcggaagaagctccgtttccaccctcggcagttgtacctgtccgtgaagcagggcgagctgcagaaggtgatcctgatgctgttggacaacctggaccccaacttccagagcgaccagcagagcaagcgcacgcccctgcatgcagccgcccagaagggctccgtggagatctgccatgtgctgctgcaggctggagccaacataaatgcagtggacaaacagcagcggacgccactgatggaggccgtggtgaacaaccacctggaggtagcccgttacatggtgcagcgtggtggctgtgtctatagcaaggaggaggacggttccacctgcctccaccacgcagccaaaatcgggaacttggagatggtcagcctgctgctgagcacaggacaggtggacgtcaacgcccaggacagtggggggtggacgcccatcatctgggctgcagagcacaagcacatcgaggtgatccgcatgctactgacgcggggcgccgacgtcaccctcactgacaacgaggagaacatctgcctgcactgggcctccttcacgggcagcgccgccatcgccgaagtccttctgaatgcgcgctgtgacctccatgctgtcaactaccatggggacacccccctgcacatcgcagctcgggagagctaccatgactgcgtgctgttattcctgtcacgtggggccaaccctgagctgcggaacaaagagggggacacagcatgggacctgactcccgagcgctccgacgtgtggtttgcgcttcaactcaaccgcaagctccgacttggggtgggaaatcgggccatccgcacagagaagatcatctgccgggacgtggctcggggctatgagaacgtgcccattccctgtgtcaacggtgtggatggggagccctgccctgaggattacaagtacatctcagagaactgcgagacgtccaccatgaacatcgatcgcaacatcacccacctgcagcactgcacgtgtgtggacgactgctctagctccaactgcctgtgcggccagctcagcatccggtgctggtatgacaaggatgggcgattgctccaggaatttaacaagattgagcctccgctgattttcgagtgtaaccaggcgtgctcatgctggagaaactgcaagaaccgggtcgtacagagtggcatcaaggtgcggctacagctctaccgaacagccaagatgggctggggggtccgcgccctgcagaccatcccacaggggaccttcatctgcgagtatgtcggggagctgatctctgatgctgaggctgatgtgagagaggatgattcttacctcttcgacttagacaacaaggatggagaggtgtactgcatagatgcccgttactatggcaacatcagccgcttcatcaaccacctgtgtgaccccaacatcattcccgtccgggtcttcatgctgcaccaagacctgcgatttccacgcatcgccttcttcagttcccgagacatccggactggggaggagctagggtttgactatggcgaccgcttctgggacatcaaaagcaaatatttcacctgccaatgtggctctgagaagtgcaagcactcagccgaagccattgccctggagcagagccgtctggcccgcctggacccacaccctgagctgctgcccgagctcggctccctgccccctgtcaacacatgagaacggaccacaccctctctccccagcatggatggccacagctcagccgcctcctctgccaccagctgctcgcagcccatgcctgggggtgctgccatcttctctccccaccaccctttcacacattcctgaccagagatcccagccaggccctggaggtctgacagcccctccctcccagagctggttcctccctgggagggcaacttcagggctggccaccccccgtgttccccatcctcagttgaagtttgatgaattgaagtcgggcctctatgccaactggttccttttgttctcaataaatgttgggtttggtaataaa

SEQ ID NO: 268751 - DNA, 4129 bp, Artificial Sequence
  derived and/or modified sequence
atgcggggtctaccgagagggagggggttgatgcgggcccgggggaggggtcgtgcggcccctccgggcagccgaggccgcggaaggggggggccccacagaggaagaggtaggccccggagcctactctctcttcccagggcccaggcatcctggaccccccaactctctactgggctgaccagccctcctgtcccttgtctcccctcccagggggaggcccccgctgagatgggggcgctgctgctggagaaggaaaccagaggagccaccgagagagttcatggctctttgggggacacccctcgtagtgaagaaaccctgcccaaggccacccccgactccctggagcctgctggcccctcatctccagcctctgtcactgtcactgttggtgatgagggggctgacacccctgtaggggctacaccactcattggggatgaatctgagaatcttgagggagatggggacctccgtgggggccggatcctgctgggccatgccacaaagtcattcccctcttcccccagcaaggggggttcctgtcctagccgggccaagatgtcaatgacaggggcgggaaaatcacctccatctgtccagagtttggctatgaggctactgagtatgccaggagcccagggagctgcagcagcagggtctgaaccccctccagccaccacgagcccagagggacagcccaaggtccaccgagcccgcaaaaccatgtccaaaccaggaaatggacagcccccggtccctgagaagcggccccctgaaatacagcatttccgcatgagtgatgatgtccactcactgggaaaggtgacctcagatctggccaaaaggaggaagctgaactcaggaggtggcctgtcagaggagttaggttctgcccggcgttcaggagaagtgaccctgacgaaaggggaccccgggtccctggaggagtgggagacggtggtgggtgatgacttcagtctctactatgattcctactctgtggatgagcgcgtggactccgacagcaagtctgaagttgaagctctaactgaacaactaagtgaagaggaggaggaggaagaggaggaagaagaagaagaggaagaggaggaggaagaggaagaagaagaggaagatgaggagtcagggaatcagtcagataggagtggttccagtggccggcgcaaggccaagaagaaatggcgaaaagacagcccatgggtgaagccgtctcggaaacggcgcaagcgggagcctccgcgggccaaggagccacgaggagtgaatggtgtgggctcctcaggccccagtgagtacatggaggtccctctggggtccctggagctgcccagcgaggggaccctctcccccaaccacgctggggtgtccaatgacacatcttcgctggagacagagcgagggtttgaggagttgcccctgtgcagctgccgcatggaggcacccaagattgaccgcatcagcgagagggcggggcacaagtgcatggccactgagagtgtggacggagagctgtcaggctgcaatgccgccatcctcaagcgggagaccatgaggccatccagccgtgtggccctgatggtgctctgtgagacccaccgcgcccgcatggtcaaacaccactgctgcccgggctgcggctacttctgcacggcgggcaccttcctggagtgccaccctgacttccgtgtggcccaccgcttccacaaggcctgtgtgtctcagctgaatgggatggtcttctgtccccactgtggggaggatgcttctgaagctcaagaggtgaccatcccccggggtgacggggtgaccccaccggccggcactgcagctcctgcacccccacccctgtcccaggatgtccccgggagagcagacacttctcagcccagtgcccggatgcgagggcatggggaaccccggcgcccgccctgcgatcccctggctgacaccattgacagctcagggccctccctgaccctgcccaatgggggctgcctttcagccgtggggctgccactggggccaggccgggaggccctggaaaaggccctggtcatccaggagtcagagaggcggaagaagctccgtttccaccctcggcagttgtacctgtccgtgaagcagggcgagctgcagaaggtgatcctgatgctgttggacaacctggaccccaacttccagagcgaccagcagagcaagcgcacgcccctgcatgcagccgcccagaagggctccgtggagatctgccatgtgctgctgcaggctggagccaacataaatgcagtggacaaacagcagcggacgccactgatggaggccgtggtgaacaaccacctggaggtagcccgttacatggtgcagcgtggtggctgtgtctatagcaaggaggaggacggttccacctgcctccaccacgcagccaaaatcgggaacttggagatggtcagcctgctgctgagcacaggacaggtggacgtcaacgcccaggacagtggggggtggacgcccatcatctgggctgcagagcacaagcacatcgaggtgatccgcatgctactgacgcggggcgccgacgtcaccctcactgacaacgaggagaacatctgcctgcactgggcctccttcacgggcagcgccgccatcgccgaagtccttctgaatgcgcgctgtgacctccatgctgtcaactaccatggggacacccccctgcacatcgcagctcgggagagctaccatgactgcgtgctgttattcctgtcacgtggggccaaccctgagctgcggaacaaagagggggacacagcatgggacctgactcccgagcgctccgacgtgtggtttgcgcttcaactcaaccgcaagctccgacttggggtgggaaatcgggccatccgcacagagaagatcatctgccgggacgtggctcggggctatgagaacgtgcccattccctgtgtcaacggtgtggatggggagccctgccctgaggattacaagtacatctcagagaactgcgagacgtccaccatgaacatcgatcgcaacatcacccacctgcagcactgcacgtgtgtggacgactgctctagctccaactgcctgtgcggccagctcagcatccggtgctggtatgacaaggatgggcgattgctccaggaatttaacaagattgagcctccgctgattttcgagtgtaaccaggcgtgctcatgctggagaaactgcaagaaccgggtcgtacagagtggcatcaaggtgcggctacagctctaccgaacagccaagatgggctggggggtccgcgccctgcagaccatcccacaggggaccttcatctgcgagtatgtcggggagctgatctctgatgctgaggctgatgtgagagaggatgattcttacctcttcgacttagacaacaaggatggagaggtgtactgcatagatgcccgttactatggcaacatcagccgcttcatcaaccacctgtgtgaccccaacatcattcccgtccgggtcttcatgctgcaccaagacctgcgatttccacgcatcgccttcttcagttcccgagacatccggactggggaggagctagggtttgactatggcgaccgcttctgggacatcaaaagcaaatatttcacctgccaatgtggctctgagaagtgcaagcactcagccgaagccattgccctggagcagagccgtctggcccgcctggacccacaccctgagctgctgcccgagctcggctccctgccccctgtcaacacatgagaacggaccacaccctctctccccagcatggatggccacagctcagccgcctcctctgccaccagctgctcgcagcccatgcctgggggtgctgccatcttctctccccaccaccctttcacacattcctgaccagagatcccagccaggccctggaggtctgacagcccctccctcccagagctggttcctccctgggagggcaacttcagggctggccaccccccgtgttccccatcctcagttgaagtttgatgaattgaagtcgggcctctatgccaactggttccttttgttctcaataaatgttgggtttggtaataaa

SEQ ID NO: 268752 - DNA, 4129 bp, Artificial Sequence
  derived and/or modified sequence
atgcggggtctaccgagagggagggggttgatgcgggcccgggggaggggtcgtgcggcccctccgggcagccgaggccgcggaaggggggggccccacagaggaagaggtaggccccggagcctactctctcttcccagggcccaggcatcctggaccccccaactctctactgggctgaccagccctcctgtcccttgtctcccctcccagggggaggcccccgctgagatgggggcgctgctgctggagaaggaaaccagaggagccaccgagagagttcatggctctttgggggacacccctcgtagtgaagaaaccctgcccaaggccacccccgactccctggagcctgctggcccctcatctccagcctctgtcactgtcactgttggtgatgagggggctgacacccctgtaggggctacaccactcattggggatgaatctgagaatcttgagggagatggggacctccgtgggggccggatcctgctgggccatgccacaaagtcattcccctcttcccccagcaaggggggttcctgtcctagccgggccaagatgtcaatgacaggggcgggaaaatcacctccatctgtccagagtttggctatgaggctactgagtatgccaggagcccagggagctgcagcagcagggtctgaaccccctccagccaccacgagcccagagggacagcccaaggtccaccgagcccgcaaaaccatgtccaaaccaggaaatggacagcccccggtccctgagaagcggccccctgaaatacagcatttccgcatgagtgatgatgtccactcactgggaaaggtgacctcagatctggccaaaaggaggaagctgaactcaggaggtggcctgtcggaggagttaggttctgcccggcgttcaggagaagtgaccctgacgaaaggggaccccgggtccctggaggagtgggagacggtggtgggtgatgacttcagtctctactatgattcctactctgtggatgagcgcgtggactccgacagcaagtctgaagttgaagctctaactgaacaactaagtgaagaggaggaggaggaagaggaggaagaagaagaagaggaagaggaggaggaagaggaagaagaagaggaagatgaggagtcagggaatcagtcagataggagtggttccagtggccggcgcaaggccaagaagaaatggcgaaaagacagcccatgggtgaagccgtctcggaaacggcgcaagcgggagcctccgcgggccaaggagccacgaggagtgaatggtgtgggctcctcaggccccagtgagtacatggaggtccctctggggtccctggagctgcccagcgaggggaccctctcccccaaccacgctggggtgtccaatgacacatcttcgctggagacagagcgagggtttgaggagttgcccctgtgcagctgccgcatggaggcacccaagattgaccgcatcagcgagagggcggggcacaagtgcatggccactgagagtgtggacggagagctgtcaggctgcaatgccgccatcctcaagcgggagaccatgaggccatccagccgtgtggccctgatggtgctctgtgagacccaccgcgcccgcatggtcaaacaccactgctgcccgggctgcggctacttctgcacggcgggcaccttcctggagtgccaccctgacttccgtgtggcccaccgcttccacaaggcctgtgtgtctcagctgaatgggatggtcttctgtccccactgtggggaggatgcttctgaagctcaagaggtgaccatcccccggggtgacggggtgaccccaccggccggcactgcagctcctgcacccccacccctgtcccaggatgtccccgggagagcagacacttctcagcccagtgcccggatgcgagggcatggggaaccccggcgcccgccctgcgatcccctggctgacaccattgacagctcagggccctccctgaccctgcccaatgggggctgcctttcagccgtggggctgccactggggccaggccgggaggccctggaaaaggccctggtcatccaggagtcagagaggcggaagaagctccgtttccaccctcggcagttgtacctgtccgtgaagcagggcgagctgcagaaggtgatcctgatgctgttggacaacctggaccccaacttccagagcgaccagcagagcaagcgcacgcccctgcatgcagccgcccagaagggctccgtggagatctgccatgtgctgctgcaggctggagccaacataaatgcagtggacaaacagcagcggacgccactgatggaggccgtggtgaacaaccacctggaggtagcccgttacatggtgcagcgtggtggctgtgtctatagcaaggaggaggacggttccacctgcctccaccacgcagccaaaatcgggaacttggagatggtcagcctgctgctgagcacaggacaggtggacgtcaacgcccaggacagtggggggtggacgcccatcatctgggctgcagagcacaagcacatcgaggtgatccgcatgctactgacgcggggcgccgacgtcaccctcactgacaacgaggagaacatctgcctgcactgggcctccttcacgggcagcgccgccatcgccgaagtccttctgaatgcgcgctgtgacctccatgctgtcaactaccatggggacacccccctgcacatcgcagctcgggagagctaccatgactgcgtgctgttattcctgtcacgtggggccaaccctgagctgcggaacaaagagggggacacagcatgggacctgactcccgagcgctccgacgtgtggtttgcgcttcaactcaaccgcaagctccgacttggggtgggaaatcgggccatccgcacagagaagatcatctgccgggacgtggctcggggctatgagaacgtgcccattccctgtgtcaacggtgtggatggggagccctgccctgaggattacaagtacatctcagagaactgcgagacgtccaccatgaacatcgatcgcaacatcacccacctgcagcactgcacgtgtgtggacgactgctctagctccaactgcctgtgcggccagctcagcatccggtgctggtatgacaaggatgggcgattgctccaggaatttaacaagattgagcctccgctgattttcgagtgtaaccaggcgtgctcatgctggagaaactgcaagaaccgggtcgtacagagtggcatcaaggtgcggctacagctctaccgaacagccaagatgggctggggggtccgcgccctgcagaccatcccacaggggaccttcatctgcgagtatgtcggggagctgatctctgatgctgaggctgatgtgagagaggatgattcttacctcttcgacttagacaacaaggatggagaggtgtactgcatagatgcccgttactatggcaacatcagccgcttcatcaaccacctgtgtgaccccaacatcattcccgtccgggtcttcatgctgcaccaagacctgcgatttccacgcatcgccttcttcagttcccgagacatccggactggggaggagctagggtttgactatggcgaccgcttctgggacatcaaaagcaaatatttcacctgccaatgtggctctgagaagtgcaagcactcagccgaagccattgccctggagcagagccgtctggcccgcctggacccacaccctgagctgctgcccgagctcggctccctgccccctgtcaacacatgagaacggaccacaccctctctccccagcatggatggccacagctcagccgcctcctctgccaccagctgctcgcagcccatgcctgggggtgctgccatcttctctccccaccaccctttcacacattcctgaccagagatcccagccaggccctggaggtctgacagcccctccctcccagagctggttcctccctgggagggcaacttcagggctggccaccccccgtgttccccatcctcagttgaagtttgatgaattgaagtcgggcctctatgccaactggttccttttgttctcaataaatgttgggtttggtaataaa

SEQ ID NO: 268753 - DNA, 3094 bp, Artificial Sequence
  derived and/or modified sequence
tctgaagttgaagctctaactgaacaactaagtgaagaggaggaggaggaagaggaggaagaagaagaagaggaagaggaggaggaagaggaagaagaagaggaagatgaggagtcagggaatcagtcagataggagtggttccagtggccggcgcaaggccaagaagaaatggcgaaaagacagcccatgggtgaagccgtctcggaaacggcgcaagcgggagcctccgcgggccaaggagccacgaggagtgaatggtgtgggctcctcaggccccagtgagtacatggaggtccctctggggtccctggagctgcccagcgaggggaccctctcccccaaccacgctggggtgtccaatgacacatcttcgctggagacagagcgagggtttgaggagttgcccctgtgcagctgccgcatggaggcacccaagattgaccgcatcagcgagagggcggggcacaagtgcatggccactgagagtgtggacggagagctgtcaggctgcaatgccgccatcctcaagcgggagaccatgaggccatccagccgtgtggccctgatggtgctctgtgagacccaccgcgcccgcatggtcaaacaccactgctgcccgggctgcggctacttctgcacggcgggcaccttcctggagtgccaccctgacttccgtgtggcccaccgcttccacaaggcctgtgtgtctcagctgaatgggatggtcttctgtccccactgtggggaggatgcttctgaagctcaagaggtgaccatcccccggggtgacggggtgaccccaccggccggcactgcagctcctgcacccccacccctgtcccaggatgtccccgggagagcagacacttctcagcccagtgcccggatgcgagggcatggggaaccccggcgcccgccctgcgatcccctggctgacaccattgacagctcagggccctccctgaccctgcccaatgggggctgcctttcagccgtggggctgccactggggccaggccgggaggccctggaaaaggccctggtcatccaggagtcagagaggcggaagaagctccgtttccaccctcggcagttgtacctgtccgtgaagcagggcgagctgcagaaggtgatcctgatgctgttggacaacctggaccccaacttccagagcgaccagcagagcaagcgcacgcccctgcatgcagccgcccagaagggctccgtggagatctgccatgtgctgctgcaggctggagccaacataaatgcagtggacaaacagcagcggacgccactgatggaggccgtggtgaacaaccacctggaggtagcccgttacatggtgcagcgtggtggctgtgtctatagcaaggaggaggacggttccacctgcctccaccacgcagccaaaatcgggaacttggagatggtcagcctgctgctgagcacaggacaggtggacgtcaacgcccaggacagtggggggtggacgcccatcatctgggctgcagagcacaagcacatcgaggtgatccgcatgctactgacgcggggcgccgacgtcaccctcactgacaacgaggagaacatctgcctgcactgggcctccttcacgggcagcgccgccatcgccgaagtccttctgaatgcgcgctgtgacctccatgctgtcaactaccatggggacacccccctgcacatcgcagctcgggagagctaccatgactgcgtgctgttattcctgtcacgtggggccaaccctgagctgcggaacaaagagggggacacagcatgggacctgactcccgagcgctccgacgtgtggtttgcgcttcaactcaaccgcaagctccgacttggggtgggaaatcgggccatccgcacagagaagatcatctgccgggacgtggctcggggctatgagaacgtgcccattccctgtgtcaacggtgtggatggggagccctgccctgaggattacaagtacatctcagagaactgcgagacgtccaccatgaacatcgatcgcaacatcacccacctgcagcactgcacgtgtgtggacgactgctctagctccaactgcctgtgcggccagctcagcatccggtgctggtatgacaaggatgggcgattgctccaggaatttaacaagattgagcctccgctgattttcgagtgtaaccaggcgtgctcatgctggagaaactgcaagaaccgggtcgtacagagtggcatcaaggtgcggctacagctctaccgaacagccaagatgggctggggggtccgcgccctgcagaccatcccacaggggaccttcatctgcgagtatgtcggggagctgatctctgatgctgaggctgatgtgagagaggatgattcttacctcttcgacttagacaacaaggatggagaggtgtactgcatagatgcccgttactatggcaacatcagccgcttcatcaaccacctgtgtgaccccaacatcattcccgtccgggtcttcatgctgcaccaagacctgcgatttccacgcatcgccttcttcagttcccgagacatccggactggggaggagctagggtttgactatggcgaccgcttctgggacatcaaaagcaaatatttcacctgccaatgtggctctgagaagtgcaagcactcagccgaagccattgccctggagcagagccgtctggcccgcctggacccacaccctgagctgctgcccgagctcggctccctgccccctgtcaacacatgagaacggaccacaccctctctccccagcatggatggccacagctcagccgcctcctctgccaccagctgctcgcagcccatgcctgggggtgctgccatcttctctccccaccaccctttcacacattcctgaccagagatcccagccaggccctggaggtctgacagcccctccctcccagagctggttcctccctgggagggcaacttcagggctggccaccccccgtgttccccatcctcagttgaagtttgatgaattgaagtcgggcctctatgccaactggttccttttgttctcaataaatgttgggtttggtaataaa

SEQ ID NO: 268754 - protein, 612 aa, Artificial Sequence
  derived and/or modified sequence
MSNSHPLRPFTAVGEIDHVHILSEHIGALLIGEEYGDVTFVVEKKRFPAHRVILAARCQYFRALLYGGMRESQPEAEIPLQDTTAEAFTMLLKYIYTGRATLTDEKEEVLLDFLSLAHKYGFPELEDSTSEYLCTILNIQNVCMTFDVASLYSLPKLTCMCCMFMDRNAQEVLSSEGFLSLSKTALLNIVLRDSFAAPEKDIFLALLNWCKHNSKENHAEIMQAVRLPLMSLTELLNVVRPSGLLSPDAILDAIKVRSESRDMDLNYRGMLIPEENIATMKYGAQVVKGELKSALLDGDTQNYDLDHGFSRHPIDDDCRSGIEIKLGQPSIINHIRILLWDRDSRSYSYFIEVSMDELDWVRVIDHSQYLCRSWQKLYFPARVCRYIRIVGTHNTVNKIFHIVAFECMFTNKTFTLEKGLIVPMENVATIADCASVIEGVSRSRNALLNGDTKNYDWDSGYTCHQLGSGAIVVQLAQPYMIGSIRLLLWDCDDRSYSYYVEVSTNQQQWTMVADRTKVSCKSWQSVTFERQPASFIRIVGTHNTANEVFHCVHFECPEQQSSQKEENSEESGTGDTSLAGQQLDSHALRAPSGSSLPSSPGSNSRSPNRQHQ

SEQ ID NO: 268755 - protein, 92 aa, Artificial Sequence
  derived and/or modified sequence
MSNSHPLRPFTAVGEIDHVHILSEHIGALLIGEEYGDVTFVVEKKRFPAHRVILAARCQYFRALLYGGMRESQPEAEIPLQDTTAEAFTMLL

SEQ ID NO: 268756 - DNA, 1635 bp, Artificial Sequence
  derived and/or modified sequence
atgagggagtctcagccagaagcagagataccactacaggacacaacagccgaggccttcaccatgctgctgaaatacatctatacaggccgggccaccctgacagatgagaaagaagaggtgctcctggactttctgtcattggcccacaaatacggctttcctgagctcgaggacagcacttcggaatacctgtgcaccattttgaacattcagaacgtttgtatgaccttcgacgtggcttccctgtactctctgccaaaactgacctgcatgtgctgtatgttcatggatcgcaacgcgcaggaggtcctgtcatcagagggtttcctcagcttatccaaaaccgccttgctcaatatagttctgcgcgactcatttgccgcccccgaaaaggacatatttctggcccttctcaattggtgtaaacacaatagtaaggagaatcacgccgagataatgcaggctgtcagattacccctcatgagtctgactgagctcctgaacgtcgtccgaccgtccggcctcctgagcccggacgcaattttagacgctattaaggtcaggagtgagagtcgggacatggatctgaactaccgggggatgcttatccccgaggagaatatcgcaaccatgaaatacggcgcacaagttgttaaaggcgaactcaagtcagccctgttggacggcgacacacagaactacgatctggaccacggatttagccggcacccaatcgacgatgactgtcgctcagggattgagattaaattgggacagcccagtataatcaaccacatccgaattcttttatgggatcgggacagtagaagctactcctatttcatcgaagtcagtatggacgaactagattgggttcgggtaatcgatcatagccagtacttatgcagaagttggcagaagctttatttccccgctagggtgtgtcggtatatccgtatagtaggaacccacaatactgtcaataaaatctttcacattgtcgccttcgaatgtatgttcacgaataagacatttaccctcgagaaagggctgattgtaccaatggagaacgtagccacaatcgcggattgcgcttcagtgattgaaggcgtctcccggtctaggaatgccctgctgaacggagatactaaaaactatgattgggatagtggctacacgtgtcaccagctggggtcaggagccatcgtggtgcagctcgcgcagccttacatgatcgggagtattaggctactgctgtgggattgtgacgacagaagttactcgtactatgttgaggtaagtacaaaccagcaacaatggaccatggtggccgaccgtaccaaggttagttgcaagtcctggcagtcagtaacatttgaaagacaaccagcttcattcattagaatcgtagggacgcataacacagcgaacgaggtgttccactgtgtccatttcgagtgcccagagcaacagtcgtctcagaaggaggagaactcggaggaatctggaaccggcgacacgtcactggcaggacagcagctcgattctcacgctctgcgcgcccccagtggatcgagtctgccatccagtccaggatctaacagtaggagtccaaaccgccagcaccagtag

SEQ ID NO: 268757 - DNA, 1839 bp, Artificial Sequence
  derived and/or modified sequence
atgagtaatagccacccacttaggcccttcacagccgttggggaaatcgatcacgtccacatcctgtcagagcatattggcgctctactcatcggagaagagtatggggacgtgacttttgtggtggaaaagaagagatttcctgcccatcgtgttatcttagctgctcgatgccagtatttccgtgctctcctgtatggggggatgagggagagccagcccgaggccgagattcccctgcaggataccaccgccgaggcatttactatgctgcttaaatacatttatacgggccgagcaacacttaccgacgagaaggaagaggtacttttggactttcttagcctagcccacaaatacggttttcccgagctagaagacagcacttctgagtacctctgcaccattctcaacattcagaatgtgtgcatgaccttcgacgtggcttctctttatagcctgccaaaattgacttgtatgtgctgcatgtttatggataggaacgctcaggaggttctgtctagcgagggcttcttgtccctgtccaaaactgcactgctgaacatagttctccgggatagttttgccgcccccgagaaggacatatttttggctctgctcaattggtgtaagcataacagtaaggaaaaccacgctgaaatcatgcaggcagtgagattacctctgatgtctctgactgaacttttgaatgttgtcagaccttccggcttactgagcccagacgctatattggacgctattaaagtgcgcagcgaaagccgagatatggacctgaattaccgcggaatgttaattcctgaggagaacatcgcaaccatgaagtatggagcccaggtcgtaaagggtgagcttaaatcagcactgttggacggagacacgcagaactacgatctagatcatgggttcagcaggcacccaatcgacgacgactgccgtagtggcatcgagatcaagttaggacaaccgagcataataaaccatatcagaatacttctgtgggatcgtgactctagatcctatagttattttatcgaggtgtctatggacgagctcgactgggtgcgggtgatcgatcacagccagtacctctgtcgcagctggcagaagctctactttcctgcaagagtctgccgatacatccgcatagtcggcacccacaatactgtgaataagattttccatatcgtggctttcgagtgcatgttcaccaataagaccttcacacttgaaaagggtctaatcgtcccaatggaaaatgtggccactatcgccgactgcgcctcagttatcgagggggtgagccggtctcgaaacgcattgctgaacggtgataccaagaattatgattgggactcgggctacacgtgtcatcagctgggaagcggcgcaattgtagtgcagctggctcagccttatatgattggatcaattagactcttgctgtgggactgcgatgacagatcatactcctactacgtggaagtttccacgaatcagcagcaatggactatggtggccgacaggacaaaagtgagttgtaaaagctggcagtctgtgacctttgaacgccagccagcttcatttatccggatcgtgggcacgcataataccgccaatgaagtgttccattgtgtgcatttcgaatgccctgagcagcagtcctctcaaaaagaagaaaactccgaggagtccggtactggggataccagtcttgccggccagcagctcgacagtcacgccctgagggccccctcaggcagctcactgccaagttcccctggatcaaactcccgatccccgaacagacagcatcagtag

SEQ ID NO: 268758 - DNA, 1635 bp, Artificial Sequence
  derived and/or modified sequence
atgcgcgagagtcagcctgaagcggagatccctctgcaggacactacggccgaagcctttactatgttgctgaaatatatctacaccgggcgcgccacgctcactgatgaaaaggaagaggtccttcttgattttttgtccctggcacataaatatggtttccctgaactggaagactcaacaagcgagtatctctgcaccattctgaatatacagaatgtgtgcatgacatttgatgtggccagcctctacagcttacccaagctgacctgtatgtgctgtatgttcatggaccgaaacgcacaggaggttctctcttctgaagggtttctatcgttaagtaagacagcactgctgaacattgtgctcagggattcgttcgccgcccccgaaaaggatatctttctcgctctcctgaattggtgcaagcacaacagcaaagaaaaccatgccgagattatgcaggcagttcgcttacctctcatgagcttgacagagctattaaacgttgtgagaccctctggcttactgagtcccgatgcaattctagacgccattaaggtgcgcagtgagtctagagacatggatctgaattaccgcggtatgctgattcctgaagaaaatatcgcgactatgaagtacggggcacaggtggtgaagggggagctaaaaagcgcgttgctcgatggggatacacagaactatgatttggaccacggctttagccgccacccaatcgacgatgattgtcggagtgggattgaaatcaaattggggcagccttcaattataaatcatattcgcattctactttgggatagggattctcggtcatacagttacttcatcgaagttagtatggacgaactcgattgggttagggtaattgaccacagccagtatctgtgccgttcatggcagaaactgtattttcctgctagagtatgtaggtatattcggatcgtcggcactcataatacagtgaataaaatttttcatatcgttgcttttgagtgcatgttcacaaacaaaaccttcaccttagaaaagggtctaattgtaccaatggagaatgtggcaactattgctgactgtgcttctgtcattgagggagtgtcacgatctcggaacgccctgttgaacggagacactaaaaactacgactgggacagcggatatacctgtcaccagctagggagcggggctatagtggtgcagctcgcacaaccctacatgataggctctatcaggttactgctatgggattgtgatgacagatcgtattcctactatgtcgaggtttccaccaatcagcagcaatggacgatggttgccgaccgcacaaaagtgagctgcaaatcatggcagtcggtgacattcgagcggcagcccgcatccttcataagaatagtaggaactcataatactgccaacgaggtttttcactgtgttcactttgaatgccctgagcaacagtcaagccagaaagaggaaaatagcgaggaaagtgggaccggtgataccagcttagctggacagcagcttgacagccatgcattacgcgccccaagcggtagttccttgccaagctccccagggagcaactcaagatcgcccaatcgacagcaccaatag

SEQ ID NO: 268759 - DNA, 1839 bp, Artificial Sequence
  derived and/or modified sequence
atgagcaattcacatcctctcaggccttttacagcagtaggcgaaatcgatcacgtgcacatcctaagtgagcatattggtgcactgttgattggcgaggagtacggcgatgtgacatttgtggtggagaagaaacggttccccgcccaccgcgtaattctggccgcacgctgtcagtattttcgcgccctgctctacggaggaatgcgcgaaagtcagcctgaagcagagatcccccttcaagataccaccgcggaggcctttacaatgctgctgaagtacatatataccggaagggcaacactcactgatgaaaaagaggaagttctgctcgattttttatcactggcccacaagtacggatttccggaattggaagactccacaagtgagtacctgtgtactatcctgaacattcagaatgtttgtatgacctttgacgtggccagcctgtattctctgccgaaacttacgtgcatgtgttgcatgtttatggacagaaatgcacaggaggtattgtcaagtgagggtttcctctctctcagcaagactgccctgctgaatatagtactgagggatagtttcgcggctcccgaaaaggacattttcctggccttactgaattggtgcaagcataactcgaaagaaaaccacgctgagatcatgcaggcagtacggctgcccttgatgtctctcacagagcttctcaatgttgttaggccctctgggctgctctccccagacgcaatcctggacgcaatcaaggtgagatcagagtctagagacatggatcttaattatagagggatgctaatacccgaggagaatatagccactatgaagtacggggcacaggtcgtcaagggagagctaaaaagcgcgctgctcgatggcgacactcaaaactatgacttggatcacgggttctcaaggcatcccatagacgatgattgccgaagcgggattgagataaagctgggtcagccaagcatcattaaccacatccgcatcctgttgtgggatagggattcacgctcctacagttactttattgaggtgtctatggacgaactggattgggtgagggtaattgaccactcccagtacctttgccgatcctggcaaaaactgtattttcccgcacgggtgtgcagatatatcagaattgttggcacccacaataccgtgaataagatcttccacatagtggccttcgaatgtatgtttactaacaagacatttacactagagaagggtctcatcgtgccgatggaaaatgtggctacaatcgcagactgtgcttccgtcattgaaggcgtgtccaggagcagaaacgcactgttgaatggtgataccaaaaactacgactgggacagcggctatacgtgccatcagctgggcagcggagcaattgtggttcagctcgctcagccttacatgatcggctcgatcagattgctcctgtgggattgcgacgatcggtcctactcctactatgtcgaggtgagcacaaatcagcagcagtggaccatggtggccgataggaccaaggtttcgtgcaaatcctggcaatccgtgacttttgaaagacaaccagcctcttttataaggatcgttgggacacacaataccgctaacgaggtttttcattgcgtgcacttcgagtgtcccgagcagcagagcagtcagaaagaggaaaatagcgaagaatcaggcaccggagacaccagtctggccgggcagcagctggacagtcacgctttacgcgcaccttcagggtcctccctgccaagctccccaggctccaactcccggagtccaaatagacagcaccaatag

SEQ ID NO: 268760 - DNA, 1635 bp, Artificial Sequence
  derived and/or modified sequence
atgagggagagccagcctgaggccgagatccccctgcaggacaccacagctgaggccttcaccatgctgctgaagtacatctacacaggccgggccaccctgacagatgagaaggaggaggtgctgctggacttcctgagcctggcccacaagtatggcttccctgagctggaggacagcaccagcgagtacctgtgcaccatcctgaacatccagaatgtgtgcatgacctttgatgtggccagcctgtacagcctgcccaagctgacctgcatgtgctgcatgttcatggacagaaatgcccaggaggtgctgagcagcgagggcttcctgagcctgagcaagacagccctgctgaacatcgtgctgcgggacagctttgctgcccctgagaaggacatcttcctggccctgctgaactggtgcaagcacaacagcaaggagaaccacgccgagatcatgcaggccgtgcggctgcccctgatgagcctgacagagctgctgaatgtggtgcggcccagcggcctgctgagcccagatgccatcctggatgccatcaaggtgcgctctgagagccgggacatggacctgaactaccggggcatgctgatcccagaagaaaatattgccaccatgaagtacggggcccaggtggtgaagggggagctgaagagcgccctgctggatggagacacccagaactatgacctggaccacggcttcagccgccaccccattgatgatgactgccgcagcggcatcgagatcaagctgggccagcccagcatcatcaaccacatccgcatcctgctgtgggaccgggacagccgcagctacagctacttcatcgaggtgtccatggatgagctggactgggtgcgggtcatcgaccacagccagtacctgtgccgctcctggcagaagctgtacttccctgcccgggtgtgccgctacatcagaattgtgggcacccacaacacagtgaacaagatcttccacatcgtggcctttgagtgcatgttcaccaacaagaccttcaccctggagaagggcctgattgtgcccatggagaatgtggccaccatcgctgactgtgcctctgtgattgaaggagtgagccgcagcagaaatgccctgctgaatggagacaccaagaactatgactgggacagcggctacacctgccaccagctgggcagcggggccatcgtggtgcagctggcccagccctacatgattggcagcatccggctgctgctgtgggactgtgatgacaggagctacagctactacgtggaggtgtccaccaaccagcagcagtggaccatggtggccgacaggaccaaggtgtcctgcaagtcctggcagagcgtgacctttgagcggcagcctgccagcttcatccgcatcgtgggcacccacaacacagccaatgaggtgttccactgtgtgcactttgaatgtcctgagcagcagagcagccagaaggaggagaacagcgaggagagcggcactggagacaccagcctggccggccagcagctggacagccacgccctgcgggcccccagcggcagcagcctgcccagcagccctggcagcaacagccgcagccccaaccggcagcaccagtag

SEQ ID NO: 268761 - DNA, 1839 bp, Artificial Sequence
  derived and/or modified sequence
atgagcaacagccaccccctgcggcccttcaccgctgtgggggagattgaccacgtgcacatcctgtctgagcacatcggggccctgctgattggagaggagtatggagatgtgacctttgtggtggagaagaagcgcttccctgcccacagggtcatcctggccgcccgctgccagtacttccgggccctgctgtatggaggcatgagggagagccagcctgaggccgagatccccctgcaggacaccacagctgaggccttcaccatgctgctgaagtacatctacacaggccgggccaccctgacagatgagaaggaggaggtgctgctggacttcctgagcctggcccacaagtatggcttccctgagctggaggacagcaccagcgagtacctgtgcaccatcctgaacatccagaatgtgtgcatgacctttgatgtggccagcctgtacagcctgcccaagctgacctgcatgtgctgcatgttcatggacagaaatgcccaggaggtgctgagcagcgagggcttcctgagcctgagcaagacagccctgctgaacatcgtgctgcgggacagctttgctgcccctgagaaggacatcttcctggccctgctgaactggtgcaagcacaacagcaaggagaaccacgccgagatcatgcaggccgtgcggctgcccctgatgagcctgacagagctgctgaatgtggtgcggcccagcggcctgctgagcccagatgccatcctggatgccatcaaggtgcgctctgagagccgggacatggacctgaactaccggggcatgctgatcccagaagaaaatattgccaccatgaagtacggggcccaggtggtgaagggggagctgaagagcgccctgctggatggagacacccagaactatgacctggaccacggcttcagccgccaccccattgatgatgactgccgcagcggcatcgagatcaagctgggccagcccagcatcatcaaccacatccgcatcctgctgtgggaccgggacagccgcagctacagctacttcatcgaggtgtccatggatgagctggactgggtgcgggtcatcgaccacagccagtacctgtgccgctcctggcagaagctgtacttccctgcccgggtgtgccgctacatcagaattgtgggcacccacaacacagtgaacaagatcttccacatcgtggcctttgagtgcatgttcaccaacaagaccttcaccctggagaagggcctgattgtgcccatggagaatgtggccaccatcgctgactgtgcctctgtgattgaaggagtgagccgcagcagaaatgccctgctgaatggagacaccaagaactatgactgggacagcggctacacctgccaccagctgggcagcggggccatcgtggtgcagctggcccagccctacatgattggcagcatccggctgctgctgtgggactgtgatgacaggagctacagctactacgtggaggtgtccaccaaccagcagcagtggaccatggtggccgacaggaccaaggtgtcctgcaagtcctggcagagcgtgacctttgagcggcagcctgccagcttcatccgcatcgtgggcacccacaacacagccaatgaggtgttccactgtgtgcactttgaatgtcctgagcagcagagcagccagaaggaggagaacagcgaggagagcggcactggagacaccagcctggccggccagcagctggacagccacgccctgcgggcccccagcggcagcagcctgcccagcagccctggcagcaacagccgcagccccaaccggcagcaccagtag

SEQ ID NO: 268762 - DNA, 1635 bp, Artificial Sequence
  derived and/or modified sequence
atgcgggagagccagcccgaggccgagatccccctgcaggacaccactgccgaggcattcaccatgcttctcaagtacatctatactgggcgagcaactcttactgacgaaaaggaagaagtacttctagatttcctgagtctggcccacaagtatggatttccggaactcgaagactcgacaagtgaatacctgtgcaccatactcaatatacagaatgtgtgtatgacgttcgacgtggcaagtctatactcccttcctaaactgacttgtatgtgctgcatgttcatggacaggaatgcacaagaagtgctttcctctgagggatttttaagtctttctaagacagctttgttaaatattgtgctcagggactcattcgcagctcccgagaaagacattttccttgcccttctcaattggtgtaagcacaatagcaaggagaatcacgctgaaatcatgcaggcagtgagactgccgcttatgtcacttacagaactcctgaacgtggtgcgccctagtggattgctgagccccgatgccattcttgatgccattaaggtgcgttcagagagcagggatatggaccttaactaccgagggatgctcatccctgaagaaaatatcgccactatgaagtacggcgcccaagtcgtcaagggagagcttaaatctgcgctgctcgacggcgacacacagaattacgacttagatcatgggttctctcgacacccaatagacgacgattgccggtcaggcattgagataaagctggggcagcccagcattattaatcacatcagaatcttgctttgggatcgggacagtcggtcatatagttattttattgaggtaagcatggatgaactcgactgggtgcgagtgatcgaccattctcagtatttgtgtcggtcttggcagaagctgtacttcccagcgagggtgtgccgatatattaggattgtgggcacacacaacactgttaacaagattttccacatcgtggcgttcgaatgcatgtttactaataagacatttactttagagaaagggctgattgtgccaatggagaacgtggccacaattgccgattgtgcttcagtcattgagggagtgtcacggtctcgtaacgcactgttgaacggggacactaaaaactatgattgggatagcgggtatacttgtcaccagctgggctccggggctattgtcgttcaactggctcagccgtacatgatcgggtcgattaggttactgctctgggactgcgatgatcggtcatacagctattacgttgaggtatctacaaaccagcagcagtggacaatggtggctgaccgcacaaaagtctcctgtaaaagttggcagagtgttacgttcgaacgtcagccagcctcattcattaggattgttgggactcataataccgccaatgaagtgttccactgcgttcatttcgagtgccccgagcaacagtcaagccagaaggaagagaattccgaggaatcaggaacaggagatacttcactcgctggccagcaactggactcacacgcactgcgggctccaagtggctcatccctgccttcctcaccagggtctaattcacgcagtcccaatagacaacatcaatag

SEQ ID NO: 268763 - DNA, 1839 bp, Artificial Sequence
  derived and/or modified sequence
atgagcaacagccaccccctgcggcccttcaccgccgtgggcgagattgaccacgtgcacatccttagtgagcatatcggggctctcctcatcggtgaggagtacggggacgtcacctttgtggtggagaagaagagatttccagctcacagggttatactggcagcccgctgtcagtattttagggcactgttatacggcggaatgcgggagagtcagccagaggccgagattcccttgcaggacacgaccgcggaggcctttacgatgcttttgaaatacatctacaccggccgggctacactgacagacgagaaagaggaagtgcttttggatttcctcagcctagctcataagtatgggttccccgaactcgaggactcaaccagtgagtacctttgcaccattttgaatatccagaacgtgtgcatgactttcgacgttgctagcttgtattcactgcccaagttgacatgtatgtgttgtatgttcatggatagaaacgctcaggaggtcctttcatcggaggggttcctcagtctcagtaagactgcactgctgaacatagtgctgcgggattcattcgccgctcctgagaaggacatctttcttgctcttctgaactggtgtaaacacaatagtaaggaaaatcatgcggagattatgcaagccgtgcggctacccctgatgtctttgactgagcttcttaacgtcgtccggccaagtggactcctgtcacccgatgctatcctcgacgctattaaggtgagaagcgagtccagagacatggacttgaattataggggaatgttgattcccgaggaaaatatcgccacaatgaagtacggagcccaggtggttaagggcgaactgaagtcagccctgctggatggtgacactcaaaactacgacctggaccacggcttctctcgtcatcccattgatgatgattgccgctccggaatcgaaattaaactcggccagccatctattattaatcatattcgcattctcctgtgggatagggactctaggagttacagctattttatagaagtttcaatggacgagctggattgggtgcgggtgatcgaccacagtcaatacctttgccgatcttggcaaaaactgtacttccccgccagggtctgtaggtacattcggatcgttggaacccacaacaccgtaaacaaaatctttcacatcgtagcttttgagtgtatgtttactaacaaaacattcacactcgagaaaggtctgattgtccccatggaaaacgtggcaacgattgcagattgtgcaagtgtcattgaaggcgtcagccggtcccgtaacgcgctcctaaacggcgacacaaaaaattacgattgggatagtggctatacctgccatcaactggggtctggcgcaatcgtcgtccagctggctcagccttatatgatcggatcgattagacttctgctctgggactgcgatgatcggagctattcctactacgtcgaggtctccaccaaccagcaacagtggacaatggtggccgatcgaacaaaggtgtcttgcaagagctggcaaagcgtgacgtttgaaaggcaacccgccagtttcattcggattgttgggactcacaacactgccaacgaggtctttcattgcgtccacttcgagtgtcccgagcagcagagtagtcagaaggaggagaactctgaggaatctggcacaggtgatactagcctggccggccagcagctggatagccatgcactgcgcgctcctagcggatcatcactgcctagctccccaggcagtaattcacgctcacccaatcgccagcaccagtag

SEQ ID NO: 268764 - DNA, 1635 bp, Artificial Sequence
  derived and/or modified sequence
atgcgggagagccagcccgaggccgagatccccctgcaggacaccacagccgaagcgtttaccatgttgctgaaatatatttacacaggtcgggcgaccttgaccgacgaaaaggaggaagtgctgttggacttcctgtctcttgcccacaaatacggctttcctgaactagaagacagcacctcagaatacctatgtaccattctgaacattcagaacgtctgcatgacgtttgacgtggcaagcctgtactccctgccaaaactgacctgtatgtgctgtatgttcatggatagaaacgcgcaagaggtcttatcctctgagggattcctttccctgagtaaaactgcactgctcaacattgtgctgagggatagctttgctgccccggagaaagacatcttcctggccctgcttaactggtgtaagcataacagtaaagagaaccatgccgagattatgcaggcggtcagactcccccttatgtctctgactgagctgctcaatgtcgtgagaccttccgggctgctctcgccagatgctattctcgacgctatcaaagtcagatcagaaagccgcgatatggacctgaactacaggggaatgttaatacccgaggaaaacatcgctactatgaaatacggagcccaagtggtgaaaggtgagctgaaatccgctctgttggacggcgacactcaaaattatgacttggaccacggcttttcaaggcatccgatcgacgacgactgcagatcagggattgagatcaagctaggtcagcccagtataattaatcacatccggattctactgtgggatcgtgatagcagatcctacagctacttcatcgaagtgtccatggacgagcttgattgggttcgggtgatcgatcatagtcagtatctgtgccgctcttggcagaaactctacttccccgcacgggtgtgccggtatatccgtatcgtcggcacccacaacaccgtgaacaagatttttcacatcgtcgcctttgagtgcatgttcacaaacaaaacctttaccctggaaaaggggctgattgtccctatggagaatgttgcaactatcgcagattgcgcctctgtgatcgaaggcgtgagcagaagccgtaatgcccttctgaacggcgacaccaaaaactatgactgggattccggatacacctgccaccaacttggttctggcgcaatcgttgttcaactggcgcagccatacatgattggttctataagactgctcttgtgggactgcgatgacagaagctactcttactacgtggaggtgtcaactaaccagcagcagtggaccatggtggctgaccgtacgaaggtttcctgtaagtcctggcagtcagtgacctttgagcgacaaccagcctcatttattagaatcgtcgggacccataatactgccaacgaagtgtttcactgcgtgcatttcgaatgcccagagcaacagtcatctcagaaggaagaaaactccgaagagtccggaactggagatacttctctggcgggccagcagctcgacagccacgcactgcgggcccccagcgggtctagccttccttctagtcccggaagcaattctcgctctccaaaccggcagcaccagtag

SEQ ID NO: 268765 - DNA, 1839 bp, Artificial Sequence
  derived and/or modified sequence
atgagcaacagccaccccctgcggcccttcaccgccgtgggcgagatcgaccatgtgcatatcctgtccgagcatattggcgctttattaatcggcgaagaatacggggacgtcacctttgtcgtcgagaaaaagcgttttccagcacaccgcgtcatactggctgcccgatgccagtacttccgcgctctcctgtatggtgggatgcgtgaatctcagcccgaggccgaaattcctcttcaggatacgactgcagaagcgtttacgatgttgttgaagtacatctatacaggtagagctaccctgacagacgagaaggaggaggtgcttctggatttcctgagccttgcccataagtatggctttcccgagttggaagactccacatcggaatacctctgcacgatcctcaacatacagaatgtgtgcatgacattcgacgttgcctccctgtactcattgccaaaacttacgtgcatgtgttgcatgttcatggacagaaacgcgcaagaagtgctcagttcagagggattcctatctctaagtaagacagctctgttgaacattgtcctgcgcgacagctttgccgcccctgagaaggatatcttcctcgctctgttgaattggtgtaagcataatagcaaagagaaccacgccgaaattatgcaggctgtgcggctcccactcatgtccctgaccgaattactgaatgtggttcgcccatccggcctgctgtcccctgatgctatactagatgccatcaaggtgcgctctgaaagcagagatatggacctcaactataggggaatgctcatcccggaggaaaacatcgcaaccatgaaatatggcgcgcaggtcgttaaaggtgaactgaaatccgccctgctggacggcgacacccagaactacgacctagatcatggcttctcccggcaccccatcgacgatgactgcaggagcggaattgagatcaaactcggccagccctcgatcataaaccatatacgaattttgttatgggatcgggactcaagaagctattcctatttcatagaggtgagcatggatgagctggactgggtgagggtgattgatcactctcagtacctctgccgtagctggcagaagctatactttcccgctagggtgtgcaggtatatccgtatcgttgggacgcacaatacagttaataaaatcttccatatcgtggcctttgagtgcatgtttacaaataagacattcaccctggagaaggggctgatagttccgatggagaatgtcgccactatagctgactgcgctagtgttatcgaaggagtgtctcggtctaggaatgccttgctgaacggggataccaagaattatgattgggatagcgggtatacatgtcaccagttgggatctggagcgatcgtcgtacagttggcgcaaccgtatatgatcggctcaatccggttgctcctgtgggattgcgacgaccgcagctactcctactacgttgaggtgtccactaaccagcagcagtggactatggtggcggatcgcaccaaggtgagttgtaaaagttggcagtctgtgacttttgaacgccagccagcatcattcatcaggattgtcgggacacacaacaccgccaatgaggttttccattgtgtgcacttcgaatgcccagagcaacagtcttcacaaaaagaagaaaatagcgaagagtccggaactggtgacacatcccttgctggccagcaattggacagccacgctctacgagcaccctccgggagttcattaccttcctctccagggagcaattcccgttcccctaaccgacagcatcagtag

SEQ ID NO: 268766 - DNA, 1635 bp, Artificial Sequence
  derived and/or modified sequence
atgagggaatcccaacccgaagctgagattcctctccaagatacaactgctgaggcctttacgatgctgcttaagtatatatatacagggcgagctactctgacagatgaaaaggaggaggtgctgctggacttcctatcactggcgcacaaatatggcttccctgaactcgaggattcgaccagtgagtacctgtgcactatccttaatatccagaacgtgtgcatgactttcgatgtggcttctctctacagtctgcctaagctgacctgtatgtgctgtatgttcatggatcgcaatgcacaggaggtcctgtcatccgagggattcctgtccctcagcaagaccgccttgcttaatattgttctccgggactccttcgccgcacccgaaaaagacatcttccttgctctgctcaactggtgcaagcacaacagtaaggaaaaccacgctgaaataatgcaggcagtccggctgcctttgatgagcctgacagaactgctcaatgtagtcagaccctcagggcttctttcccctgatgccattctggacgctattaaagtccgttccgaaagcagggatatggatttgaactatcggggaatgctcattccagaggaaaacatagcaacaatgaagtacggcgcacaagtggtcaaaggtgagttaaaaagtgcgctcctggacggagatacacagaactacgatcttgaccatggattcagccggcaccctatcgacgacgattgccgatccggaatcgagatcaagctagggcagccgtcaattatcaaccacatcaggatcttattatgggatagagacagccgatcctacagctatttcatagaggtgtcaatggacgaactcgactgggtgcgtgtcatcgaccatagtcaatacctttgccgctcatggcagaagctttacttccctgctagagtgtgccgctatatccgcatcgtgggaacccataataccgtgaacaaaatttttcacatagtggctttcgagtgcatgttcactaacaaaacctttaccttagagaagggccttatcgtgcctatggaaaatgtggccactattgcagattgtgccagtgtgatagagggtgtgtcgaggtcccgtaacgccttgctgaacggcgacactaagaattacgactgggacagcgggtacacgtgtcaccagctagggagcggggctattgtcgtgcagctggcccagccttacatgatcggcagcattcgcttattgctctgggattgcgatgaccggagctattcttattatgtcgaggtctcaaccaatcagcaacagtggactatggtggccgacagaacgaaagtttcctgtaaatcctggcaatccgtgacttttgaacggcagccggctagtttcatcaggatcgtgggaactcacaacaccgccaacgaagtgttccattgtgttcatttcgaatgcccggagcaacaatccagccagaaagaggagaacagtgaggaaagcggaaccggggatacctctctggccggtcagcagctggattcccacgcacttcgcgctcctagcggaagctcactgcccagctcgccaggcagcaatagcagatcacctaaccgccagcatcaatag

SEQ ID NO: 268767 - DNA, 1839 bp, Artificial Sequence
  derived and/or modified sequence
atgagcaactcacacccactgaggccattcacggccgttggggagattgatcatgttcacatactgtctgaacacataggtgcgctcttgatcggagaggagtacggcgacgtgaccttcgtggtcgagaagaagcgcttcccggcacatagagttattttagccgctagatgtcaatactttcgcgctctcctctatggtgggatgcgggagtcccagccagaagcggaaataccattacaggataccactgccgaagcttttaccatgctcttgaagtatatctacacaggcagagccactctcacagacgaaaaggaggaggtgctcttagattttctgagcctggcgcataagtacggctttcctgagttagaggactcgacatcagaatatctctgcaccatattgaacatccagaacgtgtgtatgacattcgacgtcgcctcactttattcactgccgaagctgacgtgtatgtgctgcatgttcatggacaggaacgcacaggaagtgctttcatccgagggcttcctgtccctgagcaagaccgctctcctgaatatcgtgctaagggattccttcgcagcccctgagaaggacatcttcctggctctgttgaactggtgcaaacataattctaaagaaaatcacgcagagatcatgcaggcagtgagactgcccctaatgtccttaacagaactcctgaacgtcgtgagaccaagtggacttcttagcccggatgccattctggacgccattaaggtccgctctgagtcacgcgatatggacctgaactatagggggatgctgatcccagaggagaatatcgccaccatgaagtatggagcccaggtggtgaagggggagctgaagagcgccctgctagacggggacactcagaattacgacctggatcatggcttctcacggcaccccatagacgacgactgcaggtccggcatcgaaatcaaattggggcagccctccatcatcaaccatatcagaattttgctctgggaccgcgactcaagaagctattcttactttatagaggtgtcaatggacgaattggactgggtcagagttattgatcatagccagtatctgtgccggagctggcagaagctgtattttcccgcaagagtctgtagatatatacgcatcgttggaacccataacacagtaaacaagatcttccacatcgtggcattcgagtgtatgtttaccaataagacgtttactctagagaaaggactcattgtgcccatggagaatgtagctactatcgccgactgcgcttccgtcatcgaaggagtttcccgtagccgaaacgcgctgctcaacggggacactaaaaattacgattgggacagcggctacacttgccaccagttgggtagtggagccattgtggtccagcttgcacagccatatatgattggcagtataaggttactgctatgggactgtgatgataggtcttactcctattacgtcgaagttagtactaaccagcagcaatggaccatggtcgccgaccggactaaggtctcttgtaagagctggcagtccgtgacttttgagcgccagccggcatcatttattaggatcgtcggtactcacaacacagccaacgaggtgttccattgcgttcactttgaatgtcccgagcagcagagctcccaaaaggaggaaaattcagaggagagcggcacaggcgacacttcgttggctggacagcagctggactcccacgccctccgtgccccttccggctcatccctcccgtcctcacctgggagcaacagtagatccccgaatcggcagcaccaatag

SEQ ID NO: 268768 - DNA, 1635 bp, Artificial Sequence
  derived and/or modified sequence
atgcgggagagtcagccagaggcagagatcccactgcaggacactacagctgaggcttttacgatgctgctgaagtacatctacactgggagggccactttaacagacgagaaggaagaggtgctcttggatttcctttccctggcgcacaagtatggcttccctgagcttgaggatagtacatcagaatacctgtgcacaatcctcaatattcagaacgtgtgcatgacattcgatgtggcctctctgtatagtctaccaaagctcacctgtatgtgctgcatgtttatggacaggaacgctcaggaagtgctgagttctgaggggttcctctccttaagcaagacagctctgttaaacattgtgctccgcgactcattcgccgcaccagagaaagacatcttcctagcccttctcaattggtgcaaacacaactctaaggagaaccacgccgaaatcatgcaggccgtccgcttgcctctgatgtctctcactgagttgctgaacgtagtgcgcccttctggactcttatcacctgacgccattctggacgcgatcaaggtaagatctgaaagccgggacatggacctcaactaccgaggtatgttaatcccagaggaaaatattgctacgatgaagtatggggctcaggtcgtaaagggagaactgaaatccgcgctcctggatggagacacccagaattacgatctcgaccatggctttagtcggcacccaattgacgatgactgccggtccggcatcgagattaagctgggccagcctagcataattaatcacatcaggattctgctctgggatagagacagccgcagttactcctattttatcgaggtgtctatggatgagcttgactgggtaagagtcatcgatcatagccagtacctgtgcagatcgtggcagaagctttactttcctgcgcgagtctgtcgttacatcaggattgtcggaacacataataccgttaataaaatcttccacatcgtggccttcgagtgcatgttcactaacaaaactttcacactcgaaaaaggactgatagttccaatggagaatgttgcaaccatagctgactgtgcgagcgtcattgaaggcgttagcaggtcaaggaacgctttacttaacggcgataccaagaattatgactgggatagcggatatacctgccaccaactgggaagtggcgctatcgtagttcagctggcccagccatacatgatcggctctatcagacttctgctgtgggactgcgacgaccggtcttattcatactatgttgaagtctctactaatcagcagcagtggactatggtggccgatcgtacaaaggtgtcgtgcaaatcatggcagtccgtcacttttgaaagacagccagccagctttatccgcattgttgggacacataacaccgctaatgaggtctttcactgtgtgcacttcgaatgcccagagcagcagtcttctcagaaagaggaaaattccgaggaaagcggtacaggcgacacctcacttgccggacagcagctagactctcacgcactaagggcaccaagcggctcaagcttaccaagttccccaggatccaatagcagaagccccaatcgccaacaccagtag

SEQ ID NO: 268769 - DNA, 1839 bp, Artificial Sequence
  derived and/or modified sequence
atgtctaattctcatccactccgacccttcaccgcagtgggagagatcgatcacgtgcatattctgtcagagcacatcggagcactcttgatcggggaggagtatggcgacgtcacatttgtggtggagaagaaacgctttcctgcccatcgcgtgattcttgctgccagatgccagtacttccgggctctgctgtatggcggtatgcgggagtcgcagcctgaggcagaaatccctcttcaggatacgacagctgaagcttttacaatgctgctgaaatacatctacacgggccgtgcaactctcactgatgagaaagaagaggtgttgctggacttccttagcctggctcacaagtatggattcccagagttggaggattctacatctgaatatttatgcaccatactgaatatacagaatgtttgtatgaccttcgacgtggcttctctgtattccctaccaaagctaacctgcatgtgctgcatgtttatggataggaacgctcaggaggtgctctcctccgagggcttccttagcctgtcaaaaacggccctgctgaatatcgttcttagagattcattcgccgcaccagaaaaggacatctttcttgctctgctgaattggtgcaagcataactctaaggaaaaccatgcagagattatgcaggccgtgcgcctgcctctgatgtcactcaccgaacttttaaatgtggttcggccatctggcctcctgtctccagacgctatactggacgcgattaaagtccgaagcgagtcccgcgatatggacttgaactacagaggtatgttaatcccagaggaaaacattgctacaatgaaatacggagcacaggtggtcaaaggggagctcaagtcagccctgctggacggagatacccagaattacgacctggatcatggcttcagccgacaccccatcgacgacgactgccggtctgggatcgagattaaactgggccaaccgagcataataaaccacatccgtattctgctctgggatcgagactctaggtcctattcctattttatcgaagtgtcaatggacgagctggattgggtcagggttattgatcatagtcagtacttatgccggagctggcagaagctgtactttccggctcgtgtgtgcaggtacattcgaatcgttggtacccataataccgttaataaaatattccatatcgtcgcctttgagtgcatgtttacaaataagactttcaccctggaaaaagggctgattgtgccaatggagaacgtcgccaccattgccgattgcgctagcgtcatcgaaggggtgtcaaggtcacgcaatgcactccttaatggggatacaaagaactatgactgggacagcggctacacctgtcaccagctgggctcgggggctatcgtggtgcagctggcccagccctacatgattggctccatacgactgctcctgtgggactgcgacgataggtcgtattcctattacgtggaggtgtcgaccaaccaacaacaatggacaatggtggctgaccggacgaaggtgtcatgcaaaagctggcaatccgtgacattcgagagacagcctgccagttttatccgcattgtggggacacataacaccgccaacgaagtctttcattgtgtacacttcgagtgcccagagcagcagtcgtcccagaaagaagagaacagcgaggagagcgggacaggggacacctctctggcagggcagcagttagatagccacgccctcagagcaccgagcggaagctctctccccagtagcccaggcagtaacagtcggagtccaaatagacagcaccagtag

SEQ ID NO: 268770 - DNA, 8486 bp, Artificial Sequence
  derived and/or modified sequence
agataaggaattgtataggaggaaacttcatagtaaacattgaacctctgtgcttgtctccttgttgaagttgggggttcatgtttattgttccaagggagcctcatcaaaaccacttttaaagcattgagaatccaaataaataccatggatcatacaggattggggataagtcttgaggtctccccgagaaggagaagttctttaatttggtaattttagggtaatggttggatgctctctggattaatggaaaccttcaggggtacttttaggcagagtataacccagtgaagagagcattattatatggtggaatgcgagagtctcagcctgaagcagaaattcctctccaagacaccactgcagaagcattcacaatgctactcaaatatatctacactgggcgggcaacgctgacagatgagaaggaggaggtgctgctggactttttgagcctggctcataaatatggatttccagagctagaggattctacctctgagtatctctgcaccatacttaacattcagaatgtctgcatgacttttgatgttgccagtctctactcacttcccaagttaacttgtatgtgctgcatgtttatggataggaatgctcaggaagtcctctcaagtgaaggtttcctctccctttctaagacagcacttttaaacatcgtgttaagagactcatttgcagctcccgaaaaagatattttcctagccttattaaactggtgtaagcacaattcaaaggagaatcatgctgaaatcatgcaggctgtgcgtttacctctcatgagcctcacagagcttctgaatgttgtgaggccttcaggactgctgtctcctgatgccatcctggatgccattaaagtgcgatctgagagccgggatatggacctcaattatagaggcatgctcataccagaagaaaacattgcaactatgaagtatggagcccaagttgtaaagggggagctgaaatcagccttattagatggtgatactcaaaattatgatttggatcatggattttcaaggcacccaattgatgatgactgccgttccggcatcgagattaagctaggtcagccatccattatcaatcacatacggatactcttgtgggaccgagatagccggtcttactcatacttcattgaagtgtcaatggatgaacttgattgggtcagagtgatagatcattcacaatatctgtgtcgttcttggcagaaattatattttccagcccgtgtctgcaggtatattcgaattgttgggactcacaacacagtgaacaagatttttcacattgtggcttttgaatgtatgtttacaaacaaaaccttcactcttgagaaggggctgatagttcccatggagaatgttgcaacaattgctgattgtgccagtgtgattgaaggagtcagtcggagccgaaatgccttgctgaatggggacactaagaattatgactgggattctggctacacatgtcaccagctaggaagtggtgcgattgtggttcagttggcacaaccgtacatgattgggtcaatacggttactactttgggattgtgatgatcgaagctatagctactacgttgaggtttctaccaaccagcaacagtggaccatggttgctgacagaactaaagtctcctgcaagtcctggcagtcagtaacttttgaaaggcagcctgcctccttcatccgtatcgttgggacacacaacacagcaaatgaggtgttccactgtgtccactttgagtgtccagagcagcagagcagccagaaggaggaaaatagtgaggaatcggggacaggggacaccagcctggccggtcagcagctcgactcccatgcgctgcgggcgcctagtggcagctcactaccctccagcccaggctccaactcacgctcccccaaccggcagcaccaataaaggaggcagcgggcctggtgtgacttggtgggctcgggcaacggcaggaaacggtctcctccctgagcaggggtctctgttgactgcccccacctctgcccctttccagggaggagccgacctagctgcaaaagcagacaccgaacaggttttctcccaaggacagaaaggggctgctttgttcttctcaatttatccaaatcaggcaggtctcaagggggagaaaatgggtcttcaatcttcatcaagtccaccattaacaccctacctctctaatctagcccaggcgcagggaacaggaggaagtcatagacaggcctgtgttggaatacaaaaatggcacgcaaacactcaggcggaggagaaagccattgggcctttgctacctggaggcaccctttaggaatgggcctccatagagtgttcattctgctggaatacattgccctggcaactaaatgattttttatttgttttagttattctccactcagtgaatcataggtgttccggatctatttgaaatgctcaaacagcaaatcactagttttaatcccttttgatgctataattttccttccttggttttgaacggttcagcttgcggggacagagacccatcgtgcatgtctcctaaatgagacacggatgcagctcatcctggcacttgggccacagaggaagtgccacaaatgcacacaagcaaatcaacctgtggacactggagttaatagtcactcgtgtggctgagttactcacctgtcattcctgacatggatccagcctttaagcttgggaggctgacaaggaaatagttactatgcccgctgctaattcactgttccgaagtccatgtagataaacatataccgagttctggcgtggccaaacctgccggggactgccgtggcttagctgcccctccagttgtgtttatcgaagcattggagaggcagccacctgcccatcagcgtcaggaacgcagaactgggactccgtgcttcccccacaccacagtactcaactggggactgaaaaatagcagttccaagaagcttttctcctaatcctcatcaaaaggacctcatttgacgatggtggcttgatgtggctccgtctcctacttagtgatttccattccagtgctgcctgccctgggtaactgcgcacaacattgcctgcccctccgctgtccccagagctccggcctctgtcgccatcagcatcagcctgggagtctccccaggacggcatggcacgtgagcagcactgcagtccttgggtcttcggcgccaacctgcaaccctgatcaaaggagggtgagggcgtgggagtttcctttcaggtgtgtcaaagacatatcagctgcgctctagaaagagccaacgggtcagccgcttcctcctagtttaacttgattttgagtgatttgtccatatggaaatagtagggtagcatcaaactgcgtgattaaattggaagactgtctttccgtgtgaacacaggatggcagacatcagagggctaccggggcagggtggacacgttcctgaggagaagccagggtctgcagctctccatcctccccggtagctccagctgcagggctgagctgcttcctatcccctcagctctgatctctgccacttccctgttgtgtgggagagtggaacactcctgggatgccaggcatttcataatgggaggaggctcctgtaaggaacggtgggcgcccgctcacagtggggggccctccagcatggttgctgactctgtcagcccccagccccgggttgccaattagccagagagctcctgcacacacagcacttccttccccagtgtgttttctacccagatggggacaaaggagccagacagtcatatcaagggcagagttcaaacattttgaaatgagccattcacatgcttctttttaaacatgggcatcacctgcccagaggcccttggcctgaagcagcatgctgctgaccttgggaagagagggtgggctggtgggggtgctggaggagctgcccggccctgcatctgcaaccctccagtcccctgcccacagagcacgcagagccctcctgtgctccgggaacgagatagcagcttggcagctcggcctcgcatctgaaaaggaatacgctgcaaagcctcggccctagacccacatctgcagctccctggcctgtggcggttctttccttcggggcatgcccttccagatctctgtccctcctgtcttctagcactttaaagatgccccttatcatcagataaagagaagtatggggacgatggggtggcactaacagtagatgtcattggtgaggactgatggcaaagtctcattccctcacagccgcgctgccagctcgcctccccctcgctttgctgggagcctgccctggactccaaaaggacacgggttcacctcctttcccaggctggaggggtactgcccttccctgaggggccttctgactggggcaggaactcttttcgtgtgtccagctgggcctggaggccaagtcaaggtgtgtcacaccacacaccagggcaaggacctcatctccagggaacagggacaagtgagtggctaccagaaagtccccgggcagcctggagttccccagagcctggctggtcctacagagcacttctcccctgggccaccaggaccaaagcgacctaaacacttgaagctaaaagcaagtgctgatgatgggatgggctggcacgtggctgggagggctcctgggcaccacagagccctcagcccagcagagagtggaggctcagtccgtggggagcgggggttgtgaaggagacatggccaagcccctggtcggggagataagctcccccatgcccaggccagccccaggggcaacaagccaacatggagagaggtggcaggtgaggctgacaggtgggtgcctgtggcctgggcccatgagggcaatggtcctcagtaaccaatggaaaggacacaagggcgccatggtcaccaccacccaggcaaagaaatgggaggtggccagcacccccacccttcacttttcattattattattattattattattattattttttttttttttttttttttttttttttttttttgagagtagaaaggcaacttcattggagcttttggggaaaaaagccttcaaagtcaccttctggcagctctggggagggtcatttggggtggactgagagtgtagggcaggtagggtgtgtgctgggcagcagctgtgtccatgcagccagcacccagcagggcagtctcacaggagccgttgtgagcactttggacttgaagcagctatgaaccaccccccgcccccaccgtctctccctctcacacacacacacacacacacacacacacacacacacacacacacacacccgttttaccattttctcagtgctttttctgctttcattcctttgattttagttagaagcacaagccatgatggatgtgggactcttctcaattgctctttaaattgtcactttttaaatcctattaaatgaagtgtcgattcctgacaaatacattaaaagtgttttattcctagaagagttgggaaaagaaattattttcagcaagagtaggatgtttgttaaactgattccttggcaaaaaagagaaaaaaagcttttgaattgtgcaaaaaattgcccagtattatgctgtcgccccagttgtcaaactgctgtgcagatggctccagcccagtcaacttcaccttctttttaatttagaagataacaaaattgtaatcacttatcctttccagagccaagggggaaaaggaaggtataatctacaataaaaagcgagcgttctgtgtactgaggccacttggtgataaagagatggagcgctcccctcacagacttcaattaagaacctccctttggacagggaagaaaggtgtcaaagaggaaaagaaaattaaatttgcttccttccaggagtttttcctcattagtgcttgcttgtcggtgttattattttaatcttaccttctatgtggtgaccagctcctccgagcgatgcccaggtcgggcacggcccgggcagggcaggtctgcagcgatgccgtggcagaggtgggcatactccatttgttttggcagctgcagccattgattctgcatatttttcctgacaacagccccggcaggagttcagttaggaatttaaagtgcagttcatggttctgtgccaccgtggcttttattattataatattaaattagaagttgtcctagtgcctggtgtttgctcagagtttccagaagagagggaagggcaaggtttaaatggcatgcaggacaactggaatgcccccatctctctcgctgacacggatccagtcatacctggggctggacgggatttggaggccctggtcatttgcagagtgaatggtgaagggcgcggaaaaggtttgcttggaggaaagaccggttgcagaggcgaggcggagggaggaggggcggaggcagcaggtctttgtttgtggtaggtctctggcttccatcagggaggaggaaagaggctgtgcccttcctggctcttggctgcaccactgaggacgctccgagggacagcgtgctcacccatcctttgcacagtgctggccccaagccccacggccttccagctaggattttctgctgggctcatgcagaggcaggggacaggtgcatggaagagccgccccacccgacacaccattgtttgaaaatcactgttctctttactcacttaaaaaagtgtacagggaacacctgttcctggcataatgctccaacctcgcggaaggggccaggtgcccttcatctggctctggctgcttccgacctgggcccacgtcatcgttcacgtcctctgtgaccaccactggtcacggtgctccctggcccagcctccaacccacccagcaccctggcatctcccaggccagtctgctgcacccagcgagcttccagtcagaagccaggctgaacggccctcctgccccatcagcttcgtgtcttcttttttttaaagaactgaaatagtccccaagaggcctcatggcctgaagactcacaatcatccacctgtaatttatgataaatgtctgggagcatttaccatttgcgtccgtgagtatttatagccctgaatgggcgggggggagggggggtggaggaggccctgcagccaggagctacacacctgtccccactagtgtcccctggttgacagagccccctcagcctccccaaggctgtcactgcggctgtgacagctgaggagtgccgcctttgaaagccagtggacagtcgctccactagggggagaggccctggccctggcgcagaggaggcgttgcgaggcgggacgggggctggaggggctgagcagccttcagggcagggactgggccctgggtcactggagacgttgatattagtccgtctgctgccaaattgctccccaccacatgagccccaggggtttatgtcccaggaaggcgagggtgcccatctgagcggaattgggaggggacggcaccagctcatctccctcagggcctttgcctcctggtgctgccctggtggctgctcctgcaccacagcccctgatggctgctgctagtcctgagttgctgggtttacccccagcccacacttcccacctgggcctgagggtgcggccagtgccctagtcctagccactacaggagtcattctgagacctgctggaggccatggggtcttcccaggcccctcaatcagctgcttccagggtcagcagggcagggtgctgccagtaaggtcctcagggagcacagcccggccgcccaggctgggggatactggggcagagcttccaggtctgtggggcctgatctctccccaaggctctccaggccttggtgcgccctccacagtgaccttcagagaggctgcaccccctcagaagaacagtgagaaatctctccatcacacgctccctggtccttatgtccctgaggccacccttccccaccccccagtgcctggagaagcgtgagactctggaggggcgccaggaggccaggggtcctcagggctaggcctggagctcggcccaagagctgcttttgcgaagcctgtcttgaatccggattcaccagagaacaagagcctcccagcctttggcgtttctgggcctgtaaagatgtgtgtacctcccaggccactctgatgcaagggcagggaccatgccaggcctgggttgggaatggctctgtgactccagaagctccgtctaaaactccaaagatgcccaaaaggctgtgctgctatgtggaatgtgtattatttgtgagcacgatgcggcttcttcctcattttgcagagcaacctaagcgggcagatgtacaaaccgtgtgttcgaaacccctgagtccatgtgtgtgaaaatgcaggttttctcttagaaataaagtggtgacttgtgctgta

SEQ ID NO: 268771 - DNA, 1839 bp, Artificial Sequence
  derived and/or modified sequence
atgagtaacagccaccctcttcgcccctttactgcagtgggggaaattgatcatgtgcacattttgtctgaacatattggtgccttgttgattggggaagaatatggcgacgtcacattcgtggtggaaaagaaacgttttcctgcccacagggtaattttagcagccaggtgccaatattttcgagcattattatatggtggaatgcgagagtctcagcctgaagcagaaattcctctccaagacaccactgcagaagcattcacaatgctactcaaatatatctacactgggcgggcaacgctgacagatgagaaggaggaggtgctgctggactttttgagcctggctcataaatatggatttccagagctagaggattctacctctgagtatctctgcaccatacttaacattcagaatgtctgcatgacttttgatgttgccagtctctactcacttcccaagttaacttgtatgtgctgcatgtttatggataggaatgctcaggaagtcctctcaagtgaaggtttcctctccctttctaagacagcacttttaaacatcgtgttaagagactcatttgcagctcccgaaaaagatattttcctagccttattaaactggtgtaagcacaattcaaaggagaatcatgctgaaatcatgcaggctgtgcgtttacctctcatgagcctcacagagcttctgaatgttgtgaggccttcaggactgctgtctcctgatgccatcctggatgccattaaagtgcgatctgagagccgggatatggacctcaattatagaggcatgctcataccagaagaaaacattgcaactatgaagtatggagcccaagttgtaaagggggagctgaaatcagccttattagatggtgatactcaaaattatgatttggatcatggattttcaaggcacccaattgatgatgactgccgttccggcatcgagattaagctaggtcagccatccattatcaatcacatacggatactcttgtgggaccgagatagccggtcttactcatacttcattgaagtgtcaatggatgaacttgattgggtcagagtgatagatcattcacaatatctgtgtcgttcttggcagaaattatattttccagcccgtgtctgcaggtatattcgaattgttgggactcacaacacagtgaacaagatttttcacattgtggcttttgaatgtatgtttacaaacaaaaccttcactcttgagaaggggctgatagttcccatggagaatgttgcaacaattgctgattgtgccagtgtgattgaaggagtcagtcggagccgaaatgccttgctgaatggggacactaagaattatgactgggattctggctacacatgtcaccagctaggaagtggtgcgattgtggttcagttggcacaaccgtacatgattgggtcaatacggttactactttgggattgtgatgatcgaagctatagctactacgttgaggtttctaccaaccagcaacagtggaccatggttgctgacagaactaaagtctcctgcaagtcctggcagtcagtaacttttgaaaggcagcctgcctccttcatccgtatcgttgggacacacaacacagcaaatgaggtgttccactgtgtccactttgagtgtccagagcagcagagcagccagaaggaggaaaatagtgaggaatcggggacaggggacaccagcctggccggtcagcagctcgactcccatgcgctgcgggcgcctagtggcagctcactaccctccagcccaggctccaactcacgctcccccaaccggcagcaccaataa

SEQ ID NO: 268772 - DNA, 1635 bp, Artificial Sequence
  derived and/or modified sequence
atgcgagagtctcagcctgaagcagaaattcctctccaagacaccactgcagaagcattcacaatgctactcaaatatatctacactgggcgggcaacgctgacagatgagaaggaggaggtgctgctggactttttgagcctggctcataaatatggatttccagagctagaggattctacctctgagtatctctgcaccatacttaacattcagaatgtctgcatgacttttgatgttgccagtctctactcacttcccaagttaacttgtatgtgctgcatgtttatggataggaatgctcaggaagtcctctcaagtgaaggtttcctctccctttctaagacagcacttttaaacatcgtgttaagagactcatttgcagctcccgaaaaagatattttcctagccttattaaactggtgtaagcacaattcaaaggagaatcatgctgaaatcatgcaggctgtgcgtttacctctcatgagcctcacagagcttctgaatgttgtgaggccttcaggactgctgtctcctgatgccatcctggatgccattaaagtgcgatctgagagccgggatatggacctcaattatagaggcatgctcataccagaagaaaacattgcaactatgaagtatggagcccaagttgtaaagggggagctgaaatcagccttattagatggtgatactcaaaattatgatttggatcatggattttcaaggcacccaattgatgatgactgccgttccggcatcgagattaagctaggtcagccatccattatcaatcacatacggatactcttgtgggaccgagatagccggtcttactcatacttcattgaagtgtcaatggatgaacttgattgggtcagagtgatagatcattcacaatatctgtgtcgttcttggcagaaattatattttccagcccgtgtctgcaggtatattcgaattgttgggactcacaacacagtgaacaagatttttcacattgtggcttttgaatgtatgtttacaaacaaaaccttcactcttgagaaggggctgatagttcccatggagaatgttgcaacaattgctgattgtgccagtgtgattgaaggagtcagtcggagccgaaatgccttgctgaatggggacactaagaattatgactgggattctggctacacatgtcaccagctaggaagtggtgcgattgtggttcagttggcacaaccgtacatgattgggtcaatacggttactactttgggattgtgatgatcgaagctatagctactacgttgaggtttctaccaaccagcaacagtggaccatggttgctgacagaactaaagtctcctgcaagtcctggcagtcagtaacttttgaaaggcagcctgcctccttcatccgtatcgttgggacacacaacacagcaaatgaggtgttccactgtgtccactttgagtgtccagagcagcagagcagccagaaggaggaaaatagtgaggaatcggggacaggggacaccagcctggccggtcagcagctcgactcccatgcgctgcgggcgcctagtggcagctcactaccctccagcccaggctccaactcacgctcccccaaccggcagcaccaataa

SEQ ID NO: 268773 - DNA, 8525 bp, Artificial Sequence
  derived and/or modified sequence
agccggggcggcggcgaggacggcggccacggaagcggccaagggggcggtggcgcagagaggggtgcggagcgggcggaagaggcgtctgtgtcgcagcttggtctcagaggagcatcgctgggaacaacgactatcgtctattccacaagatgagtaacagccaccctcttcgcccctttactgcagtgggggaaattgatcatgtgcacattttgtctgaacatattggtgccttgttgattggggaagaatatggcgacgtcacattcgtggtggaaaagaaacgttttcctgcccacagggtaattttagcagccaggtgccaatattttcgagcattattatatggtggaatgcgagagtctcagcctgaagcagaaattcctctccaagacaccactgcagaagcattcacaatgctactcaaatatatctacactgggcgggcaacgctgacagatgagaaggaggaggtgctgctggactttttgagcctggctcataaatatggatttccagagctagaggattctacctctgagtatctctgcaccatacttaacattcagaatgtctgcatgacttttgatgttgccagtctctactcacttcccaagttaacttgtatgtgctgcatgtttatggataggaatgctcaggaagtcctctcaagtgaaggtttcctctccctttctaagacagcacttttaaacatcgtgttaagagactcatttgcagctcccgaaaaagatattttcctagccttattaaactggtgtaagcacaattcaaaggagaatcatgctgaaatcatgcaggctgtgcgtttacctctcatgagcctcacagagcttctgaatgttgtgaggccttcaggactgctgtctcctgatgccatcctggatgccattaaagtgcgatctgagagccgggatatggacctcaattatagaggcatgctcataccagaagaaaacattgcaactatgaagtatggagcccaagttgtaaagggggagctgaaatcagccttattagatggtgatactcaaaattatgatttggatcatggattttcaaggcacccaattgatgatgactgccgttccggcatcgagattaagctaggtcagccatccattatcaatcacatacggatactcttgtgggaccgagatagccggtcttactcatacttcattgaagtgtcaatggatgaacttgattgggtcagagtgatagatcattcacaatatctgtgtcgttcttggcagaaattatattttccagcccgtgtctgcaggtatattcgaattgttgggactcacaacacagtgaacaagatttttcacattgtggcttttgaatgtatgtttacaaacaaaaccttcactcttgagaaggggctgatagttcccatggagaatgttgcaacaattgctgattgtgccagtgtgattgaaggagtcagtcggagccgaaatgccttgctgaatggggacactaagaattatgactgggattctggctacacatgtcaccagctaggaagtggtgcgattgtggttcagttggcacaaccgtacatgattgggtcaatacggttactactttgggattgtgatgatcgaagctatagctactacgttgaggtttctaccaaccagcaacagtggaccatggttgctgacagaactaaagtctcctgcaagtcctggcagtcagtaacttttgaaaggcagcctgcctccttcatccgtatcgttgggacacacaacacagcaaatgaggtgttccactgtgtccactttgagtgtccagagcagcagagcagccagaaggaggaaaatagtgaggaatcggggacaggggacaccagcctggccggtcagcagctcgactcccatgcgctgcgggcgcctagtggcagctcactaccctccagcccaggctccaactcacgctcccccaaccggcagcaccaataaaggaggcagcgggcctggtgtgacttggtgggctcgggcaacggcaggaaacggtctcctccctgagcaggggtctctgttgactgcccccacctctgcccctttccagggaggagccgacctagctgcaaaagcagacaccgaacaggttttctcccaaggacagaaaggggctgctttgttcttctcaatttatccaaatcaggcaggtctcaagggggagaaaatgggtcttcaatcttcatcaagtccaccattaacaccctacctctctaatctagcccaggcgcagggaacaggaggaagtcatagacaggcctgtgttggaatacaaaaatggcacgcaaacactcaggcggaggagaaagccattgggcctttgctacctggaggcaccctttaggaatgggcctccatagagtgttcattctgctggaatacattgccctggcaactaaatgattttttatttgttttagttattctccactcagtgaatcataggtgttccggatctatttgaaatgctcaaacagcaaatcactagttttaatcccttttgatgctataattttccttccttggttttgaacggttcagcttgcggggacagagacccatcgtgcatgtctcctaaatgagacacggatgcagctcatcctggcacttgggccacagaggaagtgccacaaatgcacacaagcaaatcaacctgtggacactggagttaatagtcactcgtgtggctgagttactcacctgtcattcctgacatggatccagcctttaagcttgggaggctgacaaggaaatagttactatgcccgctgctaattcactgttccgaagtccatgtagataaacatataccgagttctggcgtggccaaacctgccggggactgccgtggcttagctgcccctccagttgtgtttatcgaagcattggagaggcagccacctgcccatcagcgtcaggaacgcagaactgggactccgtgcttcccccacaccacagtactcaactggggactgaaaaatagcagttccaagaagcttttctcctaatcctcatcaaaaggacctcatttgacgatggtggcttgatgtggctccgtctcctacttagtgatttccattccagtgctgcctgccctgggtaactgcgcacaacattgcctgcccctccgctgtccccagagctccggcctctgtcgccatcagcatcagcctgggagtctccccaggacggcatggcacgtgagcagcactgcagtccttgggtcttcggcgccaacctgcaaccctgatcaaaggagggtgagggcgtgggagtttcctttcaggtgtgtcaaagacatatcagctgcgctctagaaagagccaacgggtcagccgcttcctcctagtttaacttgattttgagtgatttgtccatatggaaatagtagggtagcatcaaactgcgtgattaaattggaagactgtctttccgtgtgaacacaggatggcagacatcagagggctaccggggcagggtggacacgttcctgaggagaagccagggtctgcagctctccatcctccccggtagctccagctgcagggctgagctgcttcctatcccctcagctctgatctctgccacttccctgttgtgtgggagagtggaacactcctgggatgccaggcatttcataatgggaggaggctcctgtaaggaacggtgggcgcccgctcacagtggggggccctccagcatggttgctgactctgtcagcccccagccccgggttgccaattagccagagagctcctgcacacacagcacttccttccccagtgtgttttctacccagatggggacaaaggagccagacagtcatatcaagggcagagttcaaacattttgaaatgagccattcacatgcttctttttaaacatgggcatcacctgcccagaggcccttggcctgaagcagcatgctgctgaccttgggaagagagggtgggctggtgggggtgctggaggagctgcccggccctgcatctgcaaccctccagtcccctgcccacagagcacgcagagccctcctgtgctccgggaacgagatagcagcttggcagctcggcctcgcatctgaaaaggaatacgctgcaaagcctcggccctagacccacatctgcagctccctggcctgtggcggttctttccttcggggcatgcccttccagatctctgtccctcctgtcttctagcactttaaagatgccccttatcatcagataaagagaagtatggggacgatggggtggcactaacagtagatgtcattggtgaggactgatggcaaagtctcattccctcacagccgcgctgccagctcgcctccccctcgctttgctgggagcctgccctggactccaaaaggacacgggttcacctcctttcccaggctggaggggtactgcccttccctgaggggccttctgactggggcaggaactcttttcgtgtgtccagctgggcctggaggccaagtcaaggtgtgtcacaccacacaccagggcaaggacctcatctccagggaacagggacaagtgagtggctaccagaaagtccccgggcagcctggagttccccagagcctggctggtcctacagagcacttctcccctgggccaccaggaccaaagcgacctaaacacttgaagctaaaagcaagtgctgatgatgggatgggctggcacgtggctgggagggctcctgggcaccacagagccctcagcccagcagagagtggaggctcagtccgtggggagcgggggttgtgaaggagacatggccaagcccctggtcggggagataagctcccccatgcccaggccagccccaggggcaacaagccaacatggagagaggtggcaggtgaggctgacaggtgggtgcctgtggcctgggcccatgagggcaatggtcctcagtaaccaatggaaaggacacaagggcgccatggtcaccaccacccaggcaaagaaatgggaggtggccagcacccccacccttcacttttcattattattattattattattattattattttttttttttttttttttttttttttttttttttgagagtagaaaggcaacttcattggagcttttggggaaaaaagccttcaaagtcaccttctggcagctctggggagggtcatttggggtggactgagagtgtagggcaggtagggtgtgtgctgggcagcagctgtgtccatgcagccagcacccagcagggcagtctcacaggagccgttgtgagcactttggacttgaagcagctatgaaccaccccccgcccccaccgtctctccctctcacacacacacacacacacacacacacacacacacacacacacacacacccgttttaccattttctcagtgctttttctgctttcattcctttgattttagttagaagcacaagccatgatggatgtgggactcttctcaattgctctttaaattgtcactttttaaatcctattaaatgaagtgtcgattcctgacaaatacattaaaagtgttttattcctagaagagttgggaaaagaaattattttcagcaagagtaggatgtttgttaaactgattccttggcaaaaaagagaaaaaaagcttttgaattgtgcaaaaaattgcccagtattatgctgtcgccccagttgtcaaactgctgtgcagatggctccagcccagtcaacttcaccttctttttaatttagaagataacaaaattgtaatcacttatcctttccagagccaagggggaaaaggaaggtataatctacaataaaaagcgagcgttctgtgtactgaggccacttggtgataaagagatggagcgctcccctcacagacttcaattaagaacctccctttggacagggaagaaaggtgtcaaagaggaaaagaaaattaaatttgcttccttccaggagtttttcctcattagtgcttgcttgtcggtgttattattttaatcttaccttctatgtggtgaccagctcctccgagcgatgcccaggtcgggcacggcccgggcagggcaggtctgcagcgatgccgtggcagaggtgggcatactccatttgttttggcagctgcagccattgattctgcatatttttcctgacaacagccccggcaggagttcagttaggaatttaaagtgcagttcatggttctgtgccaccgtggcttttattattataatattaaattagaagttgtcctagtgcctggtgtttgctcagagtttccagaagagagggaagggcaaggtttaaatggcatgcaggacaactggaatgcccccatctctctcgctgacacggatccagtcatacctggggctggacgggatttggaggccctggtcatttgcagagtgaatggtgaagggcgcggaaaaggtttgcttggaggaaagaccggttgcagaggcgaggcggagggaggaggggcggaggcagcaggtctttgtttgtggtaggtctctggcttccatcagggaggaggaaagaggctgtgcccttcctggctcttggctgcaccactgaggacgctccgagggacagcgtgctcacccatcctttgcacagtgctggccccaagccccacggccttccagctaggattttctgctgggctcatgcagaggcaggggacaggtgcatggaagagccgccccacccgacacaccattgtttgaaaatcactgttctctttactcacttaaaaaagtgtacagggaacacctgttcctggcataatgctccaacctcgcggaaggggccaggtgcccttcatctggctctggctgcttccgacctgggcccacgtcatcgttcacgtcctctgtgaccaccactggtcacggtgctccctggcccagcctccaacccacccagcaccctggcatctcccaggccagtctgctgcacccagcgagcttccagtcagaagccaggctgaacggccctcctgccccatcagcttcgtgtcttcttttttttaaagaactgaaatagtccccaagaggcctcatggcctgaagactcacaatcatccacctgtaatttatgataaatgtctgggagcatttaccatttgcgtccgtgagtatttatagccctgaatgggcgggggggagggggggtggaggaggccctgcagccaggagctacacacctgtccccactagtgtcccctggttgacagagccccctcagcctccccaaggctgtcactgcggctgtgacagctgaggagtgccgcctttgaaagccagtggacagtcgctccactagggggagaggccctggccctggcgcagaggaggcgttgcgaggcgggacgggggctggaggggctgagcagccttcagggcagggactgggccctgggtcactggagacgttgatattagtccgtctgctgccaaattgctccccaccacatgagccccaggggtttatgtcccaggaaggcgagggtgcccatctgagcggaattgggaggggacggcaccagctcatctccctcagggcctttgcctcctggtgctgccctggtggctgctcctgcaccacagcccctgatggctgctgctagtcctgagttgctgggtttacccccagcccacacttcccacctgggcctgagggtgcggccagtgccctagtcctagccactacaggagtcattctgagacctgctggaggccatggggtcttcccaggcccctcaatcagctgcttccagggtcagcagggcagggtgctgccagtaaggtcctcagggagcacagcccggccgcccaggctgggggatactggggcagagcttccaggtctgtggggcctgatctctccccaaggctctccaggccttggtgcgccctccacagtgaccttcagagaggctgcaccccctcagaagaacagtgagaaatctctccatcacacgctccctggtccttatgtccctgaggccacccttccccaccccccagtgcctggagaagcgtgagactctggaggggcgccaggaggccaggggtcctcagggctaggcctggagctcggcccaagagctgcttttgcgaagcctgtcttgaatccggattcaccagagaacaagagcctcccagcctttggcgtttctgggcctgtaaagatgtgtgtacctcccaggccactctgatgcaagggcagggaccatgccaggcctgggttgggaatggctctgtgactccagaagctccgtctaaaactccaaagatgcccaaaaggctgtgctgctatgtggaatgtgtattatttgtgagcacgatgcggcttcttcctcattttgcagagcaacctaagcgggcagatgtacaaaccgtgtgttcgaaacccctgagtccatgtgtgtgaaaatgcaggttttctcttagaaataaagtggtgacttgtgctgta

SEQ ID NO: 268774 - DNA, 1635 bp, Artificial Sequence
  derived and/or modified sequence
atgagagagagccagcccgaggccgagatccccctgcaggacaccaccgccgaggccttcaccatgctgctgaagtacatctacaccggcagagccaccctgaccgacgagaaggaggaggtgctgctggacttcctgagcctggcccacaagtacggcttccccgagctggaggacagcaccagcgagtacctgtgcaccatcctgaacatccagaacgtgtgcatgaccttcgacgtggccagcctgtacagcctgcccaagctgacctgcatgtgctgcatgttcatggacagaaacgcccaggaggtgctgagcagcgagggcttcctgagcctgagcaagaccgccctgctgaacatcgtgctgagagacagcttcgccgcccccgagaaggacatcttcctggccctgctgaactggtgcaagcacaacagcaaggagaaccacgccgagatcatgcaggccgtgagactgcccctgatgagcctgaccgagctgctgaacgtggtgagacccagcggcctgctgagccccgacgccatcctggacgccatcaaggtgagaagcgagagcagagacatggacctgaactacagaggcatgctgatccccgaggagaacatcgccaccatgaagtacggcgcccaggtggtgaagggcgagctgaagagcgccctgctggacggcgacacccagaactacgacctggaccacggcttcagcagacaccccatcgacgacgactgcagaagcggcatcgagatcaagctgggccagcccagcatcatcaaccacatcagaatcctgctgtgggacagagacagcagaagctacagctacttcatcgaggtgagcatggacgagctggactgggtgagagtgatcgaccacagccagtacctgtgcagaagctggcagaagctgtacttccccgccagagtgtgcagatacatcagaatcgtgggcacccacaacaccgtgaacaagatcttccacatcgtggccttcgagtgcatgttcaccaacaagaccttcaccctggagaagggcctgatcgtgcccatggagaacgtggccaccatcgccgactgcgccagcgtgatcgagggcgtgagcagaagcagaaacgccctgctgaacggcgacaccaagaactacgactgggacagcggctacacctgccaccagctgggcagcggcgccatcgtggtgcagctggcccagccctacatgatcggcagcatcagactgctgctgtgggactgcgacgacagaagctacagctactacgtggaggtgagcaccaaccagcagcagtggaccatggtggccgacagaaccaaggtgagctgcaagagctggcagagcgtgaccttcgagagacagcccgccagcttcatcagaatcgtgggcacccacaacaccgccaacgaggtgttccactgcgtgcacttcgagtgccccgagcagcagagcagccagaaggaggagaacagcgaggagagcggcaccggcgacaccagcctggccggccagcagctggacagccacgccctgagagcccccagcggcagcagcctgcccagcagccccggcagcaacagcagaagccccaacagacagcaccagtag

SEQ ID NO: 268775 - DNA, 1839 bp, Artificial Sequence
  derived and/or modified sequence
atgagcaacagccaccccctgagacccttcaccgccgtgggcgagatcgaccacgtgcacatcctgagcgagcacatcggcgccctgctgatcggcgaggagtacggcgacgtgaccttcgtggtggagaagaagagattccccgcccacagagtgatcctggccgccagatgccagtacttcagagccctgctgtacggcggcatgagagagagccagcccgaggccgagatccccctgcaggacaccaccgccgaggccttcaccatgctgctgaagtacatctacaccggcagagccaccctgaccgacgagaaggaggaggtgctgctggacttcctgagcctggcccacaagtacggcttccccgagctggaggacagcaccagcgagtacctgtgcaccatcctgaacatccagaacgtgtgcatgaccttcgacgtggccagcctgtacagcctgcccaagctgacctgcatgtgctgcatgttcatggacagaaacgcccaggaggtgctgagcagcgagggcttcctgagcctgagcaagaccgccctgctgaacatcgtgctgagagacagcttcgccgcccccgagaaggacatcttcctggccctgctgaactggtgcaagcacaacagcaaggagaaccacgccgagatcatgcaggccgtgagactgcccctgatgagcctgaccgagctgctgaacgtggtgagacccagcggcctgctgagccccgacgccatcctggacgccatcaaggtgagaagcgagagcagagacatggacctgaactacagaggcatgctgatccccgaggagaacatcgccaccatgaagtacggcgcccaggtggtgaagggcgagctgaagagcgccctgctggacggcgacacccagaactacgacctggaccacggcttcagcagacaccccatcgacgacgactgcagaagcggcatcgagatcaagctgggccagcccagcatcatcaaccacatcagaatcctgctgtgggacagagacagcagaagctacagctacttcatcgaggtgagcatggacgagctggactgggtgagagtgatcgaccacagccagtacctgtgcagaagctggcagaagctgtacttccccgccagagtgtgcagatacatcagaatcgtgggcacccacaacaccgtgaacaagatcttccacatcgtggccttcgagtgcatgttcaccaacaagaccttcaccctggagaagggcctgatcgtgcccatggagaacgtggccaccatcgccgactgcgccagcgtgatcgagggcgtgagcagaagcagaaacgccctgctgaacggcgacaccaagaactacgactgggacagcggctacacctgccaccagctgggcagcggcgccatcgtggtgcagctggcccagccctacatgatcggcagcatcagactgctgctgtgggactgcgacgacagaagctacagctactacgtggaggtgagcaccaaccagcagcagtggaccatggtggccgacagaaccaaggtgagctgcaagagctggcagagcgtgaccttcgagagacagcccgccagcttcatcagaatcgtgggcacccacaacaccgccaacgaggtgttccactgcgtgcacttcgagtgccccgagcagcagagcagccagaaggaggagaacagcgaggagagcggcaccggcgacaccagcctggccggccagcagctggacagccacgccctgagagcccccagcggcagcagcctgcccagcagccccggcagcaacagcagaagccccaacagacagcaccagtag

SEQ ID NO: 268776 - DNA, 525 bp, Artificial Sequence
  derived and/or modified sequence
atggccgacgccgccgccaccgccggcgccggcggcagcggcaccagaagcggcagcaagcagagcaccaaccccgccgacaactaccacctggccagaagaagaaccctgcaggtggtggtgagcagcctgctgaccgaggccggcttcgagagcgccgagaaggccagcgtggagaccctgaccgagatgctgcagagctacatcagcgagatcggcagaagcgccaagagctactgcgagcacaccgccagaacccagcccaccctgagcgacatcgtggtgaccctggtggagatgggcttcaacgtggacaccctgcccgcctacgccaagagaagccagagaatggtgatcaccgccccccccgtgaccaaccagcccgtgacccccaaggccctgaccgccggccagaacagaccccaccccccccacatccccagccacttccccgagttccccgacccccacacctacatcaagacccccgtgagcgacgaggccctgggcctgagagtggtgtag

SEQ ID NO: 268777 - DNA, 525 bp, Artificial Sequence
  derived and/or modified sequence
atggcggatgctgccgcaacagcgggcgcgggcgggtccggaactcgctcaggaagcaaacagtccacaaaccccgcagataactatcacctcgccagacgaagaaccttgcaggtcgtggtcagctcactcctgaccgaggccgggttcgagagcgctgagaaggcatcagtcgagactttaaccgaaatgctccagagttatataagtgagattgggcgcagtgcaaagtcatattgcgaacacacagcccgaacacagcccaccttgagtgacattgtggtgacactcgtggagatgggttttaacgtggacacactacccgcctatgccaaaagaagccagcggatggttatcaccgctcccccggttaccaatcagccggtgactcccaaagctctgactgctggacaaaaccggcctcatccaccacacatccccagccactttccggaattcccggatcctcacacttacatcaaaactcctgtctctgacgaggcccttggactgagagttgtttag

SEQ ID NO: 268778 - DNA, 525 bp, Artificial Sequence
  derived and/or modified sequence
atggctgatgctgctgccacagctggggccggcggcagcggcaccaggagcggcagcaagcagagcaccaacccagctgacaactaccacctggcccggcggaggaccctgcaggtggtggtgagcagcctgctgacagaggccggctttgagagcgctgagaaggcctctgtggagaccctgacagagatgctgcagagctacatcagcgagatcggccgcagcgccaagagctactgtgagcacacagcccggacccagcccaccctgagtgacatcgtggtgaccctggtggagatgggcttcaacgtggacaccctgcctgcctatgccaagaggagccagaggatggtgatcacagcccctcctgtgaccaaccagcctgtgacccccaaggccctgacagctggccagaaccggccccaccccccccacatccccagccacttccctgagttcccagacccccacacctacatcaagacccctgtgtctgatgaggccctgggcctgcgggtggtgtag

SEQ ID NO: 268779 - DNA, 525 bp, Artificial Sequence
  derived and/or modified sequence
atggccgacgccgccgccaccgccggcgccggcggcagcggcaccagatccggatctaagcagtctaccaaccctgccgacaactaccacctggctaggaggaggacactccaagttgtggtgtcttcacttttaacggaagcggggttcgagagcgcagaaaaggctagtgttgaaaccctgacggagatgctgcagtcatatatctcggagatcggcaggagtgcaaagtcctattgtgaacacacagccagaacccagcccactctgtcggatatagttgtgaccttggtcgaaatgggtttcaacgtcgacactctgccagcctacgccaaacgcagccagaggatggttatcacagccccccccgtcaccaaccaacccgtgacaccgaaggctctgacagcagggcagaacaggccgcacccgccacatatcccctcccattttccagagttccccgaccctcatacctacatcaaaacaccagtctctgacgaggccctgggactgagggtggtgtag

SEQ ID NO: 268780 - DNA, 525 bp, Artificial Sequence
  derived and/or modified sequence
atggctgacgctgccgctacagctggcgcaggagggagcggaactaggagtggctcaaagcagtccactaaccctgccgataactatcacctggccaggcgcaggaccctgcaggttgtcgtgagctccctcttaactgaagctggcttcgaatctgccgaaaaggcaagtgtcgaaacacttactgaaatgctgcagagttatatcagcgagattgggagatccgctaaaagttactgtgagcatacagctcgaacacagcctacactctctgacatcgtggtcactcttgtagaaatgggtttcaatgtagacactctgccagcatatgctaaacgttcccaacgcatggtcataaccgctcctcctgtaactaaccaacccgtgacacctaaagccctgaccgccggtcagaatagaccacatccccctcatataccttcccattttcccgagtttccggatccacacacatatattaaaacccccgtgtccgatgaggcgctaggactgcgcgttgtgtag

SEQ ID NO: 268781 - DNA, 794 bp, Artificial Sequence
  derived and/or modified sequence
cgcgctcgcgcacactacgccagaacaagatggccgacgcggcggccacagctggggccggtggctccggaacgagatcgggaagtaaacagtccactaaccctgccgataactatcatctggcccggaggagaaccctgcaggtggttgtgagctccttgctgacagaggcagggtttgagagtgccgagaaagcatccgtggaaacgctgacagagatgctgcagagctacatttcagaaattgggagaagtgccaagtcttactgtgagcacacagccaggacccagcccacactgtccgatatcgtggtcacacttgttgagatgggtttcaatgtggacactctccctgcttatgcaaaacggtctcagaggatggtcatcactgctcctccggtgaccaatcagccagtgacccccaaggccctcactgcagggcagaaccgaccccacccgccgcacatccccagccattttcctgagttccctgatccccacacctacatcaaaactccggtgagtgatgaagcactgggactgcgcgtggtgtaaagcacggagtcagttcctactgactgtcacgtggcagagtccagtccaaaagcttgttgatgaaagagtggttcaaaactcagaatgtggccgggcacattggctcacacctgtaatcccagcattttaggaggccgaggcaggaggatcacttgagcctgggagttcaagaccagcctgggcagcagagcaagaccctgtctcatttgaaaaataaataaataaagaaaaaaaaaagaa

SEQ ID NO: 268782 - protein, 161 aa, Artificial Sequence
  derived and/or modified sequence
GRKASEKTGGREGEPADRGLQLGGKAFGLLKAQQEERLDEINKQFLDDPKYSSDEDLPSKLEGFKEKYMEFDLNGNGDIDIMSLKRMLEKLGVPKTHLELKKLIGEVSSGSGETFSYPDFLRMMLGKRSAILKMILMYEEKAREKEKPTGPPAKKAISELP

SEQ ID NO: 268783 - DNA, 486 bp, Artificial Sequence
  derived and/or modified sequence
ggacgcaaggcctcagagaagaccgggggtcgggaaggcgagcctgccgatcgaggcctgcaactaggtgggaaagccttcggacttctcaaagcacaacaggaagaaaggcttgacgagataaacaagcaatttctggacgatcctaaatattcttcagacgaggacttgcctagtaaactggaggggtttaaagaaaaatatatggagttcgacctaaatggaaacggcgatatcgacatcatgtcgctgaaaagaatgcttgaaaaactgggagtgccaaaaacacacctggagctgaagaagctcatcggcgaggtctctagtgggtcaggagagacttttagctaccccgattttttgcgcatgatgttgggcaaacgatccgcaatcctgaagatgatactcatgtatgaggaaaaggcccgggagaaagagaagccaaccggacccccagcgaaaaaagccattagcgagctgccatag

SEQ ID NO: 268784 - DNA, 486 bp, Artificial Sequence
  derived and/or modified sequence
ggtcggaaagcaagtgaaaagacaggaggaagggaaggggaacccgctgataggggccttcaattgggcgggaaggcttttggactgctgaaggctcagcaggaagagcgcctggatgagatcaacaaacaattcctggacgatccaaaatacagctctgacgaagacctaccctctaaattggaagggttcaaagagaagtatatggaatttgacttaaatggcaacggggatatcgatatcatgtccctcaagcgtatgctcgaaaaactcggtgttcccaaaacccatctcgagttaaagaagttgatcggggaggtgtcgtctggaagcggagagacatttagctatccagatttcctgagaatgatgctgggcaagaggagcgctattctgaagatgattctgatgtatgaggagaaagcgagagaaaaggaaaaacctactgggccacccgctaagaaggcaataagtgaactgccctag

SEQ ID NO: 268785 - DNA, 486 bp, Artificial Sequence
  derived and/or modified sequence
ggacgaaaggcctccgagaaaaccgggggcagagaaggggaaccggccgaccggggtctgcagctaggagggaaagcttttggactgttaaaagcacaacaggaagagcgtttggatgagatcaataaacagttccttgacgatccaaaatacagtagcgatgaggatctgccgtctaagctggaggggtttaaagagaagtatatggagttcgatctgaatggcaacggggacattgacatcatgtcgttgaagcgcatgttagagaaactgggtgtgcccaagacccaccttgagttgaagaagcttatcggcgaagtttcatccggaagcggtgaaaccttttcctaccctgactttcttaggatgatgctgggaaagcgatccgcaatacttaaaatgatccttatgtacgaagaaaaagctcgcgagaaagagaagcccacgggtcctcccgccaagaaagccatatccgagctcccatag

SEQ ID NO: 268786 - DNA, 486 bp, Artificial Sequence
  derived and/or modified sequence
ggtcgtaaggcgagcgagaaaactgggggtcgagaaggggagcccgctgaccgaggcctgcagcttggcggaaaggcatttggcttgttaaaggcacagcaggaggagcgactcgacgagataaataagcaattcctggatgatccgaaatattctagtgacgaggacctgccgagtaaactggaggggtttaaggaaaagtacatggagttcgacctcaacggtaatggggacattgacatcatgtccttgaagcggatgctagagaaactcggagtaccaaagacgcacttggaactgaaaaagttaatcggggaagtcagttctgggtctggcgaaacgttctcctaccccgattttctacggatgatgttgggcaagcggagcgccatccttaagatgatactgatgtacgaggaaaaggcccgggaaaaagaaaaacctactggcccccctgcaaagaaagctattagtgaactgccttag

SEQ ID NO: 268787 - DNA, 486 bp, Artificial Sequence
  derived and/or modified sequence
ggtaggaaggccagtgagaaaacgggtggaagggagggtgagccagcagatcgcggactgcagctgggcgggaaggcattcgggctcttaaaggcacaacaagaggaaaggctggatgagattaacaagcagtttttggatgaccccaaatatagttctgacgaggatttaccctctaaactggagggcttcaaggaaaaatacatggagtttgacctgaacgggaatggggacatcgatattatgtcccttaagcggatgctggagaaactaggtgtgccgaagacccacctggagctcaagaaattaatcggcgaggtgtcttcgggcagtggtgaaacattctcatatccagatttcctccgaatgatgcttggcaaaaggagcgccatcctgaaaatgattctgatgtatgaagagaaggctcgagagaaggaaaagcccaccggcccccccgcaaagaaagccatcagcgagttgccatag

SEQ ID NO: 268788 - DNA, 486 bp, Artificial Sequence
  derived and/or modified sequence
ggccggaaagcctccgagaaaaccggcggccgtgagggggaaccggctgataggggtttgcagctgggagggaaggctttcggactgctgaaggcacagcaagaagagcgtttggacgagatcaataaacaatttctagatgaccccaaatatagctccgacgaggacctgccctccaaactggaggggttcaaagaaaagtacatggaattcgacctgaatggcaatggagatatcgatatcatgtctcttaaaaggatgcttgaaaaactcggcgtccctaagacacacctggagctgaagaagctaattggtgaagtgagcagtgggtccggtgagacattctcctatcctgacttcctccgtatgatgctgggtaagcgttccgccattcttaagatgatactcatgtacgaggagaaggcaagggagaaagaaaagccaactggcccgccagcaaaaaaagctatctcagaattgccctag

SEQ ID NO: 268789 - DNA, 486 bp, Artificial Sequence
  derived and/or modified sequence
ggcaggaaggccagcgagaagacaggaggccgggagggggagcctgctgaccggggcctgcagctgggcggcaaggccttcggcctgctgaaggcccagcaggaggagcggctggatgagatcaacaagcagttcctggatgaccccaagtacagcagtgatgaggacctgcccagcaagctggagggcttcaaggagaagtacatggagtttgacctgaatggaaatggagacatcgacatcatgagcctgaagaggatgctggagaagctgggcgtgcccaagacccacctggagctgaagaagctgattggagaggtgagcagcggcagcggggagaccttctcctacccagacttcctgaggatgatgctgggcaagaggtctgccatcctgaagatgatcctgatgtatgaggagaaggcccgggagaaggagaagcccactggacctccagccaagaaggccatcagcgagctgccctag

SEQ ID NO: 268790 - DNA, 607 bp, Artificial Sequence
  derived and/or modified sequence
gggaggaaggcttctgagaagactggtgggagagaaggagagcctgcagacagaggcctccagcttggaggaaaagctttcggactgctgaaggcccagcaggaagagaggctggatgagatcaacaagcaattcctagacgatcccaaatatagcagtgatgaggatctgccctccaaactggaaggcttcaaagagaaatacatggagtttgaccttaatggaaatggcgatattgatatcatgtccctgaaacgaatgctggagaaacttggagtccccaagactcacctagagctaaagaaattaattggagaggtgtccagtggctccggggagacgttcagctaccctgactttctcaggatgatgctgggcaagagatctgccatcctaaaaatgatcctgatgtatgaggaaaaagcgagagaaaaggaaaagccaacaggccccccagccaagaaagctatctctgagttgccctgatttgaagggaaaagggatgatgggattgaaggggcttctaatgacccagatatggaaacagaagacaaaattgtaagccagagtcaacaaattaaataaattaccccctcctccagatcaa

SEQ ID NO: 268791 - DNA, 486 bp, Artificial Sequence
  derived and/or modified sequence
ggccggaaggccagcgagaagaccggcggccgggagggcgagcccgccgatagaggtttacagctgggaggaaaagcttttgggctcttaaaagctcagcaggaggaaaggctggacgaaattaacaagcagtttttggacgacccaaagtacagcagtgacgaagacctaccttctaaactcgaagggtttaaagagaaatatatggagtttgacctgaacggaaatggcgacatagatattatgagcttgaaacggatgctggaaaagcttggggtacctaaaacacacctcgagctaaagaaactgattggagaagtctcgagcggctccggagagacattctcctatcccgactttctgagaatgatgcttgggaagcgtagtgccatcctgaagatgattttgatgtacgaggagaaagcccgtgagaaagagaagccaacaggaccccccgccaagaaggctatctccgagctgccgtag

SEQ ID NO: 268792 - DNA, 486 bp, Artificial Sequence
  derived and/or modified sequence
ggccggaaggccagcgagaagaccggcggccgggagggcgagcccgcggacagaggtttgcagctaggaggcaaggccttcggactgctgaaagcacaacaggaagaacgccttgacgagatcaacaagcagtttcttgatgaccctaagtacagttcggacgaagacctgccaagtaagttggaaggcttcaaggaaaagtatatggagtttgatctcaacggcaacggcgacatcgatatcatgtcactgaagcggatgctggagaaactgggagtcccgaaaactcacttagagctcaagaagctgatcggcgaagtgtcttccggtagcggagaaacctttagctacccggacttcctgaggatgatgctcggcaagcggagcgcaattcttaaaatgatcctcatgtacgaagagaaagcacgcgagaaagaaaagcctactgggccacccgccaaaaaggccattagcgagctgccatag

SEQ ID NO: 268793 - DNA, 486 bp, Artificial Sequence
  derived and/or modified sequence
ggccggaaggccagcgagaagaccggcggccgggagggcgagcccgccgaccgcggactgcagctgggcggtaaggcctttggacttcttaaggctcaacaagaagaacgattggatgaaattaacaagcagtttctggacgaccctaagtatagtagtgacgaggacctcccatccaagcttgagggtttcaaggaaaagtatatggaatttgatctgaacggtaacggagacatcgacatcatgtctctcaagcgcatgctggagaagctgggtgtccccaagacgcacctggaactgaagaaactcattggtgaggtatcttctggctccggcgagaccttttcataccccgattttctaagaatgatgctcgggaagcggtccgccattctgaagatgatacttatgtacgaagaaaaggccagagaaaaagaaaaacccaccgggccacctgcaaagaaggccatttctgagctgccatag

SEQ ID NO: 268794 - DNA, 486 bp, Artificial Sequence
  derived and/or modified sequence
ggccggaaggccagcgagaagaccggcggccgggagggcgagcccgccgacagaggactccagctcggcggcaaggcattcggacttctcaaagcgcagcaggaggagcgtcttgatgagataaacaaacaatttttagacgatccaaaatattcgagcgatgaggacttgcctagtaagctggagggcttcaaggagaagtacatggaattcgatctaaacggcaatggggacatcgatattatgtcactgaaacgcatgctcgagaaattgggtgttccaaaaacccaccttgaattaaaaaaactgattggtgaggtctcctctggcagcggcgagacttttagttatcctgattttctcaggatgatgctcggaaaaagaagcgccattcttaagatgattctgatgtacgaggaaaaagcaagagaaaaggagaagccaactggcccccccgcgaaaaaggcaatcagcgaattaccatag

SEQ ID NO: 268795 - DNA, 486 bp, Artificial Sequence
  derived and/or modified sequence
ggccggaaggccagcgagaagaccggcggccgggagggcgagcccgccgaccgcggcttacaattgggcggaaaagccttcggtctgctgaaagcccagcaggaagaaagacttgatgagatcaacaagcagttcctggatgatccgaaatatagttcggacgaagacctgccgtccaagctggaggggttcaaggagaagtacatggaattcgatctcaatgggaatggggacattgacattatgagtttgaagcgcatgctggaaaaactcggcgtaccaaagactcatcttgaacttaaaaaactgatcggggaagtctcgtcgggatcaggggaaactttctcatacccagatttcctgagaatgatgctgggtaaacgcagcgccatccttaagatgattctcatgtatgaagagaaagcccgtgagaaagagaaacctacaggtccgcccgctaaaaaggcaatttctgagctcccatag

SEQ ID NO: 268796 - DNA, 486 bp, Artificial Sequence
  derived and/or modified sequence
ggccggaaggccagcgagaagaccggcggccgggagggcgagcccgctgaccgcggactgcagctgggaggtaaggcatttggattacttaaagcacagcaagaagaacgtttggatgagatcaacaaacagttcctagatgaccccaagtacagcagtgatgaagatctgcctagcaagttagaaggattcaaagagaaatacatggagttcgacctaaatggcaacggtgatatcgatattatgtccttgaaacgtatgcttgagaagctcggtgtgcctaaaacccatttggaactgaaaaagctgatcggggaggtgagctctgggtccggcgagacattttcctaccccgatttcctgagaatgatgctgggcaaacgcagcgcaatacttaagatgatcttaatgtacgaggaaaaggccagagaaaaggagaagccaacgggtccaccagccaagaaggctatctccgaactgccatag

SEQ ID NO: 268797 - DNA, 486 bp, Artificial Sequence
  derived and/or modified sequence
ggaaggaaggcctccgagaaaacaggaggcagggagggggagcctgccgaccggggattgcagctgggaggtaaggcctttgggctactgaaagcccagcaggaggagcgattggatgaaatcaacaagcaattcctagatgaccctaagtactctagtgatgaagatctgcccagcaagctggaaggtttcaaggagaagtatatggaattcgatctgaatgggaacggtgatattgatatcatgagcctcaaaagaatgctcgagaagctgggggtgcccaagacccacctcgagctcaaaaagctaattggcgaggtctcgagcggctcaggcgagactttttcatacccggattttctgaggatgatgttgggcaagagatccgctattcttaagatgattctaatgtacgaggagaaagcaagagaaaaagagaagccaacaggacctcctgctaaaaaggctatatctgagctaccctag

SEQ ID NO: 268798 - DNA, 486 bp, Artificial Sequence
  derived and/or modified sequence
ggacgaaaagcgagcgagaagacaggtggaagggagggcgagccggctgaccgcggactgcagctcggcggaaaggcgttcggtctgctgaaagcacaacaagaagaacgccttgatgaaataaacaagcaattcctcgatgatcccaagtattcgagcgatgaagacctgccttcaaaactggaggggttcaaggagaaatatatggagtttgacctaaacggaaatggcgacatcgatattatgtcacttaagagaatgctggaaaaactcggggttccgaagactcacctcgaactgaagaaactgataggggaagtgtcctcaggctctggggagacgttttcgtacccggatttcctgaggatgatgctaggaaaacgaagtgccatcctgaagatgatactaatgtatgaggagaaagccagggagaaagagaagcccacaggccctcctgccaagaaggcaatctcagaactcccttag

SEQ ID NO: 268799 - DNA, 486 bp, Artificial Sequence
  derived and/or modified sequence
gggagaaaggcctcagaaaaaactgggggaagggagggcgaaccagcggatagagggctacagctaggaggtaaggccttcgggctacttaaggcccagcaggaagagagattggacgagattaataaacagttcctagacgaccccaagtatagctccgacgaggacctccccagcaaactagaggggtttaaggagaagtatatggagttcgacttgaacgggaacggagatatagatatcatgtcgctgaaaaggatgctcgaaaaactgggcgttcctaaaactcacctcgagctaaagaaacttattggagaggtgtcctcgggaagcggcgagaccttctcttatcctgatttcctgcggatgatgctgggcaagcgctctgcaatcctcaagatgatcttgatgtacgaggagaaagcacgcgagaaggagaagccaactggtcctccagcaaagaaagcaatcagtgaactgccctag

SEQ ID NO: 268800 - DNA, 486 bp, Artificial Sequence
  derived and/or modified sequence
ggtcgtaaagcctctgagaagacgggcggacgggaaggggaaccggctgacaggggattacaactgggcggtaaggctttcgggctcctaaaggcccagcaggaggaaagattggacgaaattaacaagcagtttctcgatgaccctaagtactcaagtgatgaagaccttcctagtaagctggaaggttttaaggagaagtacatggaattcgacctgaacggaaacggcgatattgatatcatgtccctgaagaggatgctggagaaattaggcgtgcctaagacccacctggagctcaagaaactgatcggagaggtgtctagcggaagcggtgagactttctcgtaccctgacttcctgcgcatgatgctgggcaagcgctccgcaatattgaagatgatcctgatgtacgaagaaaaagcacgcgaaaaggaaaagccgaccggcccaccagccaagaaagccatctccgagttaccctag

SEQ ID NO: 268801 - DNA, 486 bp, Artificial Sequence
  derived and/or modified sequence
gggaggaaggcctctgagaagactgggggtagggagggtgagccggctgaccgtggactccaattgggcggtaaagccttcgggctgttgaaggcccagcaggaggaaagattggacgaaatcaataaacagtttttggatgaccctaagtattcatctgacgaagaccttccctccaagctggagggttttaaggagaaatatatggaattcgacttaaatggcaacggggacattgacattatgtcattaaagagaatgttggaaaagctgggggttcccaaaacccatctggagctcaagaagctgattggcgaagtcagttctggaagtggtgagacattctcttatcctgacttcctccgaatgatgctaggaaaacgcagtgcaattctaaagatgattctgatgtatgaggaaaaagctcgagaaaaagagaaacctactggccctcccgctaagaaggctatcagcgagctgccctag

SEQ ID NO: 268802 - DNA, 486 bp, Artificial Sequence
  derived and/or modified sequence
ggaagaaaggcttctgagaagaccgggggacgtgagggcgagccggctgatagaggactgcagcttggcggtaaggcatttggcttgctcaaggcacagcaggaggagcgattagacgaaatcaacaaacagtttctggacgatcccaagtactcttctgacgaagacttgccaagtaagctggaaggatttaaggagaaatacatggagtttgacctaaacggaaacggcgatatcgatatcatgagtctcaaacggatgctggagaagctgggggtgccaaagacccatcttgagcttaaaaagctaataggtgaggtcagtagcggcagcggagagacattctcttatcccgatttcctcagaatgatgcttggcaagcggagcgccatcctgaaaatgatattaatgtatgaggagaaagcacgcgagaaagaaaagccgactggcccacctgctaagaaagccattagcgaacttccgtag

SEQ ID NO: 268803 - DNA, 486 bp, Artificial Sequence
  derived and/or modified sequence
ggcagaaaggccagcgagaagaccggcggcagagagggcgagcccgccgacagaggcctgcagctgggcggcaaggccttcggcctgctgaaggcccagcaggaggagagactggacgagatcaacaagcagttcctggacgaccccaagtacagcagcgacgaggacctgcccagcaagctggagggcttcaaggagaagtacatggagttcgacctgaacggcaacggcgacatcgacatcatgagcctgaagagaatgctggagaagctgggcgtgcccaagacccacctggagctgaagaagctgatcggcgaggtgagcagcggcagcggcgagaccttcagctaccccgacttcctgagaatgatgctgggcaagagaagcgccatcctgaagatgatcctgatgtacgaggagaaggccagagagaaggagaagcccaccggcccccccgccaagaaggccatcagcgagctgccctag

SEQ ID NO: 268804 - protein, 770 aa, Artificial Sequence
  derived and/or modified sequence
MVDPLEATVSCSGSHHIKCCIEEDGDYKVTFHTGSSSLPAAKEVNKKQVCYKHNFNASSVSWCSKTVDVCCHFTNAANNSVWSPSMKLNLVPGENITCQDPVIGVGEPGKVIQKLCRFSNVPSSPESPIGGTITYKCVGSQWEEKRNDCISAPINSLLQMAKALIKSPSQDEMLPTYLKDLSISIDKAEHEISSSPGSLGAIINILDLLSTVPTQVNSEMMTHVLSTVNVILGKPVLNTWKVLQQQWTNQSSQLLHSVERFSQALQSGDSPPLSFSQTNVQMSSMVIKSSHPETYQQRFVFPYFDLWGNVVIDKSYLENLQSDSSIVTMAFPTLQAILAQDIQENNFAESLVMTTTVSHNTTMPFRISMTFKNNSPSGGETKCVFWNFRLANNTGGWDSSGCYVEEGDGDNVTCICDHLTSFSILMSPDSPDPSSLLGILLDIISYVGVGFSILSLAACLVVEAVVWKSVTKNRTSYMRHTCIVNIAASLLVANTWFIVVAAIQDNRYILCKTACVAATFFIHFFYLSVFFWMLTLGLMLFYRLVFILHETSRSTQKAIAFCLGYGCPLAISVITLGATQPREVYTRKNVCWLNWEDTKALLAFAIPALIIVVVNITITIVVITKILRPSIGDKPCKQEKSSLFQISKSIGVLTPLLGLTWGFGLTTVFPGTNLVFHIIFAILNVFQGLFILLFGCLWDLKVQEALLNKFSLSRWSSQHSKSTSLGSSTPVFSMSSPISRRFNNLFGKTAAPKIPPGHDGNLVSGGSSAI

SEQ ID NO: 268805 - protein, 270 aa, Artificial Sequence
  derived and/or modified sequence
MHGSCSFLMLLLPLLLLLVATTGPVGALTDEEKRLMVELHNLYRAQVSPTASDMLHMRWDEELAAFAKAYARQCVWGHNKERGRRGENLFAITDEGMDVPLAMEEWHHEREHYNLSAATCSPGQMCGHYTQVVWAKTERIGCGSHFCEKLQGVEETNIELLVCNYEPPGNVKGKRPYQEGTPCSQCPSGYHCKNSLCEPIGSPEDAQDLPYLVTEAPSFRATEASDSRKMGAEGPDKPSVVSGLNSGPGHVWGPLLGLLLLPPLVLAGIF

SEQ ID NO: 268806 - DNA, 813 bp, Artificial Sequence
  derived and/or modified sequence
atgcacgggagttgctcatttctgatgctgcttctgcctttgcttctcctgcttgttgcaacaaccgggccagtcggggcactcacagatgaggaaaaacgcttgatggttgagctacacaacctctacagagctcaggtgagccctaccgccagtgacatgcttcatatgcggtgggacgaagaactcgcagcctttgctaaggcctatgccagacaatgcgtgtgggggcacaataaggagcgtggtagacgcggtgagaatttgtttgcaataactgacgaagggatggatgtccctctagctatggaggagtggcaccacgagcgcgagcactataacctgagcgcggcaacctgctcaccaggacagatgtgcggtcactatacccaagtcgtgtgggccaagaccgagaggatcggctgtgggtcccacttctgtgagaagttacagggcgtcgaggaaacgaatattgaattgctggtatgcaactacgagcctcctggtaatgtgaagggcaagagaccgtaccaagagggtactccgtgttctcagtgtccgtcagggtatcattgtaaaaacagcctgtgcgagcccatagggtcccccgaggatgcacaggatctcccgtacctggtgacagaggccccatcattccgagcaaccgaagccagcgacagccgcaaaatgggagcagaggggcctgataagcccagcgtagtatctggtttgaactccggcccaggccacgtatgggggccactgcttggcctcctcttgctaccccctctcgtgctggctggcatcttctag

SEQ ID NO: 268807 - DNA, 813 bp, Artificial Sequence
  derived and/or modified sequence
atgcacggctcatgttcattcttaatgcttctactcccgttactcctcctactggtcgccaccaccggtccagtaggggctctgactgatgaagaaaaacggctgatggttgaactgcataatctctaccgcgcacaagtgtctccaaccgcttcagacatgctgcacatgagatgggacgaagaactggccgccttcgcaaaggcatacgcaagacaatgcgtctggggacacaataaagaacgaggcaggagaggcgagaatctgtttgccatcactgacgaaggcatggatgtgccccttgccatggaagaatggcaccatgaaagagaacattacaatctgtccgccgccacatgcagcccaggccagatgtgcggtcactatacccaggtggtttgggcaaagaccgaacgtatcggctgtgggtctcatttctgcgaaaaactacaaggtgtagaagagaccaatattgaattgcttgtatgtaattatgagccacccgggaacgtgaaaggcaaaaggccataccaagagggcactccttgcagccaatgcccttcaggctaccattgcaagaacagtctctgtgagcctattggatccccagaagacgcccaagacctgccttaccttgttactgaagccccatcctttcgcgccactgaagcctctgactcccgtaagatgggagcggagggtcctgacaagcccagtgtggtgtctggactcaattcaggtcctggacacgtgtgggggccccttctcggtttactcctccttcctccactggtgctagctggcatattctag

SEQ ID NO: 268808 - DNA, 813 bp, Artificial Sequence
  derived and/or modified sequence
atgcacggctcatgttcattcttaatgcttctactcccgttactcctcctactggtcgccaccaccggtccagtaggggctctgactgatgaagaaaaacggctgatggttgaactgcataatctctaccgcgcacaagtgtctccaaccgcttcagacatgctgcacatgagatgggacgaagaactggccgccttcgcaaaggcatacgcaagacaatgcgtctggggacacaataaagaacgaggcaggagaggcgagaatctgtttgccatcactgacgaaggcatggatgtgcccctggctatggaagagtggcaccacgaaagagaacattataatttatcagcggctacgtgttctcctggtcaaatgtgtggtcactacacccaggttgtatgggctaagacagagcgcatcgggtgtggatcccatttttgtgaaaagcttcagggagtcgaggagaccaatattgaactgctggtgtgtaactatgaaccaccaggaaatgtaaagggcaagcgtccctatcaggaaggtaccccatgctcacaatgcccaagcggctatcactgcaagaattcactttgtgagcctattggatccccagaagacgcccaagacctgccttaccttgttactgaagccccatcctttcgcgccactgaagcctctgactcccgtaagatgggagcggagggtcctgacaagcccagtgtggtgtctggactcaattcaggtcctggacacgtgtgggggccccttctcggtttactcctccttcctccactggtgctagctggcatattctag

SEQ ID NO: 268809 - DNA, 3531 bp, Artificial Sequence
  derived and/or modified sequence
agtggagatggagtttcaccatgttggccaggctggtctcaaactcctgacctcaggtgatccacctgcctcggcctcccaaagtgctgggattacagctatgcctggctaatttttttttttttttacttttttatttttatttttttgaaacggagtttcactcttgtcacccaggctggagtgcagtggcgcgatctcggctcactaaaccccatctctactaaaaatacaaaaatttgccgggcatggtagcagctatggtgggcagcatggtgggcaagtagtcccagctacttgggaggctgaggcaggagaatcacttgaacccaggaggcagaggttgcagtgagccaagatcatgccactgcactccagcctgggtgacagagcgagactccatctcaaaaaaaaaaaaaaagtttattggtaagaattttattctttttattctttttcattgcttttataaatgaaattgttttcttaatttcctttttggatttttcattattagtgtatagaaacaactaatttctatgtgttaattttgtatcctgcaactttgctgactttattaattctaataagtgtgtgtgtgtgtgtatgtgtgtgtaatccatcttggttttgtttttatttttacttggagactcaggcagggacaggttttcttgtcatcttccaaagcctgtgggtagactttttctaggtccctattcattgaagaagcaggcttcaaggatcccagctgtcctcaagagtactggttccagcttcctgcttcatgaaccggtcatggcccctgcaaggtcaaggtcattataatgccagcacctgactgctaaggctatttcccttccaataccttcccctcagagctcctggtgcatcagctcattcaaccttctgcttttctgctctctcttgatttaagaaacagacacattatatttctacatagttagagcacaggggtcccagcatcccacttccaaatgagcatgtcaagcacatgcattcagagaggatacctggaagccaaaattttgccatagtgaaaggccttattcctgaatacagctagagtggggaagaccttggcctctccccccgcaggcaagaatgttgcctccacagggggctggtagcctgctaaggcccaggccacatgagtgggttgtctactgttactgagggcctactatgtgccagacaccatactaggtgctttacatacattatatgtcattgaatcttccctctagtcctgtgagataggtactattattgtcactgattcacttgagaaagctgccaaaacacagatagcaaggggcagaaccaggattctgatttaggttggctcagccttttatcaaatacatctggtcttcctctgtcctttcaaaagcctatagcttcctcatcttgcccactcctctgtgggtagggtctgtggtttcctttctcttatctatcttcaacacacagtgggtgtgacctgggtgcaaccagtcacagctctgcagaggttactgtgattttgcccctgaaggatctgtccacaacttaggaactcacacagcttttggcctgagcccccgttaccaagagaaaggaggtttttgccaaggactccaaggggagtgcacttgatgctggtcgggacccaaagcgcccagccctccctgagacattgtgtgagtcgggctgggcctcaaacacggcccccactgccccaccccagccagggtggtgcttgtgtgggaaggactttaaatccagctgccagacccctggacgggagaaggagagacggctggccaccatgcacggctcctgcagtttcctgatgcttctgctgccgctactgctactgctggtggccaccacaggccccgttggagccctcacagatgaggagaaacgtttgatggtggagctgcacaacctctaccgggcccaggtatccccgacggcctcagacatgctgcacatgagatgggacgaggagctggccgccttcgccaaggcctacgcacggcagtgcgtgtggggccacaacaaggagcgcgggcgccgcggcgagaatctgttcgccatcacagacgagggcatggacgtgccgctggccatggaggagtggcaccacgagcgtgagcactacaacctcagcgccgccacctgcagcccaggccagatgtgcggccactacacgcaggtggtatgggccaagacagagaggatcggctgtggttcccacttctgtgagaagctccagggtgttgaggagaccaacatcgaattactggtgtgcaactatgagcctccggggaacgtgaaggggaaacggccctaccaggaggggactccgtgctcccaatgtccctctggctaccactgcaagaactccctctgtgaacccatcggaagcccggaagatgctcaggatttgccttacctggtaactgaggccccatccttccgggcgactgaagcatcagactctaggaaaatgggtgcagagggccctgacaagcctagcgtcgtgtcagggctgaactcgggccctggtcatgtgtggggccctctcctgggactactgctcctgcctcctctggtgttggctggaatcttctgaaggggataccactcaaaggcaaggcctggtgaggggggccctggcctcatacccacctggattgtcttcctccaagtgagagaccacagcttcctgggcaggtcctgctctgtggcccagcagccccccttcaccccaacttctggccagattccaggccagcactcttgtcctcctgggaggcgtctacagggccagcccctggcactgccccaggagtgccttggctctgggtaggcccatccttcagctggctgcagactgttctgagcggtatttacatgtgcccactctcaggttgtcctgtggccatcagcttctctcccagacagaggatctcaggcttcccaggaacccccgggcccctcccagtcccctggcctcttccttgagccatctgagtccaggactgttccccagaagtgcctcttgccttctcagggtgaagaggtcagctgtcctcctgtcatcttccccaccctgtccccagcccctaaacaagatacttcttggttaaggccctccggaagggaaaggctacggggcatgtgcctcatcacaccatccatcctggaggcacaaggcctggctggctgcgagctcaggaggccgcctgaggactgcacaccgggcccacacctctcctgcccctccctcctgagtcctgggggtgggaggatttgagggagctcactgcctacctggcctggggctgtctgcccacacagcatgtgcgctctccctgagtgcctgtgtagctggggatggggattcctaggggcagatgaaggacaagccccactggagtggggttctttgagtgggggaggcagggacgagggaaggaaagtaactcctgactctccaataaaaacctgtccaacctg

SEQ ID NO: 268810 - DNA, 813 bp, Artificial Sequence
  derived and/or modified sequence
atgcacggcagctgcagcttcctgatgctgctgctgcccctgctgctgctgctggtggccaccaccggccccgtgggcgccctgaccgacgaggagaagagactgatggtggagctgcacaacctgtacagagcccaggtgagccccaccgccagcgacatgctgcacatgagatgggacgaggagctggccgccttcgccaaggcctacgccagacagtgcgtgtggggccacaacaaggagagaggcagaagaggcgagaacctgttcgccatcaccgacgagggcatggacgtgcccctggccatggaggagtggcaccacgagagagagcactacaacctgagcgccgccacctgcagccccggccagatgtgcggccactacacccaggtggtgtgggccaagaccgagagaatcggctgcggcagccacttctgcgagaagctgcagggcgtggaggagaccaacatcgagctgctggtgtgcaactacgagccccccggcaacgtgaagggcaagagaccctaccaggagggcaccccctgcagccagtgccccagcggctaccactgcaagaacagcctgtgcgagcccatcggcagccccgaggacgcccaggacctgccctacctggtgaccgaggcccccagcttcagagccaccgaggccagcgacagcagaaagatgggcgccgagggccccgacaagcccagcgtggtgagcggcctgaacagcggccccggccacgtgtggggccccctgctgggcctgctgctgctgccccccctggtgctggccggcatcttctag

SEQ ID NO: 268811 - DNA, 813 bp, Artificial Sequence
  derived and/or modified sequence
atgcacggttcatgtagtttcctgatgttgctactgcctctcctccttttactagtggcaacaacagggccggtcggagccttgacagatgaggaaaaacgcctgatggtggagctccacaacttgtaccgcgcacaagtgagccccacagcctcagacatgcttcacatgaggtgggacgaggaattagctgcctttgctaaggcctatgcaaggcagtgcgtctggggccataacaaggagaggggtcgccggggtgagaacctgttcgcaattactgatgagggcatggatgtgcccctggctatggaagagtggcaccacgaacgggaacattacaatctctctgcagcaacatgttctccaggccaaatgtgtggccactacactcaagtggtatgggccaagacggagcgaatcggttgcgggtcccacttctgtgagaagctgcagggtgtggaggagaccaacattgagctactggtgtgcaattatgagcctcccggaaacgtgaaagggaagcgcccttaccaggaaggcaccccttgctcgcaatgtcccagtggctaccattgtaagaatagtctgtgtgagcctattggtagccccgaagatgctcaggacctgccctacttggtcacagaagctccctctttcagggccaccgaggccagcgatagccgtaaaatgggggccgagggaccagataaaccgtccgttgtgagcgggctgaatagcggccccggccacgtctgggggccgctactcggcctcctcttactcccgccgttggtactcgcaggcatcttttag

SEQ ID NO: 268812 - DNA, 813 bp, Artificial Sequence
  derived and/or modified sequence
atgcacggcagctgcagcttcctgatgctgctgctgcccctgctgctgctgctggtggccaccaccggccctgtgggcgccctgacagatgaggagaagaggctgatggtggagctgcacaacctgtaccgggcccaggtgagccccacagccagtgacatgctgcacatgcgctgggatgaggagctggccgcctttgccaaggcctatgcccggcagtgtgtgtggggccacaacaaggagcggggcagaagaggagagaacctgtttgccatcacagatgagggcatggatgtgcccctggccatggaggagtggcaccacgagcgggagcactacaacctgtctgctgccacctgcagccctggccagatgtgtggccactacacccaggtggtgtgggccaagacagagcgcatcggctgcggcagccacttctgtgagaagctgcagggcgtggaggagaccaacatcgagctgctggtgtgcaactatgagcccccaggaaatgtgaagggcaagaggccctaccaggagggcaccccctgcagccagtgccccagcggctaccactgcaagaacagcctgtgtgagcccatcggcagcccagaagatgcccaggacctgccctacctggtgacagaggcccccagcttccgggccacagaggccagtgacagcaggaagatgggcgctgagggccctgacaagcccagcgtggtgtctggcctgaacagcggccctggccacgtgtggggccccctgctgggcctgctgctgctgccccccctggtgctggccggcatcttctag

SEQ ID NO: 268813 - DNA, 813 bp, Artificial Sequence
  derived and/or modified sequence
atgcacggcagctgcagcttcctgatgctgctgctgcccctgctgttgttgttagtcgcaaccactgggccagttggcgcactgacagacgaagaaaagcggctgatggtggaattacacaatctgtatagggcccaggtgtccccaaccgcgtccgatatgctccatatgaggtgggacgaggagctcgctgcatttgctaaggcttacgcccgccagtgtgtctggggacataataaggagcggggccggcgaggcgagaacttattcgctatcactgacgaggggatggatgtgcctctcgcgatggaggaatggcatcatgagcgagagcactataacctttctgcagctacatgcagtcctggacagatgtgtgggcattatactcaagtcgtgtgggctaagactgaaagaataggatgcggctctcacttttgcgagaagttacaaggggtggaagagactaatattgagctcctggtgtgcaattatgaacctccgggcaatgtgaagggaaaaaggccttaccaggaaggcaccccatgcagccagtgtccaagcggatatcattgcaaaaattccctctgtgaacccatcggaagccctgaggacgcccaggacctgccgtacctagtgacagaagcacccagtttccgtgctaccgaagcatcagattctcgcaagatgggagctgaaggaccggataaaccctccgtcgtaagtggactcaactcaggccctgggcatgtatggggccctctgctggggctcttactgctaccgccgttggtcctggccggcatcttttag

SEQ ID NO: 268814 - RNA, 813 nt, Artificial Sequence
  derived and/or modified sequence
augcacggcucauguucauucuuaaugcuucuacucccguuacuccuccuacuggucgccaccaccgguccaguaggggcucugacugaugaagaaaaacggcugaugguugaacugcauaaucucuaccgcgcacaagugucuccaaccgcuucagacaugcugcacaugagaugggacgaagaacuggccgccuucgcaaaggcauacgcaagacaaugcgucuggggacacaauaaagaacgaggcaggagaggcgagaaucuguuugccaucacugacgaaggcauggaugugccccuugccauggaagaauggcaccaugaaagagaacauuacaaucuguccgccgccacaugcagcccaggccagaugugcggucacuauacccaggugguuugggcaaagaccgaacguaucggcugugggucucauuucugcgaaaaacuacaagguguagaagagaccaauauugaauugcuuguauguaauuaugagccacccgggaacgugaaaggcaaaaggccauaccaagagggcacuccuugcagccaaugcccuucaggcuaccauugcaagaacagucucugugagccuauuggauccccagaagacgcccaagaccugccuuaccuuguuacugaagccccauccuuucgcgccacugaagccucugacucccguaagaugggagcggaggguccugacaagcccaguguggugucuggacucaauucagguccuggacacgugugggggccccuucucgguuuacuccuccuuccuccacuggugcuagcuggcauauucuag

SEQ ID NO: 268815 - RNA, 813 nt, Artificial Sequence
  derived and/or modified sequence
augcacggcucauguucauucuuaaugcuucuacucccguuacuccuccuacuggucgccaccaccgguccaguaggggcucugacugaugaagaaaaacggcugaugguugaacugcauaaucucuaccgcgcacaagugucuccaaccgcuucagacaugcugcacaugagaugggacgaagaacuggccgccuucgcaaaggcauacgcaagacaaugcgucuggggacacaauaaagaacgaggcaggagaggcgagaaucuguuugccaucacugacgaaggcauggaugugccccuggcuauggaagaguggcaccacgaaagagaacauuauaauuuaucagcggcuacguguucuccuggucaaauguguggucacuacacccagguuguaugggcuaagacagagcgcaucggguguggaucccauuuuugugaaaagcuucagggagucgaggagaccaauauugaacugcugguguguaacuaugaaccaccaggaaauguaaagggcaagcgucccuaucaggaagguaccccaugcucacaaugcccaagcggcuaucacugcaagaauucacuuugugagccuauuggauccccagaagacgcccaagaccugccuuaccuuguuacugaagccccauccuuucgcgccacugaagccucugacucccguaagaugggagcggaggguccugacaagcccaguguggugucuggacucaauucagguccuggacacgugugggggccccuucucgguuuacuccuccuuccuccacuggugcuagcuggcauauucuag

SEQ ID NO: 268816 - DNA, 423 bp, Artificial Sequence
  derived and/or modified sequence
atgtacctgcagggccccagaaagctgatgacccagggcggctacgacatggtgcagaagctgttcctggacttcttcagaagaagactgagccagagacccaccgccgaggagctggagcagagaaacatcctgaagcccagaaacgagcaggaggagcaggaggagaagagagagatcaagagaagactgaccagaaagctgagccagagacccaccgtggaggagctgagagagagaaagatcctgatcagattcagcgactacgtggaggtggccgacgcccaggactacgacagaagagccgacaagccctggaccagactgaccgccgccgacaaggtgagcagaggcgagtgctggagagtgggcggcagaaccgtgtgctgggtgagcctgggcagccccctgggcagcgtgtag

SEQ ID NO: 268817 - DNA, 435 bp, Artificial Sequence
  derived and/or modified sequence
atgtacctgcagggccccagaaagctgatgacccagggcggctacgacatggtgcagaagctgttcctggacttcttcagaagaagactgagccagagacccaccgccgaggagctggagcagagaaacatcctgaagcccagaaacgagcaggaggagcaggaggagaagagagagatcaagagaagactgaccagaaagctgagccagagacccaccgtggaggagctgagagagagaaagatcctgatcagattcagcgactacgtggaggtggccgacgcccaggactacgacagaagagccgacaagccctggaccagactgaccgccgccgacaaggccgccatcagaaaggagctgaacgagttcaagagcaccgagatggaggtgcacgagctgagcagacacctgaccagattccacagaccctag

SEQ ID NO: 268818 - DNA, 1248 bp, Artificial Sequence
  derived and/or modified sequence
tgaggcgagctgagcatcagcaacgaggaggacagcctggagaacggccagagcctgagcagcagccagctgagcctgcccgccctgagcgagatggagcccgtgcccatgcccagagacccctgcagctacgaggtgctgcagcccagcgacatcatggacggccccgaccccggcgcccccgtgaagctgccctgcctgcccgtgaagctgagcccccccctgccccccaagaaggtgatgatctgcatgcccgtgggcggccccgacctgagcctggtgagctacaccgcccagaagagcggccagcagggcgtggcccagcaccaccacaccgtgctgcccagccagatccagcaccagctgcagtacggcagccacggccagcacctgcccagcaccaccggcagcctgcccatgcaccccagcggctgcagaatgatcgacgagctgaacaagaccctggccatgaccatgcagagactggagagcagcgagcagagagtgccctgcagcaccagctaccacagcagcggcctgcacagcggcgacggcgtgaccaaggccggccccatgggcctgcccgagatcagacaggtgcccaccgtggtgatcgagtgcgacgacaacaaggagaacgtgccccacgagagcgactacgaggacagcagctgcctgtacaccagagaggaggaggaggaggaggaggacgaggacgacgacagcagcctgtacaccagcagcctggccatgaaggtgtgcagaaaggacagcctggccatcaagctgagcaacagacccagcaagagagagctggaggagaagaacatcctgcccagacagaccgacgaggagagactggagctgagacagcagatcggcaccaagctgaccagaagactgagccagagacccaccgccgaggagctggagcagagaaacatcctgaagcccagaaacgagcaggaggagcaggaggagaagagagagatcaagagaagactgaccagaaagctgagccagagacccaccgtggaggagctgagagagagaaagatcctgatcagattcagcgactacgtggaggtggccgacgcccaggactacgacagaagagccgacaagccctggaccagactgaccgccgccgacaaggccgccatcagaaaggagctgaacgagttcaagagcaccgagatggaggtgcacgagctgagcagacacctgaccagattccacagaccctag

SEQ ID NO: 268819 - DNA, 1308 bp, Artificial Sequence
  derived and/or modified sequence
atgagacagagcagagaggagctgatcaagagaggcgtgctgaaggagatctacgacaaggacggcgagctgagcatcagcaacgaggaggacagcctggagaacggccagagcctgagcagcagccagctgagcctgcccgccctgagcgagatggagcccgtgcccatgcccagagacccctgcagctacgaggtgctgcagcccagcgacatcatggacggccccgaccccggcgcccccgtgaagctgccctgcctgcccgtgaagctgagcccccccctgccccccaagaaggtgatgatctgcatgcccgtgggcggccccgacctgagcctggtgagctacaccgcccagaagagcggccagcagggcgtggcccagcaccaccacaccgtgctgcccagccagatccagcaccagctgcagtacggcagccacggccagcacctgcccagcaccaccggcagcctgcccatgcaccccagcggctgcagaatgatcgacgagctgaacaagaccctggccatgaccatgcagagactggagagcagcgagcagagagtgccctgcagcaccagctaccacagcagcggcctgcacagcggcgacggcgtgaccaaggccggccccatgggcctgcccgagatcagacaggtgcccaccgtggtgatcgagtgcgacgacaacaaggagaacgtgccccacgagagcgactacgaggacagcagctgcctgtacaccagagaggaggaggaggaggaggaggacgaggacgacgacagcagcctgtacaccagcagcctggccatgaaggtgtgcagaaaggacagcctggccatcaagctgagcaacagacccagcaagagagagctggaggagaagaacatcctgcccagacagaccgacgaggagagactggagctgagacagcagatcggcaccaagctgaccagaagactgagccagagacccaccgccgaggagctggagcagagaaacatcctgaagcccagaaacgagcaggaggagcaggaggagaagagagagatcaagagaagactgaccagaaagctgagccagagacccaccgtggaggagctgagagagagaaagatcctgatcagattcagcgactacgtggaggtggccgacgcccaggactacgacagaagagccgacaagccctggaccagactgaccgccgccgacaaggccgccatcagaaaggagctgaacgagttcaagagcaccgagatggaggtgcacgagctgagcagacacctgaccagcttcagattcccctag

SEQ ID NO: 268820 - DNA, 423 bp, Artificial Sequence
  derived and/or modified sequence
atgtacttgcaggggccccggaagctcatgacgcaaggcggctatgatatggttcagaaactcttcctggacttttttcggcgtagactctcgcaaaggcctacagctgaggagctcgaacagcgaaatattctgaaacccaggaacgagcaagaagagcaggaggagaagcgagagatcaaaagaaggctgaccaggaaactctcccagcgtcccaccgtggaagagttgcgggaacggaagatcctgattagattctccgattacgtggaagtcgctgatgcccaagattacgaccggagggcagacaaaccctggacccggttgaccgctgccgacaaggtgagccggggtgaatgctggagagttgggggaagaactgtgtgttgggtgtctttgggatcaccccttggctctgtttag

SEQ ID NO: 268821 - DNA, 435 bp, Artificial Sequence
  derived and/or modified sequence
atgtacctccagggcccgagaaaactcatgacacaaggaggctatgatatggtgcagaagctgtttctggacttcttcaggcgtcggctttctcagaggcccaccgcagaggagctagagcagaggaatattttaaagcctagaaatgagcaagaggaacaggaggaaaaaagagagataaagaggagactaacgcgaaagctgtcacagaggccaaccgttgaggagcttcgggagcgcaagattctgatccgtttctcagattacgtggaggtggcagacgctcaggattatgaccggagagccgataagccttggacccgcctgacggccgcagataaagcagctatccgcaaggagttgaatgaattcaaaagcacggagatggaagtccacgaactgagcaggcacctgactagattccatcgcccctag

SEQ ID NO: 268822 - DNA, 1248 bp, Artificial Sequence
  derived and/or modified sequence
taaggggagctttccatttccaacgaggaggactcactagaaaatggccaaagcctgagctcaagccaactgtcattacccgccctgtctgagatggaaccagtgccaatgccccgcgatccgtgctcgtacgaggttctgcagcccagtgacatcatggacggaccagacccaggcgcacccgtcaagctgccctgccttcctgtcaaactgagcccgccgctgccgccaaagaaggtgatgatttgtatgcccgtgggggggccagacttgtcccttgtctcatacaccgcccaaaagagcggtcaacagggagtggcgcagcatcaccacacggtcttgccttcccaaattcaacaccagttgcagtatggctctcatgggcagcacctgccgtcaacaaccgggagtttgcctatgcacccttcaggatgcagaatgattgacgagctcaacaagactttagccatgacaatgcagcgtctggaatcatccgagcagcgggtaccatgctctaccagctaccactcttccgggctccacagtggggacggggtcaccaaggcgggacccatgggcctccctgaaataaggcaggtgcccactgtcgttatcgagtgtgacgacaataaggaaaacgtgccccacgaatctgattatgaggatagttcatgcctgtatacacgggaggaagaggaggaagaggaggatgaggatgacgactcttcgctgtacacctcctccctggcaatgaaagtttgtaggaaggatagccttgccatcaaactgtcgaatagaccaagtaagcgagagttggaagagaagaatatcctgcctagacagacagatgaggaacggctcgagctcaggcagcaaatcggcaccaagctcactcggcgcctcagccagaggccgacagcagaagagttggagcagcggaacatcctgaaaccgcgcaatgagcaagaagaacaggaggaaaaaagggaaattaagcgccggctgacccggaagctctcacagcggcctactgtcgaggaacttagagaacgaaagattctgatccgattctccgactacgtggaggtcgcagatgcacaggactacgaccgccgtgctgataagccatggactaggttgaccgccgcagacaaagctgccattcgcaaagagctcaatgagtttaaatcgacagagatggaggtgcatgagttgtcacgccaccttaccaggtttcatcgcccctag

SEQ ID NO: 268823 - DNA, 1308 bp, Artificial Sequence
  derived and/or modified sequence
atgcggcagtccagagaggaactgatcaaacggggagtgctcaaagagatatacgataaagatggcgaactctccatatccaacgaagaggacagtctcgagaatggacagtctctaagcagctcacagttgtccttgcccgctctgtctgaaatggagcctgtccccatgccaagagatccctgctcctacgaagtcctacagccgagtgacattatggacgggccagaccccggagcaccagttaaactcccctgtctccccgttaaactgtcaccacctctacctccgaagaaagtgatgatttgcatgcctgtcgggggacctgatctctctctcgtgagttatactgcccagaagtccggccagcaaggagtggctcagcaccaccacaccgttctaccgagccaaatacagcaccagctccagtacggctctcatggccagcatctccctagtacaaccggctcactgccaatgcacccctcaggctgccggatgatcgacgagttgaacaagactctggcaatgactatgcaaagactagaatcctctgaacaacgcgtgccatgctctaccagttaccatagctccgggctgcacagcggcgatggcgttaccaaagccgggccaatggggctgccagaaatacgccaggtgcccaccgttgtgatcgagtgcgacgataataaggagaatgtcccacatgagagtgattacgaggacagttcctgtttgtacacacgagaagaagaggaagaggaggaggacgaggatgacgactcttctttgtacacttccagccttgctatgaaggtctgcaggaaagactctctcgctattaaacttagcaaccgtccttccaaacgagagttggaggagaaaaatatccttcccagacaaacggatgaagaacgcctggaactccggcagcagatcgggaccaagctgactcgcagactgagccagcgccccacggccgaggagctcgagcagagaaatattctcaaaccacgcaacgagcaggaggagcaggaggaaaaaagagaaataaagcgacggctcaccaggaaacttagtcagcggcctaccgtggaggagttacgggagaggaagatcctgattcgattttctgattacgtagaagtggccgacgcccaggactacgacaggagagccgataaaccatggactcggctgaccgcagccgataaggcagcaataagaaaggagctcaacgaattcaagtctactgagatggaggtccacgagttgtcacgccacctgaccagctttaggtttccatag

SEQ ID NO: 268824 - DNA, 423 bp, Artificial Sequence
  derived and/or modified sequence
atgtacctgcagggccccaggaagctgatgacccagggcggctatgacatggtgcagaagctgttcctggacttcttcagaagaaggctgagccagaggcccacagctgaggagctggagcagaggaacatcctgaagcccagaaatgagcaggaggagcaggaggagaagcgggagatcaagaggcggctgaccaggaagctgagccagaggcccaccgtggaggagctgcgggagaggaagatcctgatccgcttcagtgactatgtggaggtggctgatgcccaggactatgaccggcgggctgacaagccctggacccggctgacagctgctgacaaggtgtccagaggagagtgctggagggtgggcggccgcacagtgtgctgggtgtccctgggcagccccctgggctctgtgtag

SEQ ID NO: 268825 - DNA, 435 bp, Artificial Sequence
  derived and/or modified sequence
atgtacctgcagggccccaggaagctgatgacccagggcggctatgacatggtgcagaagctgttcctggacttcttcagaagaaggctgagccagaggcccacagctgaggagctggagcagaggaacatcctgaagcccagaaatgagcaggaggagcaggaggagaagcgggagatcaagaggcggctgaccaggaagctgagccagaggcccaccgtggaggagctgcgggagaggaagatcctgatccgcttcagtgactatgtggaggtggctgatgcccaggactatgaccggcgggctgacaagccctggacccggctgacagctgctgacaaggccgccatcaggaaggagctgaatgagttcaagagcacagagatggaggtgcatgagctgagccgccacctgacccgcttccaccggccctag

SEQ ID NO: 268826 - DNA, 1248 bp, Artificial Sequence
  derived and/or modified sequence
tgaggagagctgagcatcagcaatgaggaggacagcctggagaatggccagagcctgagcagcagccagctgagcctgcctgccctgtctgagatggagcctgtgcccatgccccgggacccctgcagctatgaggtgctgcagcccagcgacatcatggatggccctgaccccggggcccctgtgaagctgccctgcctgcctgtgaagctgagcccccccctgccccccaagaaggtgatgatctgcatgcctgtgggcggccctgacctgagcctggtgtcctacacagcccagaagagcggccagcagggcgtggcccagcaccaccacacagtgctgcccagccagatccagcaccagctgcagtatggcagccacggccagcacctgcccagcaccaccggcagcctgcccatgcaccccagcggctgcaggatgattgatgagctgaacaagaccctggccatgaccatgcagaggctggagagcagcgagcagagggtgccctgcagcaccagctaccacagcagcggcctgcacagcggagatggagtgaccaaggccggccccatgggcctgcctgagatccggcaggtgcccaccgtggtgattgaatgtgatgacaacaaggaaaatgtgccccatgaaagtgactatgaggacagcagctgcctgtacacccgggaggaggaggaggaggaggaggatgaagatgatgacagcagcctgtacaccagcagcctggccatgaaggtgtgcaggaaggacagcctggccatcaagctgagcaaccggcccagcaagcgggagctggaggagaagaacatcctgccccggcagacagatgaggagcggctggagctgcggcagcagatcggcaccaagctgacccggcggctgagccagaggcccacagctgaggagctggagcagaggaacatcctgaagcccagaaatgagcaggaggagcaggaggagaagcgggagatcaagaggcggctgaccaggaagctgagccagaggcccaccgtggaggagctgcgggagaggaagatcctgatccgcttcagtgactatgtggaggtggctgatgcccaggactatgacagaagagctgacaagccctggacccggctgacagctgctgacaaggccgccatcaggaaggagctgaatgagttcaagagcacagagatggaggtgcatgagctgagccgccacctgacccgcttccaccggccctag

SEQ ID NO: 268827 - DNA, 1308 bp, Artificial Sequence
  derived and/or modified sequence
atgaggcagagccgggaggagctgatcaagaggggcgtgctgaaggagatctatgacaaggatggagagctgagcatcagcaatgaggaggacagcctggagaatggccagagcctgagcagcagccagctgagcctgcctgccctgtctgagatggagcctgtgcccatgccccgggacccctgcagctatgaggtgctgcagcccagcgacatcatggatggccctgaccccggggcccctgtgaagctgccctgcctgcctgtgaagctgagcccccccctgccccccaagaaggtgatgatctgcatgcctgtgggcggccctgacctgagcctggtgtcctacacagcccagaagagcggccagcagggcgtggcccagcaccaccacacagtgctgcccagccagatccagcaccagctgcagtatggcagccacggccagcacctgcccagcaccaccggcagcctgcccatgcaccccagcggctgcaggatgattgatgagctgaacaagaccctggccatgaccatgcagaggctggagagcagcgagcagagggtgccctgcagcaccagctaccacagcagcggcctgcacagcggagatggagtgaccaaggccggccccatgggcctgcctgagatccggcaggtgcccaccgtggtgattgaatgtgatgacaacaaggaaaatgtgccccatgaaagtgactatgaggacagcagctgcctgtacacccgggaggaggaggaggaggaggaggatgaagatgatgacagcagcctgtacaccagcagcctggccatgaaggtgtgcaggaaggacagcctggccatcaagctgagcaaccggcccagcaagcgggagctggaggagaagaacatcctgccccggcagacagatgaggagcggctggagctgcggcagcagatcggcaccaagctgacccggcggctgagccagaggcccacagctgaggagctggagcagaggaacatcctgaagcccagaaatgagcaggaggagcaggaggagaagcgggagatcaagaggcggctgaccaggaagctgagccagaggcccaccgtggaggagctgcgggagaggaagatcctgatccgcttcagtgactatgtggaggtggctgatgcccaggactatgacagaagagctgacaagccctggacccggctgacagctgctgacaaggccgccatcaggaaggagctgaatgagttcaagagcacagagatggaggtgcatgagctgagccgccacctgaccagcttccgcttcccctag

SEQ ID NO: 268828 - DNA, 423 bp, Artificial Sequence
  derived and/or modified sequence
atgtacctgcagggcccccggaagctgatgacccagggcggctacgatatggtccagaaactctttctggacttctttcggcgcagactatcccagcgcccaacagccgaggagctcgaacaaaggaatattctgaaaccgagaaacgagcaagaagaacaggaggaaaagcgcgagatcaagcgcaggctaaccaggaaactgtcccagagaccgactgtcgaagaactacgggagagaaagatactgattagattttccgattatgtagaggtagccgacgctcaggattacgacaggagggccgacaagccatggactcgtctgacagccgctgataaggtgagtcgaggagagtgctggcgggtcggaggaaggacggtctgttgggtatcactggggtctccgctagggagtgtatag

SEQ ID NO: 268829 - DNA, 435 bp, Artificial Sequence
  derived and/or modified sequence
atgtacctgcagggcccccggaagctgatgacccagggcggctacgatatggtccagaaacttttccttgacttttttaggaggagattgtcgcaacgtcccacagctgaagagttagagcagcggaatatcctgaaaccccgtaacgagcaggaagaacaggaggagaaaagagagattaagcgtcggctcaccagaaaattatcccaaagacctaccgtggaggaactgagagaacgaaagatcttgataaggttctccgactatgtggaggtagcagatgctcaggattatgaccggcgggccgacaagccttggacaaggctcactgctgctgataaagcggcaatccgcaaagagctgaacgagttcaaatcaacggagatggaggtgcacgagctctccagacacctgactcgcttccaccgcccctag

SEQ ID NO: 268830 - DNA, 1248 bp, Artificial Sequence
  derived and/or modified sequence
tgaggcgagctgagcatcagcaacgaggaggacagcctggagaacggccagagcctgagctcatctcagctcagcctacccgctctcagcgaaatggaaccggtaccaatgccgagggacccttgcagctacgaggtgctccagccgtctgatattatggacgggcccgacccgggtgccccagttaagctgccgtgcctgcccgttaaacttagcccccccctccccccaaaaaaggtcatgatttgtatgccagtgggcggtcctgacctttccctggtgtcatacacggcgcagaaatcaggccagcagggcgtggctcagcaccaccatacagtgctcccttcgcagatccagcatcaattgcagtatggttcacacggccagcatttaccaagtaccacaggttcgctcccgatgcatccatccggatgcagaatgatcgacgagctaaataagacattggcaatgaccatgcagcgcctggagagttctgagcagcgggtgccttgcagcacctcttatcattcgtcgggtttgcattccggcgatggggtgacaaaagccggacccatgggtttgcctgaaattcgtcaggtcccaactgtcgttattgagtgcgatgacaacaaagaaaacgtacctcacgagtcggactacgaagacagcagctgcttgtacacacgtgaagaggaagaagaagaggaagacgaggacgatgactcatctctttacacaagctcgctcgcgatgaaggtgtgtaggaaggacagcctggctattaagctgtccaatcgtccttccaagagagagctcgaggagaagaacatcctgcctagacaaacagacgaagaaaggctcgagcttaggcagcagatcggaacaaagctgacacggagattgtcccagaggcccaccgctgaagagctggagcagagaaacatcctgaagccacgcaatgaacaagaggagcaggaagaaaagagggaaatcaagaggagactaactcggaagctgtcccagaggccaactgtcgaagagctcagagagagaaaaattcttatccgtttttccgactacgtggaggtggctgatgcccaggattacgaccgccgtgcggacaagccctggactagactgactgccgccgacaaagcagcaatccggaaggagcttaacgagtttaagtccaccgagatggaagtacacgagctcagccgtcatctgacacgtttccatcgcccatag

SEQ ID NO: 268831 - DNA, 1308 bp, Artificial Sequence
  derived and/or modified sequence
atgcggcagagccgggaggagctgatcaagcggggcgtgctgaaggaaatttacgacaaagatggcgagctctccatcagcaacgaggaggattcgttggaaaacggtcagtctttgtcctcttctcagctgtctctgcccgcactctctgagatggagccagtgcctatgcccagagacccctgttcctatgaagtcctgcaaccaagcgacatcatggacgggcctgatccaggcgcaccagttaaactgccttgcctgcctgttaaattatccccccccctaccaccaaaaaaagtaatgatttgcatgcctgtcggcggccctgacctgagtctcgttagctataccgcgcagaaaagcgggcaacagggggtggcccaacaccatcataccgtacttccatcccagatacagcaccagctgcagtacggctcccatgggcaacatctcccatcgaccacgggttccctgcccatgcaccccagcggctgtcgaatgattgatgaactgaacaagaccctcgcaatgacaatgcaaagactggagtcctccgagcagagagtaccttgttcgacatcgtaccattcatccggtcttcattccggggacggagttacaaaggccggcccgatgggattgccagaaatccgacaagtgcctaccgtggtgattgaatgtgatgataacaaggaaaacgtgcctcacgaaagcgactatgaagatagctcttgcctgtatactagggaagaggaggaagaggaagaggacgaggatgatgactcatctctttacacgagcagtctagccatgaaggtgtgcagaaaggatagcttggcgatcaagctctcgaatcgccccagcaagagggaactggaggaaaaaaacatcctgcctaggcagacagatgaggaaaggctggagttgcggcagcagatcggcacaaagctgacgcggaggctgtcacagcgccccacagctgaggagctggaacagagaaacatcctcaaaccccgtaacgagcaggaggaacaggaagagaaacgggaaattaaaagacggctgacaaggaagctctcccagagacctactgtggaggagcttagagaaagaaagatcttaattcggttttccgattatgtcgaagtcgcggacgcacaagattacgaccggcgcgctgacaaaccgtggacacgccttactgcagcggataaagctgccatccggaaagaattgaacgagtttaagagtaccgagatggaggtgcacgaattgtcccgacacttgaccagctttaggtttccgtag

SEQ ID NO: 268832 - DNA, 707 bp, Artificial Sequence
  derived and/or modified sequence
ctccagccactgactgtctcatgtatctgcaagggccgaggaaattaatgacccaaggaggctatgatatggtccaaaaacttttcctggattttttccgtaggcggctgagccagaggccaactgcagaggaactggaacagaggaacattttgaaacctcggaatgaacaagaggaacaggaggagaagagagagatcaagaggaggctaacccgaaagctcagtcaaaggcccacggtggaagagcttcgggaaagaaagatcctcatccgcttcagtgactacgtggaggtggctgacgctcaggactatgaccgcagggcagataagccgtggacccgcctcaccgctgcagacaaagtaagcagaggggagtgctggagagtgggaggcaggaccgtctgctgggtctcgctgggctcaccgctggggagcgtgtagggagacctgcagccaggcctcagccgcagtccccataatggagtgttgagaccccaacacctttccccaggggccacagataatctgcggaaaggctgctgaatcggagaaaacacaaggcacataatactgtgcccattttacaggaggaggagcagcagcctgggaggctgtgcccagagaaagagaatagcactggataggtgtagacaggtgaaggcaagaggctccaggctcatcacagcccttccgtataggggatgg

SEQ ID NO: 268833 - DNA, 943 bp, Artificial Sequence
  derived and/or modified sequence
gtgcctctcctgggcttgaaattgaggaactgaggaggcggtggtggcgagagtcagtctttcagagcacaggatggaacaagaactccagccactgactgtctcatgtatctgcaagggccgaggaaattaatgacccaaggaggctatgatatggtccaaaaacttttcctggattttttccgtaggcggctgagccagaggccaactgcagaggaactggaacagaggaacattttgaaacctcggaatgaacaagaggaacaggaggagaagagagagatcaagaggaggctaacccgaaagctcagtcaaaggcccacggtggaagagcttcgggaaagaaagatcctcatccgcttcagtgactacgtggaggtggctgacgctcaggactatgaccgcagggcagataagccgtggacccgcctcaccgctgcagacaaagctgccatccgaaaggagctcaatgaattcaaaagcactgagatggaagttcatgaattgagtagacacttaacaaggtttcaccgaccttaacagtcgaattcctcttgagtgctatgctgtcttcaaaacataaatttataagaaccataagtgctggtatttattcacttccccattacgatgtaaatcttctgaactgccttttttttaaaaagaagaaaaatcaaggaaacacaatcaggattttatgtgtgaaaacgcaaaagtgatggctcggcggtccgagctgctggtcccacttctgacaccaaaatgcatcccaacccccggcagtgccaagggcaccagcagggccctgactgaagactgtctggcaggtggaacggtccttgtcctctccagccaggcccagcaggcactaccttcatgaagtctccagcaaacctcttcctcacaagtgtctgtcatctgagtccaaagaaagctgaagggg

SEQ ID NO: 268834 - DNA, 2012 bp, Artificial Sequence
  derived and/or modified sequence
atggggaactctctatatccaatgaagaggactccctagaaaatgggcagtccctgagctccagccagctgtctctgcctgccctgtccgaaatggagccagtcccaatgcccagggatccctgctcatatgaggtgctccaaccgtcagacatcatggatgggccagatcctggcgcccctgtgaaattgccttgtctgccagtgaaactgtcgcctccgctacctccaaagaaagtcatgatctgtatgcccgtgggggggccagacctctcactggtgtcctacacagcccagaagagtggccagcagggtgtggcccagcaccaccacactgtcctgccctcccagatccagcaccagctgcagtacggcagccacggccagcacctcccctccaccaccggctccctccccatgcacccctcgggctgcagaatgatagacgagctcaacaaaacgctggccatgaccatgcagaggctggaaagctctgagcagcgggtcccctgttccacttcttaccacagctctgggttgcactcgggtgatggggtcaccaaagcaggacctatgggccttccagaaataagacaagtgccaactgttgtgattgaatgtgatgacaataaagaaaatgtgcctcatgagtcagactacgaagactcttcttgcctgtatacaagagaagaggaggaagaggaggaggacgaagacgacgacagctcattatacaccagctccctggccatgaaggtctgcaggaaggactccttagccatcaaactcagcaacaggccctccaagcgagagctggaagaaaagaacatccttcccaggcagacggatgaggagcggctggagctgaggcaacagattggcaccaagctcaccaggcggctgagccagaggccaactgcagaggaactggaacagaggaacattttgaaacctcggaatgaacaagaggaacaggaggagaagagagagatcaagaggaggctaacccgaaagctcagtcaaaggcccacggtggaagagcttcgggaaagaaagatcctcatccgcttcagtgactacgtggaggtggctgacgctcaggactatgaccgcagggcagataagccgtggacccgcctcaccgctgcagacaaagctgccatccgaaaggagctcaatgaattcaaaagcactgagatggaagttcatgaattgagtagacacttaacaaggtttcaccgaccttaacagtcgaattcctcttgagtgctatgctgtcttcaaaacataaatttataagaaccataagtgctggtatttattcacttccccattacgatgtaaatcttctgaactgccttttttttaaaaagaagaaaaatcaaggaaacacaatcaggattttatgtgtgaaaacgcaaaagtgatggctcggcggtccgagctgctggtcccacttctgacaccaaaatgcatcccaacccccggcagtgccaagggcaccagcagggccctgactgaagactgtctggcaggtggaacggtccttgtcctctccagccaggcccagcaggcactaccttcatgaagtctccagcaaacctcttcctcacaagtgtctgtcatctgagtccaaagaaagctgaaggggtgggtttgttttgggggtactgtgcaaagctaatgatctggttggacttctacacttggccaaatgtactggctccagacatgacatttggtttgggggccctttgaagttgatgccaagaaggagtgaacacttctcagttgcccctggcttttccctcctttcagccaccacccacacaatgaacaaaagggaagggcccatttctgggggagtctggctgcctcttggctacgaaggctggcactgagcacccatcctgctccctctgcctgagctgagctgcctttcaggaagctctggtttagaaggggaaagatgtcatatgctcagttcaaataatcaacccaactgtgtccaga

SEQ ID NO: 268835 - DNA, 423 bp, Artificial Sequence
  derived and/or modified sequence
atgtacttgcaaggtcctcgaaaacttatgacccagggcggttacgacatggtgcagaagctgttcctggacttctttagacgtagattgagccagaggccgacggccgaggaacttgagcaaagaaatatactgaaaccaagaaacgaacaagaagaacaggaggaaaagcgcgaaatcaagagacggctcaccagaaaactcagtcagcgccctactgtggaggagctccgggaacggaagattctcattcgcttctccgattacgtagaggtcgccgatgcccaggattacgaccggcgagctgacaagccttggacaaggctgacagctgcggacaaggtatcacggggagagtgctggcgcgttggaggtcggacggtgtgttgggtgtcactcggcagtcctctcggcagtgtctag

SEQ ID NO: 268836 - DNA, 435 bp, Artificial Sequence
  derived and/or modified sequence
atgtaccttcagggacctcgcaaacttatgacacagggtgggtacgacatggtgcagaagctcttcctggattttttcagaagacgcctttctcaacgacccactgccgaagaattggagcagcgcaacatcctgaaaccgagaaatgaacaagaagagcaagaggagaagagggagatcaagcgccgtttgaccaggaaacttagccagagacccacagtggaggagctccgagaacgaaagatcctgattagattctctgactatgtcgaggtagccgacgcacaggattatgatcgcagggcggacaagccgtggacgaggttgaccgctgcagataaggctgccattcgcaaagaactcaacgagtttaagtccacggagatggaggtacatgaactctctcggcacctgacacgattccaccgtccatag

SEQ ID NO: 268837 - DNA, 1248 bp, Artificial Sequence
  derived and/or modified sequence
tgaggcgagctgagcatctccaacgaagaagatagtctggagaatgggcagtctctctctagttcgcagttgtcactcccagcattatctgaaatggagccagtccccatgcctcgagatccttgcagctacgaggttctacagccttccgatatcatggacggacctgatcctggggctcccgtaaaactcccttgcttgccagtgaagctcagcccacctttacctcccaaaaaagtaatgatttgtatgccagtaggaggccctgatctgtcccttgtgtcttacaccgcccaaaaatccggtcaacagggcgtagctcagcatcatcacaccgtgctgccgtcccagatccagcaccaacttcagtatgggtcacacgggcagcatctgccctccaccaccgggagtctgcctatgcatccttcaggctgcagaatgatcgatgaactgaataaaaccttagcaatgactatgcagcgccttgagagctcagagcagcgagtgccttgcagtacctcataccactcgtcaggcttgcatagtggcgacggcgtcaccaaagccggacccatgggcctgccggagattcgacaagtgcctaccgtggtcattgagtgcgatgacaataaggaaaacgtgccccacgaaagcgactatgaagactcttcttgtctttatacgagggaagaggaggaagaagaggaggacgaggacgacgacagcagcttgtacacatcgtcactcgcaatgaaggtgtgtcggaaggacagccttgccattaagttaagcaaccggccaagcaaacgagagctggaggagaagaacattttacctagacagactgatgaggaaaggctcgaactgagacagcagatcggaactaaattaacccggaggttatctcagcggcctaccgccgaagagctcgagcaacggaacattctgaaacccagaaatgaacaggaggaacaggaagaaaagcgcgagatcaagcggaggctcactcggaaactatcccagcggccaaccgttgaagagctgcgcgaacggaagatcctgatccgattttccgactacgtcgaagtagctgatgctcaggattacgaccgacgggcagataagccctggaccaggttgaccgccgctgacaaagccgcaatcaggaaggaactgaacgaatttaaaagcacggagatggaagtgcacgaactaagccgtcatctcacacgctttcataggccctag

SEQ ID NO: 268838 - DNA, 1308 bp, Artificial Sequence
  derived and/or modified sequence
atgagacagagcagggaagagttgatcaagagaggcgtcctgaaggaaatatacgacaaggatggcgagctcagtatctctaacgaggaagactctcttgaaaatggccaatctttgtcgagctctcagctctctttacccgctctaagtgaaatggaacctgtgccaatgcctagggacccatgttcctacgaggtcctgcagccttctgacatcatggatggcccagacccaggcgctccagttaaacttccctgcttacccgttaaattgtctccaccactccctcccaagaaagtgatgatctgcatgccagttggaggcccagacctgagcctggtttcatatacggctcagaagagtggacagcagggcgtggctcaacaccatcacactgtgctgccgtcacagatccagcaccaactccagtatggatctcacggtcagcatctaccctctaccactggtagcctccccatgcacccttcaggctgccgcatgattgacgagctgaacaagacgctggcaatgactatgcaacgacttgaatcctccgaacagcgcgtgccttgctccacctcctaccatagctctggcctccatagtggggacggcgtgacgaaggcgggtcccatgggcctgcccgagattcggcaggtaccaacagtggtgatcgagtgtgacgataacaaagagaatgtgcctcacgagtcagactatgaggattccagctgcctgtatacccgggaggaggaggaagaggaggaagacgaagatgacgattcttcactgtataccagttctttggcaatgaaggtttgtaggaaggacagcctggccatcaagctgtcaaacagaccatctaaacgggagctagaagagaagaacatcctgccacgccaaactgatgaggagagacttgagttaaggcagcagatagggactaaactcacgcggagattatcacagcggccaaccgccgaggaactggagcagcgaaacattctgaaaccaagaaacgagcaggaagagcaggaagaaaaacgagagataaagcggagattaaccaggaaactgagtcaacgtcccactgtggaagaactgagggagaggaagatcctgatccggttcagtgattatgttgaggtcgctgacgcacaggactatgataggagggccgacaagccttggacgcgacttaccgccgctgacaaagcggctatccgaaaagagttaaatgagttcaagtccactgaaatggaggtgcacgaactttccaggcatctcacatccttccggttcccttag

SEQ ID NO: 268839 - protein, 1009 aa, Artificial Sequence
  derived and/or modified sequence
MGSGRVPGLCLLVLLVHARAAQYSKAAQDVDECVEGTDNCHIDAICQNTPRSYKCICKSGYTGDGKHCKDVDECEREDNAGCVHDCVNIPGNYRCTCYDGFHLAHDGHNCLDVDECAEGNGGCQQSCVNMMGSYECHCREGFFLSDNQHTCIQRPEEGMNCMNKNHGCAHICRETPKGGIACECRPGFELTKNQRDCKLTCNYGNGGCQHTCDDTEQGPRCGCHIKFVLHTDGKTCIGERRLEQHIPTQAVSNETCAVNNGGCDSKCHDAATGVHCTCPVGFMLQPDRKTCKDIDECRLNNGGCDHICRNTVGSFECSCKKGYKLLINERNCQDIDECSFDRTCDHICVNTPGSFQCLCHRGYLLYGITHCGDVDECSINRGGCRFGCINTPGSYQCTCPAGQGRLHWNGKDCTEPLKCQGSPGASKAMLSCNRSGKKDTCALTCPSRARFLPESENGFTVSCGTPSPRAAPARAGHNGNSTNSNHCHEAAVLSIKQRASFKIKDAKCRLHLRNKGKTEEAGRITGPGGAPCSECQVTFIHLKCDSSRKGKGRRARTPPGKEVTRLTLELEAEVRAEETTASCGLPCLRQRMERRLKGSLKMLRKSINQDRFLLRLAGLDYELAHKPGLVAGERAEPMESCRPGQHRAGTKCVSCPQGTYYHGQTEQCVPCPAGTFQEREGQLSCDLCPGSDAHGPLGATNVTTCAGQCPPGQHSVDGFKPCQPCPRGTYQPEAGRTLCFPCGGGLTTKHEGAISFQDCDTKVQCSPGHYYNTSIHRCIRCAMGSYQPDFRQNFCSRCPGNTSTDFDGSTSVAQCKNRQCGGELGEFTGYIESPNYPGNYPAGVECIWNINPPPKRKILIVVPEIFLPSEDECGDVLVMRKNSSPSSITTYETCQTYERPIAFTARSRKLWINFKTSEANSARGFQIPYVTYDEDYEQLVEDIVRDGRLYASENHQEILKDKKLIKAFFEVLAHPQNYFKYTEKHKEMLPKSFIKLLRSKVSSFLRPYK

SEQ ID NO: 268840 - DNA, 5163 bp, Artificial Sequence
  derived and/or modified sequence
ccagccatgggctcggggcgcgtacccgggctctgcctgcttgtcctgctggtccacgcccgcgccgcccagtacagcaaagccgcgcaagatgtggatgagtgtgtggaggggactgacaactgccacatcgatgctatctgccagaacaccccgaggtcatacaagtgcatctgcaagtctggctacacaggggacggcaaacactgcaaagacgtggatgagtgcgagcgagaggataatgcaggttgtgtgcatgactgtgtcaacatccctggcaattaccggtgtacctgctatgatggattccacctggcacatgacggacacaactgtctggatgtggacgagtgtgccgagggcaacggcggctgtcagcagagctgtgtcaacatgatgggcagctatgagtgccactgccgggaaggcttcttcctcagcgacaaccagcatacctgtatccagcggccagaagaaggaatgaattgcatgaacaagaaccacggctgtgcccacatttgccgggagacacccaaggggggtattgcctgtgaatgccgtcctggctttgagcttaccaagaaccaacgggactgtaaattgacatgcaactatggtaacggcggctgccagcacacgtgtgatgacacagagcagggtccccggtgcggctgccatatcaagtttgtgctccataccgacgggaagacatgcatcggggaaaggcggctagagcagcacatccccactcaagccgtttctaatgagacctgtgctgtcaacaacgggggctgtgacagtaagtgccatgatgcagcgactggtgtccactgcacctgccctgtgggcttcatgctgcagccagacaggaagacgtgcaaagatatagatgagtgccgcttaaacaacgggggctgtgaccatatttgccgcaacacagtgggcagcttcgaatgcagttgcaagaaaggctataagcttctcatcaatgagaggaactgccaggatatagacgagtgttcctttgatcgaacctgtgaccacatatgtgtcaacacaccaggaagcttccagtgtctctgccatcgtggctacctgttgtatggtatcacccactgtggggatgtggatgaatgcagcatcaaccggggaggttgccgctttggctgcatcaacactcctggcagctaccagtgtacctgcccagcaggccagggtcggctgcactggaatggcaaagattgcacagagccactgaagtgtcagggcagtcctggggcctcgaaagccatgctcagctgcaaccggtctggcaagaaggacacctgtgccctgacctgtccctccagggcccgatttttgccagagtctgagaatggcttcacggtgagctgtgggacccccagccccagggctgctccagcccgagctggccacaatgggaacagcaccaactccaaccactgccatgaggctgcagtgctgtccattaaacaacgggcctccttcaagatcaaggatgccaaatgccgtttgcacctgcgaaacaaaggcaaaacagaggaggctggcagaatcacagggccaggtggtgccccctgctctgaatgccaggtcaccttcatccaccttaagtgtgactcctctcggaagggcaagggccgacgggcccggacccctccaggcaaagaggtcacaaggctcaccctggaactggaggcagaggtcagagccgaagaaaccacagccagctgtgggctgccctgcctccgacagcgaatggaacggcggctgaaaggatccctgaagatgctcagaaagtccatcaaccaggaccgcttcctgctgcgcctggcaggccttgattatgagctggcccacaagccgggcctggtagccggggagcgagcagagccgatggagtcctgtaggcccgggcagcaccgtgctgggaccaagtgtgtcagctgcccgcagggaacgtattaccacggccagacggagcagtgtgtgccatgcccagcgggcaccttccaggagagagaagggcagctctcctgcgacctttgccctgggagtgatgcccacgggcctcttggagccaccaacgtcaccacgtgtgcaggtcagtgcccacctggccaacactctgtagatgggttcaagccctgtcagccatgcccacgtggcacctaccaacctgaagcaggacggaccctatgcttcccttgtggtgggggcctcaccaccaagcatgaaggggccatttccttccaagactgtgacaccaaagtccagtgctccccagggcactactacaacaccagcatccaccgctgtattcgctgtgccatgggctcctatcagcccgacttccgtcagaacttctgcagccgctgtccaggaaacacaagcacagactttgatggctctaccagtgtggcccaatgcaagaatcgtcagtgtggtggggagctgggtgagttcactggctatattgagtcccccaactacccgggcaactacccagctggtgtggagtgcatctggaacatcaaccccccacccaagcgcaagatccttatcgtggtaccagagatcttcctgccatctgaggatgagtgtggggacgtcctcgtcatgagaaagaactcatccccatcctccattaccacttatgagacctgccagacctacgagcgtcccattgccttcactgcccgttccaggaagctctggatcaacttcaagacaagcgaggccaacagcgcccgtggcttccagattccctatgttacctatgatgaggactatgagcagctggtagaagacattgtgcgagatggccggctctatgcctctgaaaaccaccaggagattttaaaggacaagaagctcatcaaggccttctttgaggtgctagcccacccccagaactacttcaagtacacagagaaacacaaggagatgctgccaaaatccttcatcaagctgctccgctccaaagtttccagcttcctgaggccctacaaatagtaaccctaggctcagagacccaattttttaagcccccagactccttagccctcagagccggcagccccctaccctcagacaaggaactctctcctctctttttggagggaaaaaaaaaatatcactacacaaaccaggcactctccctttctgtctttctagtttcctttccttgtctctctctgcctgcctctctactgttcccccttttctaacacactacctagaaaagccattcagtactggctctagtccccgtgagatgtaaagaaacagtacagccccttccactgcccattttaccagctcacattcccgaccccatcagcttggaagggtgctagaggcccatcaaggaagtgggtctggtgggaaacggggaggggaaagaagggcttctgccattatagggttgtgccttgctagtcaggggccaaaatgtcccctggctctgctccctagggtgattctaacagcccagggtcctgccaaagaagcctttgatttacaggcttaatgccagcaccagtcctctggggcacatggtttgagctctggacttcccacatggccagctttcttgtctatacagatcctctctttctttccctacgtctgcctggggtctactccataagggtttacaaatggcccacaacactgagttagtggacaccggctaaatgaggaagagcagcaggcattgtcatggtgaatgccccgctgtagctccctgagagaaagactgtaactctgcaggacagaaacaaggttttaaagcattgccaaaaaaaagaaaacagaaagaaaaaatgtatcatctaaaggactagacacagaacaattggaagtcaacttcaaacactaatcccttttcttgtcttccctggcccagccacctcctcagccccatgtgatgctccctgggggagccctactccccttgctacatgttgtccttaaacatggttattgacctgaagccagcctaggccttgccctacagttgtttttcccttgtagccccagctggcttgtgggcttcaccaaagaggaccccactctgaagccagcctggagccacctacctctggcctcaggctgtgggcagcaaaaggaatgtgtgtgcacttggcgagcctcctgcccaccctgtccacacctaataagtgcaatcattttgagtctttctatgttgtctagacggaggggtttttgttttctgggtttgttttttgtttttgtttcttcttcctctattagcaaaaccctatttatagctgcccaagagaaaagagtgtatgtttggagtggaagaaaatcggttttgaatctcatgaaccttgagtgctggagcatctgatctgtctctatgccaccactggccacctagagcccttggctgtggtaatccagggtaattgcgcagaggcatctgatgtgtaggaaagtaattctggggatttgatggagcagaaaggagagagacctatgtttgctaaaccaatcttgctatccctatgcctctccatggagtcagtgtggacctcatgattatagaggccaatggaactggtcagtgattctctaccccaagtagggaaaacctccatcttttccctgtcttcatcctgttatcccctggtgtacacatggaagaggaccaggacataccacctggggatgggctgactcagggtcccgaggccagagacaaagctgtgggagccaagaataagacagaaggcatcagatatttgcctggctctggtcacttccctttgaagttgacttcaagcttagcttcctcaactactgtttttcagaaggaagaaagaatcaaatggaagaagaatcaagtccatgcccaagcccaaagcctgcacacattctgcccttaatccaagtgttgcctataaaattattttctgttttctcactctagttcccccaaagctgtagtcccaatcaatcaaaggctaccaactgagtcctcaggttcatttcttttttttttttttttctttttaactctcctggtaactcacagaacagctcaggttcatttctaggtgactgtcctaggctactgctcccccaggagactcaacactaaataaaggagtc

SEQ ID NO: 268841 - DNA, 3030 bp, Artificial Sequence
  derived and/or modified sequence
atgggtagcggccgagtccccggactatgcctactggtgctgctagttcacgcacgcgctgcacagtattctaaggcagctcaggacgtggatgaatgtgtggagggaaccgacaactgccatatcgatgcgatctgccagaacaccccacggagttacaaatgcatttgcaaaagcggttatacgggcgacgggaaacattgcaaggacgtggacgagtgcgagcgcgaggacaacgccggatgtgtacacgactgtgttaacataccagggaactacaggtgcacctgttacgacgggttccatctcgctcatgacggccacaattgtcttgatgtggacgaatgtgccgaaggcaacggtggttgccagcagtcttgtgttaatatgatgggcagctacgagtgccattgtcgcgaaggcttcttcttgagcgataatcaacacacctgtatacagcggcctgaagagggcatgaattgtatgaacaaaaatcacggctgcgctcacatatgccgtgagactcctaaggggggtattgcgtgtgaatgtcggccagggtttgaacttaccaaaaaccagagggattgcaagctcacatgtaattatggaaacggcggttgtcagcacacatgtgacgatacggaacagggtcccagatgtggctgccacatcaaatttgtactgcacaccgacggaaagacctgcatcggcgagaggcggttggaacagcacatccctacacaggccgtgtcaaacgagacctgtgccgtcaataacggcggatgtgactcaaagtgccacgatgccgcaacgggtgttcattgtacttgccctgtagggttcatgttgcaacctgaccgtaagacctgtaaagacatcgacgaatgccgacttaataacggtggctgtgatcacatctgtagaaataccgtcggttcattcgaatgttcttgtaaaaaggggtacaagctgctgataaacgaacgcaactgccaggacatcgacgaatgctcatttgatcgcacctgtgatcacatctgcgtgaacacacccggttcctttcagtgtttgtgccacaggggttacctcctgtacgggatcacacattgtggcgacgtcgatgagtgttcaataaatagaggcggatgccgcttcgggtgtattaacacacccggaagctatcagtgcacatgcccagccggacagggaagattacactggaatggcaaggactgcaccgagccgcttaaatgccagggaagccctggggcatccaaagcgatgctcagctgcaatcgttccggaaagaaagacacctgcgctttaacttgcccctctcgggcacgcttcctcccagaatcggaaaacggatttactgtgtcttgcggcacccctagcccgagagcagccccagcgagggccggtcacaacggcaattcaaccaattcaaaccattgtcatgaagcagctgtgctctccataaaacagagggcatcttttaagattaaagacgcaaagtgtcgactgcatctgcggaataaggggaaaaccgaggaagccggaagaatcacaggtccaggtggggctccctgctctgagtgccaagtgacttttatccatctcaagtgcgattcctcccgaaagggcaaaggtcggagggcgaggacaccacctgggaaggaagttacacgtctgacactcgagctggaagccgaggtacgggcagaggaaaccaccgcttcatgcgggctgccatgtctcagacaacggatggagaggcggctgaaggggtccctcaagatgctgaggaaaagtattaatcaagaccggttcttattgcgcctggcgggacttgattatgagctggcccacaaaccaggcttggtagccggagagagagcggaacccatggaatcatgccggccaggacaacatcgcgcagggacaaagtgtgtgagctgtcctcaggggacatattatcacggccaaactgagcagtgtgtaccctgccctgctgggacctttcaagagcgtgagggtcagctgtcttgcgacctgtgtcccggatccgacgcacacggtcctctgggcgcaaccaacgtaaccacgtgcgctgggcaatgtccaccgggtcaacactcggttgacgggttcaagccctgtcagccgtgtcctcgcggaacataccaaccagaagcgggacgcacgttatgctttccttgtgggggtggactcacaaccaagcatgagggcgcaatctcattccaggattgcgacactaaagtgcaatgctctccaggccattactacaacactagcatccatcgttgtatacgttgcgccatgggtagctaccagcccgattttcgtcagaacttttgctctagatgtccagggaacacttcaaccgattttgacgggtccacgtcagttgcacagtgcaagaatagacagtgtggcggagagttgggggagttcacggggtacatcgagtcccccaactacccaggcaactacccagcaggggtcgaatgtatatggaatatcaacccaccccctaagcggaagatactcatcgttgtgcccgaaatttttctgccgagtgaagacgagtgcggggatgtactggttatgcgaaaaaactcatcaccctctagcatcacgacttacgaaacttgtcagacctacgaacggcctattgccttcaccgctcgatctcggaagctgtggattaatttcaaaacgagcgaagcaaatagcgccagaggttttcagattccttatgtcacctacgacgaggattatgagcagttggtggaggacattgtaagagatggtcggctttacgccagtgagaaccaccaagagatccttaaagataaaaaactgattaaggccttctttgaagtattggcacaccctcaaaactattttaaatataccgagaagcacaaagagatgctgccaaaatcgtttattaagcttctgagatcaaaagtgtcttcctttctcaggccttataaatag

SEQ ID NO: 268842 - DNA, 3030 bp, Artificial Sequence
  derived and/or modified sequence
atggggtcagggcgcgtgcccggcctttgccttttggtgcttctcgtgcatgcacgtgcagcgcagtactccaaagccgcccaggatgtcgatgagtgtgttgaagggacagataactgccacattgacgccatctgccagaatacgccacgctcctataaatgcatttgcaagtccggttacactggggacggaaaacactgcaaggacgtggatgagtgtgaaagggaggacaatgccggctgtgtccatgactgcgtcaatatccccggtaactacagatgtacttgctatgacggctttcatttagcacatgatggccacaactgtcttgatgtggatgaatgtgccgagggcaatggcggctgccaacaatcatgcgtgaacatgatgggcagttatgaatgtcactgccgggaaggcttcttcttgtcagataaccagcatacctgtatccagcgtcctgaggagggcatgaactgtatgaataaaaaccatggctgtgcacatatctgcagagagactccaaagggtggaatcgcttgcgagtgccgccccggctttgaactgaccaagaaccagcgagattgtaagctgacctgtaattatggtaacgggggctgccagcacacatgcgacgacacagagcaggggcctaggtgcggttgccatattaagttcgtgctacacactgacggcaaaacatgcatcggggagaggcgcctggagcagcatattccgactcaggcagtaagcaacgagacgtgcgcagtcaacaatggtgggtgtgatagtaagtgtcatgatgcagcaaccggtgtgcactgcacgtgtccagtggggttcatgctacagccagaccgtaaaacctgtaaggacatcgatgagtgccgtctgaacaacggggggtgcgatcatatttgtaggaataccgtgggaagctttgagtgcagctgtaaaaagggatacaagcttctaattaatgagaggaattgccaggatattgatgagtgtagtttcgaccgcacatgtgatcacatctgcgttaacacccccggcagtttccagtgtctttgccaccgtgggtaccttttatacggaattacacactgcggcgatgtcgacgaatgtagtattaatagaggaggatgccggttcggatgtatcaacacaccaggatcctatcaatgtacatgccctgccggccagggacgtctgcactggaacggcaaggattgcacagagccactcaagtgccaagggtcccccggcgctagcaaagcaatgctgtcctgcaatagatctggcaagaaagacacctgcgctttgacttgtccctcaagggcaagatttcttcccgagtcagaaaacggatttacagtctcttgtgggacaccctcaccacgggccgcaccagcacgtgcggggcataatggcaacagcacaaattctaaccactgccacgaagccgcagttctgtctattaagcagcgagcctccttcaaaatcaaggacgccaaatgtcggcttcatctgagaaacaaggggaaaactgaggaggcggggcgaattactgggcctggaggcgcaccctgctctgagtgccaggtcaccttcattcacctcaaatgcgatagcagtagaaaagggaaagggcggagggcccggaccccccccggaaaagaagtgactcgactgaccctggaactggaggccgaagtacgcgctgaggaaaccacagcctcctgtggtctcccctgtctccggcagcggatggaacggagacttaaaggctccctgaaaatgctgagaaaaagtatcaaccaggatagattcctgctgcgcctcgctggactggactacgaactggctcacaagccaggcctagtggctggtgaacgggctgagccgatggaaagctgccgccccggtcagcaccgagcaggtacgaaatgcgtatcctgcccacagggaacatattatcatggacaaaccgaacagtgcgttccatgccccgctggcacctttcaggaacgcgagggccagctttcctgtgacctgtgccccggatccgacgcacacggccctcttggagctaccaacgtcactacctgtgccggtcagtgccccccaggccaacattctgtggacggatttaaaccatgtcaaccctgcccgagaggcacttaccagccggaagccggacggacactctgtttcccttgcgggggggggttgactacaaagcatgagggcgcaatctcattccaagactgcgacacaaaggttcaatgttcccccggtcattactacaataccagcattcaccgatgcatcagatgtgcgatggggtcataccagcccgattttagacaaaacttttgttctagatgcccagggaacaccagtactgatttcgacggatccacttctgttgcccagtgtaagaatcggcaatgcggcggcgagctgggcgaatttaccggttacattgaatcccccaactatcctggtaattatcccgccggcgtggagtgcatatggaacattaacccaccaccaaaaagaaaaatccttattgtcgttcctgaaatattcctgccatcagaggacgagtgcggcgatgtgctggtgatgaggaagaattctagcccaagttccatcacgacctatgagacttgtcagacatacgagagacccatcgcgtttactgcaagaagcaggaagctgtggatcaattttaagacttctgaggccaattcagcacggggcttccagattccctatgttacctatgacgaagactatgagcagctggtggaagacatcgtgcgagatgggcggctgtatgcctctgaaaatcatcaagaaattctgaaggacaagaaactgattaaagccttctttgaagtgttagcgcatcctcagaattacttcaagtacaccgaaaagcataaggaaatgctgccaaaaagtttcattaagctgctgagaagcaaggtatcctcttttctgcggccttataaatag

SEQ ID NO: 268843 - DNA, 3030 bp, Artificial Sequence
  derived and/or modified sequence
atgggatctggaagagtcccagggctgtgcctacttgttttgctggtgcatgctagggcagcacaatactccaaggccgctcaggatgtggatgaatgtgtggaggggaccgataactgtcacatcgatgctatatgtcagaatacgccacggtcctataagtgcatctgcaagtctggctacactggcgacggaaaacactgtaaagacgtggatgagtgcgagcgtgaggacaatgcgggctgcgtgcatgactgcgtgaacatccccgggaattaccgctgtacatgttatgacggctttcatctagcacacgatggtcacaattgcctcgacgtagacgaatgcgcggaaggcaacgggggatgtcagcagagttgcgtcaacatgatgggcagctacgagtgccactgccgagagggttttttcttgtccgataaccagcatacgtgtatccaacgccccgaagaaggaatgaactgtatgaacaaaaatcatggctgtgcacacatttgcagagaaactcctaaaggcggcatagcatgcgagtgcaggcccgggttcgagttaacaaaaaatcaaagggattgcaaattgacatgcaattacggtaatggcggatgccagcacacgtgtgacgatacagaacaaggaccacgatgcgggtgtcatatcaaattcgtcctgcatactgacggaaaaacctgtattggggaacggagactggagcagcacatacccactcaggcagtgtccaatgagacgtgtgctgtgaataacgggggttgcgattcaaaatgtcatgatgccgccacaggagtccactgtacttgtccagtcggctttatgctccaacctgatcgaaagacttgcaaagatattgatgagtgtcgcctgaacaatggtggctgcgaccatatttgtagaaataccgtgggcagtttcgagtgttcatgcaaaaagggctacaaattgttaattaatgagaggaactgtcaggacattgatgaatgtagtttcgatcggacatgtgaccacatttgcgtaaacaccccaggctcttttcagtgtttgtgtcatcggggctatttgctttacggaattacccattgcggcgatgttgatgaatgttctattaaccgcgggggctgtaggtttggttgtatcaatacacctggctcataccagtgcacttgcccagccggacagggacgattacattggaatggaaaggattgtacagaaccactgaaatgccaggggagcccaggcgccagcaaggccatgctctcttgcaaccgctctggtaagaaagatacatgcgcccttacctgcccatcccgagcccggttcttgccagaatctgagaacggctttaccgtgagttgcggcacgccttcaccaagagccgcccccgccagggcaggacacaatggaaactcaactaactcaaatcactgtcatgaagccgccgtattaagtattaagcaaagggcctccttcaagatcaaggacgcaaaatgtcgactgcacctgaggaataaaggaaaaaccgaagaagctggccgcatcaccggccccggcggcgccccgtgcagcgagtgtcaggttacgtttatccatttaaagtgtgactcgagtcgaaagggtaaaggaagacgcgcccgcacccccccaggtaaagaagtcactaggctgacattggagcttgaggcagaggtgagagcagaagaaacaactgcaagctgtggcttgccctgtctcagacaacgcatggagaggagattaaaaggttccctgaagatgctcagaaagagtattaaccaggatcgctttctgctgaggttggcaggactggactacgaactagcccataagccaggtctggtagctggggagcgagcggagccaatggagtcttgtaggcccggacagcaccgagccggtaccaagtgtgtgtcctgcccccagggaacctactaccatggacagacagagcagtgcgtgccatgccccgccgggacctttcaggaaagagaaggacagctgagctgcgatctgtgtcccgggagcgatgctcatgggccgctaggagcaaccaatgtgaccacttgcgctggccaatgccctccaggacagcattctgtcgacggattcaagccttgtcaaccctgccctagaggaacctatcagcccgaagccggaaggaccctgtgcttcccatgcggcgggggcttgacaactaaacacgaaggcgctatttcatttcaagattgtgacacaaaggtgcagtgttcccccggtcactattacaacacatccattcaccgctgcattcggtgtgccatgggcagctaccagccagacttcaggcagaatttttgtagtcgatgccccggtaacacctctacagatttcgacggtagtactagtgtggcccagtgcaaaaatcgacaatgtggtggggaattaggcgagttcaccgggtacatcgagtccccaaattacccaggaaactacccagctggagttgagtgtatttggaacattaatcccccccctaagcggaaaatccttatagtggtgcctgagattttcttgccttctgaggatgaatgtggcgatgttcttgtgatgagaaagaactcaagtccctcatctattaccacttacgaaacctgccagacctatgagcggcccattgcgtttacagctaggtctcggaagctatggattaactttaaaacaagcgaagccaattctgcccgagggtttcagattccatacgttacttatgacgaagattatgagcagctcgtagaagacatagtacgcgacggaaggctgtacgcttcagagaaccaccaagaaatcctaaaggacaagaagctcatcaaggcctttttcgaagttcttgcccacccacaaaactactttaaatataccgaaaagcacaaggaaatgctgcctaaatcctttattaagctactcaggtccaaagtgtcatcctttctccgcccatacaagtag

SEQ ID NO: 268844 - DNA, 3030 bp, Artificial Sequence
  derived and/or modified sequence
atgggcagcggcagagtgcccggcctgtgcctgctggtgctgctggtgcacgccagagccgcccagtacagcaaggccgcccaggacgtggacgagtgcgtggagggcaccgacaactgccacatcgacgccatctgccagaacacccccagaagctacaagtgcatctgcaagagcggctacaccggcgacggcaagcactgcaaggacgtggacgagtgcgagagagaggacaacgccggctgcgtgcacgactgcgtgaacatccccggcaactacagatgcacctgctacgacggcttccacctggcccacgacggccacaactgcctggacgtggacgagtgcgccgagggcaacggcggctgccagcagagctgcgtgaacatgatgggcagctacgagtgccactgcagagagggcttcttcctgagcgacaaccagcacacctgcatccagagacccgaggagggcatgaactgcatgaacaagaaccacggctgcgcccacatctgcagagagacccccaagggcggcatcgcctgcgagtgcagacccggcttcgagctgaccaagaaccagagagactgcaagctgacctgcaactacggcaacggcggctgccagcacacctgcgacgacaccgagcagggccccagatgcggctgccacatcaagttcgtgctgcacaccgacggcaagacctgcatcggcgagagaagactggagcagcacatccccacccaggccgtgagcaacgagacctgcgccgtgaacaacggcggctgcgacagcaagtgccacgacgccgccaccggcgtgcactgcacctgccccgtgggcttcatgctgcagcccgacagaaagacctgcaaggacatcgacgagtgcagactgaacaacggcggctgcgaccacatctgcagaaacaccgtgggcagcttcgagtgcagctgcaagaagggctacaagctgctgatcaacgagagaaactgccaggacatcgacgagtgcagcttcgacagaacctgcgaccacatctgcgtgaacacccccggcagcttccagtgcctgtgccacagaggctacctgctgtacggcatcacccactgcggcgacgtggacgagtgcagcatcaacagaggcggctgcagattcggctgcatcaacacccccggcagctaccagtgcacctgccccgccggccagggcagactgcactggaacggcaaggactgcaccgagcccctgaagtgccagggcagccccggcgccagcaaggccatgctgagctgcaacagaagcggcaagaaggacacctgcgccctgacctgccccagcagagccagattcctgcccgagagcgagaacggcttcaccgtgagctgcggcacccccagccccagagccgcccccgccagagccggccacaacggcaacagcaccaacagcaaccactgccacgaggccgccgtgctgagcatcaagcagagagccagcttcaagatcaaggacgccaagtgcagactgcacctgagaaacaagggcaagaccgaggaggccggcagaatcaccggccccggcggcgccccctgcagcgagtgccaggtgaccttcatccacctgaagtgcgacagcagcagaaagggcaagggcagaagagccagaaccccccccggcaaggaggtgaccagactgaccctggagctggaggccgaggtgagagccgaggagaccaccgccagctgcggcctgccctgcctgagacagagaatggagagaagactgaagggcagcctgaagatgctgagaaagagcatcaaccaggacagattcctgctgagactggccggcctggactacgagctggcccacaagcccggcctggtggccggcgagagagccgagcccatggagagctgcagacccggccagcacagagccggcaccaagtgcgtgagctgcccccagggcacctactaccacggccagaccgagcagtgcgtgccctgccccgccggcaccttccaggagagagagggccagctgagctgcgacctgtgccccggcagcgacgcccacggccccctgggcgccaccaacgtgaccacctgcgccggccagtgcccccccggccagcacagcgtggacggcttcaagccctgccagccctgccccagaggcacctaccagcccgaggccggcagaaccctgtgcttcccctgcggcggcggcctgaccaccaagcacgagggcgccatcagcttccaggactgcgacaccaaggtgcagtgcagccccggccactactacaacaccagcatccacagatgcatcagatgcgccatgggcagctaccagcccgacttcagacagaacttctgcagcagatgccccggcaacaccagcaccgacttcgacggcagcaccagcgtggcccagtgcaagaacagacagtgcggcggcgagctgggcgagttcaccggctacatcgagagccccaactaccccggcaactaccccgccggcgtggagtgcatctggaacatcaaccccccccccaagagaaagatcctgatcgtggtgcccgagatcttcctgcccagcgaggacgagtgcggcgacgtgctggtgatgagaaagaacagcagccccagcagcatcaccacctacgagacctgccagacctacgagagacccatcgccttcaccgccagaagcagaaagctgtggatcaacttcaagaccagcgaggccaacagcgccagaggcttccagatcccctacgtgacctacgacgaggactacgagcagctggtggaggacatcgtgagagacggcagactgtacgccagcgagaaccaccaggagatcctgaaggacaagaagctgatcaaggccttcttcgaggtgctggcccacccccagaactacttcaagtacaccgagaagcacaaggagatgctgcccaagagcttcatcaagctgctgagaagcaaggtgagcagcttcctgagaccctacaagtag

SEQ ID NO: 268845 - DNA, 3030 bp, Artificial Sequence
  derived and/or modified sequence
atgggttcagggcgggtacctggactctgccttctggtcttgcttgtccatgcaagggcagctcaatatagtaaagccgcccaggacgtggatgagtgcgtagaagggacagacaattgtcacatagacgccatttgtcagaataccccccggtcatacaagtgtatctgtaaaagcggatatactggcgacgggaagcactgtaaggacgtcgacgaatgtgaaagagaggataatgctgggtgtgtgcatgactgcgtgaacataccgggcaattatcgctgcacctgctatgacggcttccatctggcacatgacggacataactgtcttgatgtggacgaatgtgcggagggcaacggtggctgtcaacagtcatgtgtgaacatgatgggctcttatgagtgtcactgccgcgaggggttcttcctttccgataaccaacatacatgtatccagcgccccgaggaggggatgaattgcatgaacaaaaatcatgggtgcgcccatatctgcagagagacacccaagggtggaattgcttgtgagtgtaggccaggattcgaacttacaaagaatcagcgcgactgcaaactgacatgtaattatgggaacggcggttgtcagcacacttgtgatgacactgaacagggcccccgttgcgggtgtcacattaagttcgtgctgcatacagatggcaaaacctgcatcggagaacggcgcttagagcagcacatcccaacgcaggcagtgagcaacgaaacgtgtgccgtgaacaacggcggttgtgatagcaagtgccacgacgcggccaccggtgtgcattgtacgtgtcccgtggggtttatgctccagccagatcggaagacatgcaaggacatagacgagtgtaggctcaacaacggcggttgcgatcatatttgccgtaataccgtaggcagtttcgaatgcagctgtaagaaggggtataagctcctcattaacgaaaggaattgccaggacatcgatgaatgctcttttgacaggacatgtgatcatatttgcgtgaatacacccgggagtttccagtgtctgtgccaccggggatatctactgtacggcatcacgcactgcggtgacgtggacgaatgtagcataaaccggggaggctgtagattcggctgtatcaacactccaggcagctatcagtgcacctgcccagctgggcaggggcgtctgcactggaatgggaaagactgcacagaacctctaaaatgccaagggagcccaggcgcctctaaagctatgctttcatgtaatagatctggcaagaaggacacatgcgcactgacttgtccttcccgagctagattcctgcctgagtccgaaaacgggttcactgtttcctgtgggaccccttccccacgggctgcccccgcgcgggctgggcacaacggcaattccaccaatagcaaccattgtcacgaagctgcagtgttatccattaaacaacgcgcatccttcaaaattaaagacgccaagtgccggctgcacctaagaaacaaaggaaagacggaggaggcaggtaggatcactggcccgggcggcgccccttgcagcgagtgccaggtgacattcattcacctgaagtgcgactcaagccggaaagggaaagggcgccgagcccgcacaccccccgggaaggaagtgactcgtctgactctcgaattagaggcggaggtacgggccgaagagacaactgcatcttgtggtctcccgtgcctacggcaacggatggagcggcgcctgaaggggagtctcaaaatgctgagaaagtcgatcaatcaggatcgctttctcctcaggctcgcaggtctggactatgagctggcacataagcctgggttggtggctggcgaaagagctgaacctatggagagctgtaggcccgggcagcatcgggccgggacaaaatgcgtaagctgtccgcagggtacctactatcacggacagaccgaacagtgtgtaccgtgtcccgcggggacgttccaggagcgcgaagggcagctgagctgtgacctatgccccggctctgacgctcatggccctctgggtgccacaaacgtcacaacgtgcgctggccagtgtccaccaggacagcattctgtagatggcttcaagccttgtcagccctgccctcgcgggacatatcaacctgaagccgggaggaccctgtgctttccatgtggaggaggactcaccacaaagcatgaaggcgcaatcagttttcaggattgtgacacaaaagtccaatgctctccgggccactattataatacttcaatccatcgatgtattaggtgcgccatgggaagttatcaaccagacttccggcagaatttctgctcccgctgtcccggcaacacttccacggactttgacggtagcactagcgtcgcccagtgtaagaacaggcagtgtggtggggagcttggtgaatttacaggctatattgaaagcccaaattaccctggcaactatcccgctggcgtggagtgcatctggaatatcaacccaccccccaagcgcaaaatactgattgtggtgcccgaaattttcttgccatccgaggacgaatgtggcgatgtccttgtgatgcggaaaaactcatctccctcctccatcactacatatgaaacctgccaaacttatgagagacctattgcgttcacagcccgcagccgcaagctgtggatcaatttcaaaacatctgaggcaaacagtgcccgcggcttccagattccctatgtcacctacgacgaggattacgaacagctggttgaggacatcgtgagggatggtaggctatacgcctccgaaaatcatcaagaaatcctaaaggataagaagctaattaaagccttcttcgaggtgctagctcacccccagaactacttcaagtatactgaaaaacacaaggaaatgcttcctaagagctttataaagttgttaaggtcgaaggtgagctcctttcttcgcccatacaagtag

SEQ ID NO: 268846 - DNA, 3030 bp, Artificial Sequence
  derived and/or modified sequence
atgggcagcggccgggtgcccggcctgtgcctgctggtgctgctggtgcacgcccgggccgcccagtacagcaaggccgcccaggatgtggatgaatgtgtggagggcacagacaactgccacattgatgccatctgccagaacacccccaggagctacaagtgcatctgcaagagcggctacacaggagatggcaagcactgcaaggatgtggatgaatgtgaaagagaagataatgccggctgtgtgcatgactgtgtgaacatccctggcaactaccgctgcacctgctatgatggcttccacctggcccatgatggccacaactgcctggatgtggatgaatgtgccgagggcaatggaggctgccagcagagctgtgtgaacatgatgggcagctatgagtgccactgccgggagggcttcttcctgagtgacaaccagcacacctgcatccagaggcctgaggagggcatgaactgcatgaacaagaaccacggctgtgcccacatctgccgggagacccccaagggcggcatcgcctgtgaatgtcggcccggctttgagctgaccaagaaccagagggactgcaagctgacctgcaactatggaaatggaggctgccagcacacctgtgatgacacagagcagggcccccgctgtggctgccacatcaagtttgtgctgcacacagatggcaagacctgcattggagagcggcggctggagcagcacatccccacccaggccgtgtccaatgagacctgtgctgtgaacaacggcggctgtgacagcaagtgccatgatgctgccaccggggtgcactgcacctgccctgtgggcttcatgctgcagcctgacaggaagacctgcaaggacattgatgagtgccgcctgaacaatggaggctgtgaccacatctgcaggaacacagtgggcagctttgagtgcagctgcaagaagggctacaagctgctgatcaatgaaagaaactgccaggacattgatgaatgttcctttgacaggacctgtgaccacatctgtgtgaacaccccaggcagcttccagtgcctgtgccaccggggctacctgctgtatggcatcacccactgtggagatgtggatgagtgcagcatcaacagaggaggctgccgcttcggctgcatcaacaccccaggcagctaccagtgcacctgcccagctggccagggccgcctgcactggaatggcaaggactgcacagagcccctgaagtgccagggcagccctggggccagcaaggccatgctgagctgcaacagaagtggcaagaaggacacctgtgccctgacctgccccagccgggcccgcttcctgcctgagagtgaaaatggcttcaccgtgtcctgtggcacccccagcccccgggccgccccagcccgggccggccacaacggcaacagcaccaacagcaaccactgccacgaggccgctgtgctgagcatcaagcagagggccagcttcaagatcaaggatgccaagtgccgcctgcacctgagaaataaaggcaagacagaggaggccggccgcatcactggacctggaggagccccctgcagcgagtgccaggtgaccttcatccacctgaagtgtgacagcagcaggaaaggaaaaggaagaagagcccggaccccacctgggaaggaggtgacccggctgaccctggagctggaggccgaggtgcgggcagaggagaccacagccagctgtggcctgccctgcctgcggcagaggatggagcggcggctgaagggcagcctgaagatgctgaggaagagcatcaaccaggaccgcttcctgctgcggctggccggcctggactatgagctggcccacaagccaggcctggtggccggggagagagctgagcccatggagagctgcaggcctggccagcaccgggccggcaccaagtgtgtgtcctgcccccagggcacctactaccacggccagacagagcagtgtgtgccctgcccagctggcaccttccaggagcgggagggccagctgagctgtgacctgtgccccggcagtgatgcccacggccccctgggcgccaccaacgtgaccacctgtgccggccagtgccccccaggccagcacagcgtggatggcttcaagccctgccagccctgcccccggggcacctaccagcctgaggccggccgcaccctgtgcttcccctgtggcggcggcctgaccaccaagcatgagggcgccatctccttccaggactgtgacaccaaggtgcagtgcagccctggccactactacaacaccagcatccaccgctgcatccgctgtgccatgggcagctaccagcctgacttccggcagaacttctgcagccgctgccccggcaacaccagcacagactttgatggcagcacctctgtggcccagtgcaagaaccggcagtgtggcggggagctgggggagttcaccggctacatcgagagccccaactacccaggcaactacccagctggggtggagtgcatctggaacatcaaccccccacccaagaggaagatcctgattgtggtgcctgagatcttcctgcccagtgaagatgaatgtggagatgtgctggtgatgaggaagaacagcagccccagcagcatcaccacctatgagacctgccagacctatgagcggcccatcgccttcaccgcccggagcaggaagctgtggatcaacttcaagaccagcgaggccaacagcgcccggggcttccagatcccctacgtgacctatgatgaggactatgagcagctggtggaggacatcgtgagagatggccgcctgtatgccagcgagaaccaccaggagatcctgaaggacaagaagctgatcaaggccttctttgaggtgctggcccacccccagaactacttcaagtacacagagaagcacaaggagatgctgcccaagagcttcatcaagctgctgcggagcaaggtgtcctccttcctgcggccctacaagtag

SEQ ID NO: 268847 - DNA, 3030 bp, Artificial Sequence
  derived and/or modified sequence
atgggcagcggccgggtgcccggcctgtgcctgctggtgctgctggtgcatgcacgagcggcacagtactcaaaagctgcccaagacgtagacgaatgcgtggagggcactgataattgtcacatcgacgcgatatgccagaatacacctaggagctacaaatgcatttgtaagtcaggatatacgggtgatggcaaacactgtaaggacgtggatgaatgcgaacgggaagataacgccggttgcgtgcatgattgtgtgaacatacccgggaattacagatgcacctgctatgacggcttccacctagctcatgatggccataactgcctggacgtggatgaatgcgccgagggcaatggcgggtgtcaacaatcatgtgtgaacatgatgggaagctatgaatgccattgcagagaagggttttttctttccgacaaccaacacacttgcattcaaagacctgaagagggcatgaattgtatgaataagaaccatggatgcgctcatatctgcagagagacccctaaagggggcattgcttgcgaatgccggcctggcttcgagctgactaagaaccagcgagattgcaaattgacctgcaattacgggaacggcgggtgtcagcacacctgcgacgacactgagcagggaccgcggtgcggctgccatataaagttcgtgctgcacacagatggaaagacttgcatcggcgagcggcggctagagcagcacataccaacacaggccgtgtctaacgaaacttgtgccgtgaacaacggtggatgtgactccaagtgtcacgacgcagcgaccggcgttcattgtacttgccccgttggttttatgctccagccagacaggaagacatgtaaggacatcgatgagtgtcgattgaacaacggtggctgcgaccacatttgcaggaacacggtgggctcatttgagtgctcgtgcaagaaaggctataaactgctaattaacgaacgtaactgccaagatatcgatgaatgttctttcgaccggacctgcgatcatatttgcgtgaacacacctgggtcttttcagtgtctgtgccaccgaggatatctgctttacggaattacacactgtggcgacgtagacgaatgcagcatcaaccgggggggctgcagattcggctgcatcaatacaccaggaagttaccagtgcacctgcccagctggacagggcaggctgcactggaacggaaaggactgcacagagccactgaagtgccaaggctctcccggtgcctccaaagcaatgctctcgtgtaataggtcggggaaaaaggatacatgcgccctgacatgccccagtagagcccgatttctgcctgaatccgaaaacggctttacagtcagctgcggcaccccctcgcctagagctgctcctgcccgagcgggtcacaacggaaactctacaaatagtaatcactgccacgaggcagccgtattatctataaagcagagagctagcttcaaaatcaaggacgcaaagtgcagattgcatttgcgcaacaagggcaagactgaagaggccggccgcatcacaggaccaggaggcgctccttgctccgagtgccaggttacctttatacatctgaagtgtgactcgtcgcgcaaagggaaaggtcgccgcgcccggacaccgccgggcaaagaagtgacacgcttgacacttgagctggaagccgaagtgcgggccgaagagacaactgcatcatgtggcctcccttgcctgcgccagaggatggaaaggaggctgaaaggttccctgaaaatgctgagaaagagtataaatcaggaccgattcctcctgcggctggccggcctggactatgagctggcacacaagccaggattggtcgctggggaacgggccgagcccatggaatcctgcaggccgggccagcatcgtgctggtacaaagtgtgtaagctgtccccagggcacctattaccacggacagaccgagcagtgcgtgccctgtccggccgggacattccaagagcgagagggccagttgagctgcgacctatgtcctggtagcgatgctcacggccccctgggagccacaaatgtgactacctgtgctggacaatgtccccccggacagcacagtgttgatggatttaagccctgccagccatgcccgcggggaacttaccaacctgaggccggcagaactttatgctttccgtgtggaggcggcctgaccacaaagcacgaaggtgcgatttcttttcaggattgcgacaccaaagttcagtgctcgccaggccattactacaatacttctattcacaggtgcattcgctgcgccatggggtcgtatcagcccgattttcgccaaaatttttgtagccgatgtccagggaatacatccactgatttcgacggaagcacgagtgtggctcagtgcaagaaccgtcagtgtggaggtgaactcggtgagtttacaggatacattgaatcaccaaactaccctggaaattatccagcaggggtggaatgcatctggaatattaaccctccccccaagcggaaaatcctcattgtggtgccagaaatctttctcccgagcgaggatgagtgcggggacgtgctggtcatgaggaaaaactcttcaccatcaagcatcactacctacgaaacctgccagacttacgagcggccgatagctttcacagcgagatctcgaaagttgtggattaattttaaaactagtgaggcaaacagcgccaggggcttccagattccatacgtgacttacgacgaggattatgagcagctggttgaggatattgttcgggatggccgattgtacgcatcagagaatcatcaagagatactcaaagataagaagctcatcaaggctttttttgaggtattagcacacccccagaattattttaaatacaccgaaaaacacaaggaaatgctccccaagtctttcattaaattattgcggtctaaggtgagtagtttccttcgcccctacaagtag

SEQ ID NO: 268848 - RNA, 3030 nt, Artificial Sequence
  derived and/or modified sequence
auggggucagggcgcgugcccggccuuugccuuuuggugcuucucgugcaugcacgugcagcgcaguacuccaaagccgcccaggaugucgaugaguguguugaagggacagauaacugccacauugacgccaucugccagaauacgccacgcuccuauaaaugcauuugcaaguccgguuacacuggggacggaaaacacugcaaggacguggaugagugugaaagggaggacaaugccggcuguguccaugacugcgucaauauccccgguaacuacagauguacuugcuaugacggcuuucauuuagcacaugauggccacaacugucuugauguggaugaaugugccgagggcaauggcggcugccaacaaucaugcgugaacaugaugggcaguuaugaaugucacugccgggaaggcuucuucuugucagauaaccagcauaccuguauccagcguccugaggagggcaugaacuguaugaauaaaaaccauggcugugcacauaucugcagagagacuccaaaggguggaaucgcuugcgagugccgccccggcuuugaacugaccaagaaccagcgagauuguaagcugaccuguaauuaugguaacgggggcugccagcacacaugcgacgacacagagcaggggccuaggugcgguugccauauuaaguucgugcuacacacugacggcaaaacaugcaucggggagaggcgccuggagcagcauauuccgacucaggcaguaagcaacgagacgugcgcagucaacaauggugggugugauaguaagugucaugaugcagcaaccggugugcacugcacguguccagugggguucaugcuacagccagaccguaaaaccuguaaggacaucgaugagugccgucugaacaacggggggugcgaucauauuuguaggaauaccgugggaagcuuugagugcagcuguaaaaagggauacaagcuucuaauuaaugagaggaauugccaggauauugaugaguguaguuucgaccgcacaugugaucacaucugcguuaacacccccggcaguuuccagugucuuugccaccguggguaccuuuuauacggaauuacacacugcggcgaugucgacgaauguaguauuaauagaggaggaugccgguucggauguaucaacacaccaggauccuaucaauguacaugcccugccggccagggacgucugcacuggaacggcaaggauugcacagagccacucaagugccaagggucccccggcgcuagcaaagcaaugcuguccugcaauagaucuggcaagaaagacaccugcgcuuugacuugucccucaagggcaagauuucuucccgagucagaaaacggauuuacagucucuugugggacacccucaccacgggccgcaccagcacgugcggggcauaauggcaacagcacaaauucuaaccacugccacgaagccgcaguucugucuauuaagcagcgagccuccuucaaaaucaaggacgccaaaugucggcuucaucugagaaacaaggggaaaacugaggaggcggggcgaauuacugggccuggaggcgcacccugcucugagugccaggucaccuucauucaccucaaaugcgauagcaguagaaaagggaaagggcggagggcccggaccccccccggaaaagaagugacucgacugacccuggaacuggaggccgaaguacgcgcugaggaaaccacagccuccuguggucuccccugucuccggcagcggauggaacggagacuuaaaggcucccugaaaaugcugagaaaaaguaucaaccaggauagauuccugcugcgccucgcuggacuggacuacgaacuggcucacaagccaggccuaguggcuggugaacgggcugagccgauggaaagcugccgccccggucagcaccgagcagguacgaaaugcguauccugcccacagggaacauauuaucauggacaaaccgaacagugcguuccaugccccgcuggcaccuuucaggaacgcgagggccagcuuuccugugaccugugccccggauccgacgcacacggcccucuuggagcuaccaacgucacuaccugugccggucagugccccccaggccaacauucuguggacggauuuaaaccaugucaacccugcccgagaggcacuuaccagccggaagccggacggacacucuguuucccuugcggggggggguugacuacaaagcaugagggcgcaaucucauuccaagacugcgacacaaagguucaauguucccccggucauuacuacaauaccagcauucaccgaugcaucagaugugcgauggggucauaccagcccgauuuuagacaaaacuuuuguucuagaugcccagggaacaccaguacugauuucgacggauccacuucuguugcccaguguaagaaucggcaaugcggcggcgagcugggcgaauuuaccgguuacauugaaucccccaacuauccugguaauuaucccgccggcguggagugcauauggaacauuaacccaccaccaaaaagaaaaauccuuauugucguuccugaaauauuccugccaucagaggacgagugcggcgaugugcuggugaugaggaagaauucuagcccaaguuccaucacgaccuaugagacuugucagacauacgagagacccaucgcguuuacugcaagaagcaggaagcuguggaucaauuuuaagacuucugaggccaauucagcacggggcuuccagauucccuauguuaccuaugacgaagacuaugagcagcugguggaagacaucgugcgagaugggcggcuguaugccucugaaaaucaucaagaaauucugaaggacaagaaacugauuaaagccuucuuugaaguguuagcgcauccucagaauuacuucaaguacaccgaaaagcauaaggaaaugcugccaaaaaguuucauuaagcugcugagaagcaagguauccucuuuucugcggccuuauaaauag

SEQ ID NO: 268849 - RNA, 3030 nt, Artificial Sequence
  derived and/or modified sequence
augggaucuggaagagucccagggcugugccuacuuguuuugcuggugcaugcuagggcagcacaauacuccaaggccgcucaggauguggaugaauguguggaggggaccgauaacugucacaucgaugcuauaugucagaauacgccacgguccuauaagugcaucugcaagucuggcuacacuggcgacggaaaacacuguaaagacguggaugagugcgagcgugaggacaaugcgggcugcgugcaugacugcgugaacauccccgggaauuaccgcuguacauguuaugacggcuuucaucuagcacacgauggucacaauugccucgacguagacgaaugcgcggaaggcaacgggggaugucagcagaguugcgucaacaugaugggcagcuacgagugccacugccgagaggguuuuuucuuguccgauaaccagcauacguguauccaacgccccgaagaaggaaugaacuguaugaacaaaaaucauggcugugcacacauuugcagagaaacuccuaaaggcggcauagcaugcgagugcaggcccggguucgaguuaacaaaaaaucaaagggauugcaaauugacaugcaauuacgguaauggcggaugccagcacacgugugacgauacagaacaaggaccacgaugcgggugucauaucaaauucguccugcauacugacggaaaaaccuguauuggggaacggagacuggagcagcacauacccacucaggcaguguccaaugagacgugugcugugaauaacggggguugcgauucaaaaugucaugaugccgccacaggaguccacuguacuuguccagucggcuuuaugcuccaaccugaucgaaagacuugcaaagauauugaugagugucgccugaacaaugguggcugcgaccauauuuguagaaauaccgugggcaguuucgaguguucaugcaaaaagggcuacaaauuguuaauuaaugagaggaacugucaggacauugaugaauguaguuucgaucggacaugugaccacauuugcguaaacaccccaggcucuuuucaguguuugugucaucggggcuauuugcuuuacggaauuacccauugcggcgauguugaugaauguucuauuaaccgcgggggcuguagguuugguuguaucaauacaccuggcucauaccagugcacuugcccagccggacagggacgauuacauuggaauggaaaggauuguacagaaccacugaaaugccaggggagcccaggcgccagcaaggccaugcucucuugcaaccgcucugguaagaaagauacaugcgcccuuaccugcccaucccgagcccgguucuugccagaaucugagaacggcuuuaccgugaguugcggcacgccuucaccaagagccgcccccgccagggcaggacacaauggaaacucaacuaacucaaaucacugucaugaagccgccguauuaaguauuaagcaaagggccuccuucaagaucaaggacgcaaaaugucgacugcaccugaggaauaaaggaaaaaccgaagaagcuggccgcaucaccggccccggcggcgccccgugcagcgagugucagguuacguuuauccauuuaaagugugacucgagucgaaaggguaaaggaagacgcgcccgcacccccccagguaaagaagucacuaggcugacauuggagcuugaggcagaggugagagcagaagaaacaacugcaagcuguggcuugcccugucucagacaacgcauggagaggagauuaaaagguucccugaagaugcucagaaagaguauuaaccaggaucgcuuucugcugagguuggcaggacuggacuacgaacuagcccauaagccaggucugguagcuggggagcgagcggagccaauggagucuuguaggcccggacagcaccgagccgguaccaaguguguguccugcccccagggaaccuacuaccauggacagacagagcagugcgugccaugccccgccgggaccuuucaggaaagagaaggacagcugagcugcgaucugugucccgggagcgaugcucaugggccgcuaggagcaaccaaugugaccacuugcgcuggccaaugcccuccaggacagcauucugucgacggauucaagccuugucaacccugcccuagaggaaccuaucagcccgaagccggaaggacccugugcuucccaugcggcgggggcuugacaacuaaacacgaaggcgcuauuucauuucaagauugugacacaaaggugcaguguucccccggucacuauuacaacacauccauucaccgcugcauucggugugccaugggcagcuaccagccagacuucaggcagaauuuuuguagucgaugccccgguaacaccucuacagauuucgacgguaguacuaguguggcccagugcaaaaaucgacaaugugguggggaauuaggcgaguucaccggguacaucgaguccccaaauuacccaggaaacuacccagcuggaguugaguguauuuggaacauuaauccccccccuaagcggaaaauccuuauaguggugccugagauuuucuugccuucugaggaugaauguggcgauguucuugugaugagaaagaacucaagucccucaucuauuaccacuuacgaaaccugccagaccuaugagcggcccauugcguuuacagcuaggucucggaagcuauggauuaacuuuaaaacaagcgaagccaauucugcccgaggguuucagauuccauacguuacuuaugacgaagauuaugagcagcucguagaagacauaguacgcgacggaaggcuguacgcuucagagaaccaccaagaaauccuaaaggacaagaagcucaucaaggccuuuuucgaaguucuugcccacccacaaaacuacuuuaaauauaccgaaaagcacaaggaaaugcugccuaaauccuuuauuaagcuacucagguccaaagugucauccuuucuccgcccauacaaguag

SEQ ID NO: 268850 - protein, 210 aa, Artificial Sequence
  derived and/or modified sequence
MVSGSEQKFLIGLGKSQIYTWDGRQSDRWIKLDLKTELPRDTLLSVEIVHELKGEGKAQRKISAIHILDVLVLNGTDVREQHFNQRIQLAEKFVKAVSKPSRPDMNPIRVKEVYRLEEMEKIFVRLEMKIIKGSSGTPKLSYTGRDDRHFVPMGLYIVRTVNEPWTMGFSKSFKKKFFYNKKTKDSTFDLPADSIAPFHLPSLACLSKMD

SEQ ID NO: 268851 - protein, 156 aa, Artificial Sequence
  derived and/or modified sequence
  misc_feature (1)..(1): Xaa can be any naturally occurring amino acid
XGKAQRKISAIHILDVLVLNGTDVREQHFNQRIQLAEKFVKAVSKPSRPDMNPIRVKEVYRLEEMEKIFVRLEMKIIKGSSGTPKLSYTGRDDRHFVPMGLYIVRTVNEPWTMGFSKSFKKKFFYNKKTKDSTFDLPADSIAPFHLPSLACLSKMD

SEQ ID NO: 268852 - DNA, 633 bp, Artificial Sequence
  derived and/or modified sequence
atggtgagcggcagcgagcagaagttcctgatcggcctgggcaagagccagatctacacctgggacggcagacagagcgacagatggatcaagctggacctgaagaccgagctgcccagagacaccctgctgagcgtggagatcgtgcacgagctgaagggcgagggcaaggcccagagaaagatcagcgccatccacatcctggacgtgctggtgctgaacggcaccgacgtgagagagcagcacttcaaccagagaatccagctggccgagaagttcgtgaaggccgtgagcaagcccagcagacccgacatgaaccccatcagagtgaaggaggtgtacagactggaggagatggagaagatcttcgtgagactggagatgaagatcatcaagggcagcagcggcacccccaagctgagctacaccggcagagacgacagacacttcgtgcccatgggcctgtacatcgtgagaaccgtgaacgagccctggaccatgggcttcagcaagagcttcaagaagaagttcttctacaacaagaagaccaaggacagcaccttcgacctgcccgccgacagcatcgcccccttccacctgcccagcctggcctgcctgagcaagatggactag

SEQ ID NO: 268853 - DNA, 471 bp, Artificial Sequence
  derived and/or modified sequence
tgaggcaaggcccagagaaagatcagcgccatccacatcctggacgtgctggtgctgaacggcaccgacgtgagagagcagcacttcaaccagagaatccagctggccgagaagttcgtgaaggccgtgagcaagcccagcagacccgacatgaaccccatcagagtgaaggaggtgtacagactggaggagatggagaagatcttcgtgagactggagatgaagatcatcaagggcagcagcggcacccccaagctgagctacaccggcagagacgacagacacttcgtgcccatgggcctgtacatcgtgagaaccgtgaacgagccctggaccatgggcttcagcaagagcttcaagaagaagttcttctacaacaagaagaccaaggacagcaccttcgacctgcccgccgacagcatcgcccccttccacctgcccagcctggcctgcctgagcaagatggactag

SEQ ID NO: 268854 - DNA, 633 bp, Artificial Sequence
  derived and/or modified sequence
atggtgagcgggagcgaacagaagttcctgattggtctcggaaagtctcagatatatacatgggacggtcgccagagcgaccgctggattaaactggatctgaagaccgagttgcctcgggacactttgttgagcgttgaaatagtacacgaattgaaaggagagggcaaggcacagaggaagatttctgctatacatatccttgatgtcctagtactgaatggaactgatgttcgcgagcagcatttcaaccagcgaattcagctggccgaaaagttcgtcaaggccgtctcaaaacccagtaggcccgacatgaaccccatccgagtgaaggaggtctacaggctcgaggagatggaaaaaatcttcgtgcggctcgagatgaagattataaaagggtcctctggcactccgaagttgtcatatactggtagggacgacaggcacttcgtccctatgggcctttacatcgtgaggacagtgaacgagccctggaccatgggcttcagcaaatccttcaagaagaaattcttctataataaaaaaacaaaggactcgaccttcgacctcccagccgattccattgctcctttccatctgcctagtctggcctgtttgtctaaaatggattag

SEQ ID NO: 268855 - DNA, 471 bp, Artificial Sequence
  derived and/or modified sequence
taagggaaagcacagcgcaagattagtgcaatccacatattggacgtgctggtgttgaacgggactgacgttcgcgagcagcacttcaatcagcgcatccagcttgccgagaaattcgtgaaggcagtgagcaaaccatctcgaccagacatgaatccaattagggtgaaggaggtgtacaggctcgaagaaatggagaagattttcgtcaggctcgaaatgaaaattatcaaaggctccagcggcacaccaaaactgagctacacaggccgcgacgacaggcacttcgttcctatgggtctgtatatcgtgcggaccgtcaacgaaccttggactatggggttctctaaatcttttaagaagaagtttttttacaacaagaagaccaaagacagcacattcgatctacctgcagactcaattgctccattccacctgccctctcttgcatgcctgagcaagatggattag

SEQ ID NO: 268856 - DNA, 792 bp, Artificial Sequence
  derived and/or modified sequence
atcccagaccaggctcgtgtggctccttcttcctccgaccctaaatcgaagttctttgagctaatccagggcactgagattgacatcttcagctacaagcccacactgctcacctctaaaaccctggagaagatccgccctgtgtttgactaccgctgcatggtatctggcagtgagcagaagttcctcatcggcctggggaaatcccagatctacacatgggatggccgccagtcagaccgctggatcaagctagacctgaagacagagctgccccgggacactctgctatctgtggaaattgtgcatgagctgaaaggggaggggaaggcccagaggaagatcagtgccatccacatcctcgatgtccttgtgctgaatggcaccgacgttcgggagcagcactttaaccagcgaattcagcttgccgagaaatttgtgaaagccgtttccaagcctagtcggcccgacatgaatcccatcagggtgaaggaggtgtacagactggaagagatggagaagatttttgtcaggttggagatgaagatcatcaagggctccagtggcaccccaaagctcagctacacagggcgtgatgaccggcactttgtacccatgggcctctacatcgtcaggacagtgaatgagccctggactatgggattcagcaaaagcttcaagaagaagttcttctacaacaagaaaaccaaggactctacttttgacctccctgcagactccattgccccatttcacctccccagccttgcctgcctgtcgaagatggattaa

SEQ ID NO: 268857 - DNA, 633 bp, Artificial Sequence
  derived and/or modified sequence
atggtgtctggcagcgagcagaagttcctgattggcctgggcaagagccagatctacacctgggatggccggcagagcgaccgctggatcaagctggacctgaagacagagctgccccgggacaccctgctgtctgtggagatcgtgcatgagctgaagggggagggcaaggcccagaggaagatcagcgccatccacatcctggatgtgctggtgctgaatggaacagatgtgcgggagcagcacttcaaccagaggatccagctggccgagaagtttgtgaaggctgtgtccaagcccagcaggccagacatgaaccccatccgggtgaaggaggtgtaccgcctggaggagatggagaagatctttgtgcggctggagatgaagatcatcaagggcagcagcggcacccccaagctgagctacacaggaagagatgacagacactttgtgcccatgggcctgtacatcgtgaggacagtgaatgagccctggaccatgggcttcagcaagagcttcaagaagaagttcttctacaacaagaagaccaaggacagcacctttgacctgcctgctgacagcatcgcccccttccacctgcccagcctggcctgcctgagcaagatggactag

SEQ ID NO: 268858 - DNA, 471 bp, Artificial Sequence
  derived and/or modified sequence
tgaggaaaggcccagaggaagatcagcgccatccacatcctggatgtgctggtgctgaatggaacagatgtgcgggagcagcacttcaaccagaggatccagctggccgagaagtttgtgaaggctgtgtccaagcccagcaggccagacatgaaccccatccgggtgaaggaggtgtaccgcctggaggagatggagaagatctttgtgcggctggagatgaagatcatcaagggcagcagcggcacccccaagctgagctacacaggaagagatgacagacactttgtgcccatgggcctgtacatcgtgaggacagtgaatgagccctggaccatgggcttcagcaagagcttcaagaagaagttcttctacaacaagaagaccaaggacagcacctttgacctgcctgctgacagcatcgcccccttccacctgcccagcctggcctgcctgagcaagatggactag

SEQ ID NO: 268859 - DNA, 633 bp, Artificial Sequence
  derived and/or modified sequence
atggtgagcggcagcgagcagaagttcctgatcggcctgggcaagtcacaaatctatacatgggacgggcgtcaatcggacaggtggatcaaattggaccttaaaacagaactaccacgggacacactcttgtccgtggaaattgtgcatgaacttaagggggagggtaaggctcaaagaaagatctctgcaattcacatcctggatgtgttggtgctgaatgggacagatgtccgggagcagcatttcaaccagcgcatacaacttgctgagaagtttgttaaagccgtcagcaaaccaagcaggcccgacatgaatccgatccgcgtgaaggaggtctatagactggaagagatggagaaaatttttgtccgattggaaatgaaaatcataaagggcagttcagggactccaaaactgtcctacactggacgtgacgataggcactttgttccgatgggactatacattgtgcggaccgtgaatgaaccatggaccatgggcttcagtaagagcttcaagaaaaaatttttttacaataaaaaaaccaaagactctacatttgacctgccagccgattccatcgccccttttcacctaccctctctcgcatgtctgtccaaaatggattag

SEQ ID NO: 268860 - DNA, 471 bp, Artificial Sequence
  derived and/or modified sequence
tgaggcaaggcccagcggaagatcagcgccatccacatcctggacgtgctggtccttaacgggacagacgtgagggagcagcattttaatcagaggatccaactagcagaaaaattcgtgaaggccgtgagtaagccatcccggccagatatgaatccaatccgggtgaaggaggtgtacaggctggaggagatggagaagatcttcgtgcggctggaaatgaaaattataaagggttcttcgggcaccccaaagctgtcttataccggaagagatgacagacactttgtgcctatgggactctacatagtgagaacagtgaacgagccgtggacaatgggctttagcaagtctttcaaaaaaaagtttttttataacaaaaagaccaaagattcgacgttcgacttgcctgctgattctatcgcaccattccacctaccatcgctcgcgtgcctgagcaaaatggactag

SEQ ID NO: 268861 - DNA, 633 bp, Artificial Sequence
  derived and/or modified sequence
atggtttccggttcagaacagaagtttctgatagggctcggaaagtcccagatctatacttgggatggacgacaaagtgatcgctggatcaagttggacttaaaaaccgaactgccacgcgatacattgctctctgtggaaatagtgcacgagttaaagggagaggggaaagcccaacgtaagatctccgcaattcacatcttggacgttctggtgctgaacgggacagacgtgcgggagcaacacttcaatcaacgaattcagctggcagagaagttcgtaaaagcagtttcaaaacccagcaggcctgatatgaaccctatccgtgtcaaggaggtatacaggctcgaggagatggagaagatcttcgtcaggctggaaatgaaaattatcaaggggagtagcggcaccccaaagctgtcatataccggtcgagacgatagacactttgtacctatgggcttatatatcgtaaggaccgttaatgaaccgtggactatgggattttccaagagctttaaaaaaaaattcttctacaacaagaagactaaggacagtacattcgacctgcccgctgactctattgccccatttcacctgccaagtctggcgtgcctgagcaaaatggactag

SEQ ID NO: 268862 - DNA, 471 bp, Artificial Sequence
  derived and/or modified sequence
taagggaaagcccagagaaagatctccgcaattcacattcttgatgtgctcgtgcttaacggaaccgatgtcagggagcagcacttcaaccagaggattcagcttgccgaaaaatttgtcaaggcggtttccaaacccagtcgtcccgacatgaaccccatacgggtcaaagaggtgtataggctcgaagagatggagaaaattttcgtgcggctcgagatgaagatcattaagggatcctccgggactccaaagttatcttatacaggtagagacgatcgacacttcgtcccaatgggcctctatatcgtgaggacagtaaacgagccttggaccatgggattctcaaaaagctttaagaagaagtttttttacaataaaaaaacaaaggattctacatttgaccttcccgcagactccattgcacctttccatttgccctccctcgcatgcctaagcaaaatggattag

SEQ ID NO: 268863 - DNA, 769 bp, Artificial Sequence
  derived and/or modified sequence
aggggaaggcccagaggaagatcagtgccatccacatcctcgatgtccttgtgctgaatggcaccgacgttcgggagcagcactttaaccagcgaattcagcttgccgagaaatttgtgaaagccgtttccaagcctagtcggcccgacatgaatcccatcagggtgaaggaggtgtacagactggaagagatggagaagatttttgtcaggttggagatgaagatcatcaagggctccagtggcaccccaaagctcagctacacagggcgtgatgaccggcactttgtacccatgggcctctacatcgtcaggacagtgaatgagccctggactatgggattcagcaaaagcttcaagaagaagttcttctacaacaagaaaaccaaggactctacttttgacctccctgcagactccattgccccatttcacctccccagccttgcctgcctgtcgaagatggattaactccgcactcccctgggatcgccacatgaccacttcaagtccccaagccgcccttcgctgcacagactgcatttttttctgccataattacaagcaatggcactgactggagggcatgacagtgtgtggtggggggatggacaggtggcacaatgtctgctgctcaaccccagcagtgcccgagccctggaagtaactcccactatttggcttggaaagtgcttcccactgtctccttcccactcgagctgggggccttctcctctattctgaattgtaatccagagctttcccttgaa

SEQ ID NO: 268864 - protein, 310 aa, Artificial Sequence
  derived and/or modified sequence
MRPLQIVPSRLISQLYCGLKPPASTRNQICLKMARPSSSMADFRKFFAKAKHIVIISGAGVSAESGVPTFRGAGGYWRKWQAQDLATPLAFAHNPSRVWEFYHYRREVMGSKEPNAGHRAIAECETRLGKQGRRVVVITQNIDELHRKAGTKNLLEIHGSLFKTRCTSCGVVAENYKSPICPALSGKGAPEPGTQDASIPVEKLPRCEEAGCGGLLRPHVVWFGENLDPAILEEVDRELAHCDLCLVVGTSSVVYPAAMFAPQVAARGVPVAEFNTETTPATNRFRFHFQGPCGTTLPEALACHENETVS

SEQ ID NO: 268865 - protein, 202 aa, Artificial Sequence
  derived and/or modified sequence
MGSKEPNAGHRAIAECETRLGKQGRRVVVITQNIDELHRKAGTKNLLEIHGSLFKTRCTSCGVVAENYKSPICPALSGKGAPEPGTQDASIPVEKLPRCEEAGCGGLLRPHVVWFGENLDPAILEEVDRELAHCDLCLVVGTSSVVYPAAMFAPQVAARGVPVAEFNTETTPATNRFRFHFQGPCGTTLPEALACHENETVS

SEQ ID NO: 268866 - DNA, 933 bp, Artificial Sequence
  derived and/or modified sequence
atgcgcccgctgcagatcgtgccaagtcgcctgatctcccagctgtactgcggcctgaaaccacctgctagcacacggaaccagatttgcctgaaaatggcccgccccagtagctctatggccgacttcaggaagttctttgcaaaagctaaacatattgtgataatctcaggggcaggcgtttcagccgagtccggagtgccaaccttcaggggcgccggcggatattggaggaagtggcaggcacaggatctcgcaacccccttggccttcgcccataatccatctagggtctgggagttttatcactacaggcgggaagtgatgggttctaaagagccaaacgcggggcaccgggctatcgcagagtgcgagactcgcctgggaaaacaaggcagaagggtagtcgttatcactcagaacatcgatgaactccatcgaaaagccggcaccaagaacctgctggaaatacatggtagtttgttcaagactaggtgcacatcctgtggggtggttgccgagaactataagtcacctatctgccccgccctatctggcaagggtgcccctgaaccgggcacccaagatgcatccatcccggtcgaaaagctccctagatgcgaagaggctggctgcggcggtctcttgcggcctcatgtggtttggttcggcgagaacctcgaccctgcaatcctggaagaggtggatagagaactggcccattgtgacctgtgccttgtggtgggcacctctagcgtcgtgtaccctgccgcaatgttcgctcctcaggtggctgccaggggtgttcccgtggctgagttcaatacagaaacaactccagcgaccaataggttcaggtttcactttcagggaccatgcggcaccactctgccagaagccctggcatgtcacgagaacgagacagtctcatag

SEQ ID NO: 268867 - DNA, 933 bp, Artificial Sequence
  derived and/or modified sequence
atgaggcccctgcagatcgtgcccagccgcctcatcagccagctgtactgcggcctgaagcccccagccagcaccaggaaccagatctgcctgaagatggcccggcccagcagctccatggctgacttcaggaagttctttgccaaggccaagcacatcgtcatcatctctggagctggggtgtctgctgagagcggcgtgcccaccttcagaggagctgggggctactggaggaagtggcaggcccaggacctggccacccccctggcctttgcccacaaccccagccgggtgtgggagttctaccactacagaagagaggtgatgggcagcaaggagcccaatgccggccaccgggccatcgcagaatgtgagacccggctgggcaagcagggcagaagagtggtggtgatcacccagaacattgatgagctgcacaggaaggccggcaccaagaacctgctggagatccacggcagcctcttcaagacccgctgcaccagctgtggggtggtggccgagaactacaagagccccatctgcccagccctgtctggaaaaggagcccctgagcccggcacccaggatgccagcatccctgtggagaagctgccccgctgtgaggaggccggctgcggcggcctgctgcggccccacgtggtgtggtttggagagaacctggaccctgccatcctggaggaggtggaccgggagctggcccactgtgacctgtgcctggtggtgggcaccagctctgtggtgtacccagctgccatgtttgccccccaggtggccgcccggggcgtgcctgtggccgagttcaacacagagaccaccccagccaccaaccgcttccgcttccacttccagggcccctgtggcaccaccctgcctgaggccctggcctgccatgaaaatgagaccgtgtcctag

SEQ ID NO: 268868 - DNA, 933 bp, Artificial Sequence
  derived and/or modified sequence
atgcggcccctgcagatcgtgcccagccggctgatcagccagctgtattgcggtctgaaaccgcctgccagtacacgcaatcagatctgcctgaaaatggcccggccctcttccagcatggctgactttagaaagttctttgcaaaggctaagcacatagtaatcatctctggtgctggagtgagcgctgagagcggcgtaccaactttccgaggggctggtggatattggcgtaagtggcaggcacaagacctggccaccccgttagcattcgcacataatcccagtcgggtgtgggaattctaccattaccgtagggaagtgatgggctctaaagaacccaacgctggacatagagctatagctgaatgcgagactcggcttgggaaacaggggcgccgcgtggtggtgattacccagaacatcgacgagcttcacaggaaagctggaacaaagaatctgctagaaatccacggatctctgtttaagactagatgcacatcctgcggagtcgtcgctgagaattacaaatctccaatctgtccggcacttagtggaaaaggggccccagagccaggcacgcaggatgcttccatccctgtcgaaaagctgcccaggtgtgaagaggccggttgtggcgggttgttacggccccacgtagtgtggttcggcgaaaatctggaccctgcaatactcgaagaggtcgaccgggagctggcccactgtgacctttgcctcgtagtgggaacttcttctgtcgtctatcctgcagcaatgtttgctcctcaggttgcagctagaggcgtccccgtagccgagtttaataccgagacaacaccagcaaccaacagattcagattccatttccaaggcccttgcgggaccacgcttccagaagcgctggcttgtcatgaaaatgaaactgtgtcttag

SEQ ID NO: 268869 - DNA, 933 bp, Artificial Sequence
  derived and/or modified sequence
atgaggccgcttcagattgtgccatccaggctgatttctcagctgtattgtgggttgaaacctcctgcttctacaagaaaccagatctgcctgaaaatggctcgtcctagcagtagcatggcagattttcgcaagttttttgccaaggccaaacacattgtgatcattagcggggcaggagtgtctgccgagtctggcgtccccacctttagaggcgcaggtggctactggaggaaatggcaggcacaggaccttgcaactcccctggcctttgcccacaatccatcccgcgtttgggagttttatcactatcggcgtgaagttatgggcagcaaagagcccaatgcaggtcaccgagctatagcagaatgcgaaactcgtctcggtaagcaggggagaagggtggttgtgataacccagaacattgatgaactgcatagaaaggctggtacaaagaatctgctcgaaatccatggcagcctgtttaagaccagatgcacatcttgcggggttgttgccgagaattacaagtcaccaatatgcccagcactgtcaggcaaaggagccccagagcctggtacacaggacgcaagcatccctgtagagaaactgcctcgatgtgaggaagccggttgtggtgggctgttgcgccctcacgtcgtgtggttcggcgaaaacctcgaccccgctattcttgaagaagtcgaccgcgaactcgctcactgcgacctttgccttgtggtgggtacgagctctgtggtgtatccagccgctatgttcgcaccgcaggtggctgcgaggggagtaccagtcgctgagtttaataccgagacaaccccagccactaacaggttccgctttcactttcaaggcccatgcgggactacgctgcccgaggcacttgcttgccacgaaaacgaaactgtctcatag

SEQ ID NO: 268870 - DNA, 1656 bp, Artificial Sequence
  derived and/or modified sequence
ccggagcgcggtcgggacacagcgcctctaggagaaagcctggaaggcgctccgggggtacccagagctcttagcgggccggcagcatgtgcggggcccaagtaaatggaaatgttttctaacatataaaaacctacagaagaagaaaataattttctggatcaaattagaagtctgtattatattgatgtctccagattcaaatatattagaaagcagccgtggagacaaccatcttcattttgggagaaataactaaagcccgcctcaagcattagaactacagacaaaccctgatgcgacctctccagattgtcccaagtcgattgatttcccagctatattgtggcctgaagcctccagcgtccacacgaaaccagatttgcctgaaaatggctcggccaagttcaagtatggcagattttcgaaagttttttgcaaaagcaaagcacatagtcatcatctcaggagctggtgttagtgcagaaagtggtgttccgaccttcagaggagctggaggttattggagaaaatggcaagcccaggacctggcgactcccctggcctttgcccacaacccgtcccgggtgtgggagttctaccactaccggcgggaggtcatggggagcaaggagcccaacgccgggcaccgcgccatagccgagtgtgagacccggctgggcaagcagggccggcgagtcgtggtcatcacccagaacatcgatgagctgcaccgcaaggctggcaccaagaaccttctggagatccatggtagcttatttaaaactcgatgtacctcttgtggagttgtggctgagaattacaagagtccaatttgtccagctttatcaggaaaaggtgctccagaacctggaactcaagatgccagcatcccagttgagaaacttccccggtgtgaagaggcaggctgcgggggcttgctgcgacctcacgtcgtgtggtttggagaaaacctggatcctgccattctggaggaggttgacagagagctcgcccactgtgatttatgtctagtggtgggcacttcctctgtggtgtacccagcagccatgtttgccccccaggtggctgccaggggcgtgccagtggctgaatttaacacggagaccaccccagctacgaacagattcaggtttcatttccagggaccctgtggaacgactcttcctgaagcccttgcctgtcatgaaaatgaaactgtttcttaagtgtcctggggaagaaagaaattacagtatatctaagaactaggccacacgcagaggagaaatggtcttatgggtggtgagctgagtactgaacaatctaaaaatagcctctgattccctcgctggaatccaacctgttgataagtgatgggggtttagaagtagcaaagagcacccacattcaaaagtcacagaactggaaagttaattcatattatttggtttgaactgaaacgtgaggtatctttgatgtgtatggttggttattgggagggaaaaattttgtaaattagattgtctaaaaaaaatagttattctgattatatttttgttatctgggcaaagtagaagtcaaggggtaaaaaccctactattctgatttttgcacaagttttagtggaaaataaaatcacactctacagtaggt

SEQ ID NO: 268871 - DNA, 933 bp, Artificial Sequence
  derived and/or modified sequence
atgagacccctgcagatcgtgcccagcagactgatcagccagctgtactgcggcctgaagccccccgccagcaccagaaaccagatctgcctgaagatggccagacccagcagcagcatggccgacttcagaaagttcttcgccaaggccaagcacatcgtgatcatcagcggcgccggcgtgagcgccgagagcggcgtgcccaccttcagaggcgccggcggctactggagaaagtggcaggcccaggacctggccacccccctggccttcgcccacaaccccagcagagtgtgggagttctaccactacagaagagaggtgatgggcagcaaggagcccaacgccggccacagagccatcgccgagtgcgagaccagactgggcaagcagggcagaagagtggtggtgatcacccagaacatcgacgagctgcacagaaaggccggcaccaagaacctgctggagatccacggcagcctgttcaagaccagatgcaccagctgcggcgtggtggccgagaactacaagagccccatctgccccgccctgagcggcaagggcgcccccgagcccggcacccaggacgccagcatccccgtggagaagctgcccagatgcgaggaggccggctgcggcggcctgctgagaccccacgtggtgtggttcggcgagaacctggaccccgccatcctggaggaggtggacagagagctggcccactgcgacctgtgcctggtggtgggcaccagcagcgtggtgtaccccgccgccatgttcgccccccaggtggccgccagaggcgtgcccgtggccgagttcaacaccgagaccacccccgccaccaacagattcagattccacttccagggcccctgcggcaccaccctgcccgaggccctggcctgccacgagaacgagaccgtgagctag

SEQ ID NO: 268872 - protein, 394 aa, Artificial Sequence
  derived and/or modified sequence
AGMAGAGAGAGARGGAAAGVEARARDPPPAHRAHPRHPRPAAQPSARRMDGGSGGLGSGDNAPTTEALFVALGAGVTALSHPLLYVKLLIQVGHEPMPPTLGTNVLGRKVLYLPSFFTYAKYIVQVDGKIGLFRGLSPRLMSNALSTVTRGSMKKVFPPDEIEQVSNKDDMKTSLKKVVKETSYEMMMQCVSRMLAHPLHVISMRCMVQFVGREAKYSGVLSSIGKIFKEEGLLGFFVGLIPHLLGDVVFLWGCNLLAHFINAYLVDDSFSQALAIRSYTKFVMGIAVSMLTYPFLLVGDLMAVNNCGLQAGLPPYSPVFKSWIHCWKYLSVQVSKHWTAEAFPVLCYILQLKWFCGCFIACKDKWFHGIQYCEEILGIYKAFKFSSYIISERI

SEQ ID NO: 268873 - protein, 254 aa, Artificial Sequence
  derived and/or modified sequence
MSNALSTVTRGSMKKVFPPDEIEQVSNKDDMKTSLKKVVKETSYEMMMQCVSRMLAHPLHVISMRCMVQFVGREAKYSGVLSSIGKIFKEEGLLGFFVGLIPHLLGDVVFLWGCNLLAHFINAYLVDDSFSQALAIRSYTKFVMGIAVSMLTYPFLLVGDLMAVNNCGLQAGLPPYSPVFKSWIHCWKYLSVQVSKHWTAEAFPVLCYILQLKWFCGCFIACKDKWFHGIQYCEEILGIYKAFKFSSYIISERI

SEQ ID NO: 268874 - DNA, 1185 bp, Artificial Sequence
  derived and/or modified sequence
gccggcatggccggcgccggcgccggcgccggcgccagaggcggcgccgccgccggcgtggaggccagagccagagaccccccccccgcccacagagcccaccccagacaccccagacccgccgcccagcccagcgccagaagaatggacggcggcagcggcggcctgggcagcggcgacaacgcccccaccaccgaggccctgttcgtggccctgggcgccggcgtgaccgccctgagccaccccctgctgtacgtgaagctgctgatccaggtgggccacgagcccatgccccccaccctgggcaccaacgtgctgggcagaaaggtgctgtacctgcccagcttcttcacctacgccaagtacatcgtgcaggtggacggcaagatcggcctgttcagaggcctgagccccagactgatgagcaacgccctgagcaccgtgaccagaggcagcatgaagaaggtgttcccccccgacgagatcgagcaggtgagcaacaaggacgacatgaagaccagcctgaagaaggtggtgaaggagaccagctacgagatgatgatgcagtgcgtgagcagaatgctggcccaccccctgcacgtgatcagcatgagatgcatggtgcagttcgtgggcagagaggccaagtacagcggcgtgctgagcagcatcggcaagatcttcaaggaggagggcctgctgggcttcttcgtgggcctgatcccccacctgctgggcgacgtggtgttcctgtggggctgcaacctgctggcccacttcatcaacgcctacctggtggacgacagcttcagccaggccctggccatcagaagctacaccaagttcgtgatgggcatcgccgtgagcatgctgacctaccccttcctgctggtgggcgacctgatggccgtgaacaactgcggcctgcaggccggcctgcccccctacagccccgtgttcaagagctggatccactgctggaagtacctgagcgtgcaggtgagcaagcactggaccgccgaggccttccccgtgctgtgctacatcctgcagctgaagtggttctgcggctgcttcatcgcctgcaaggacaagtggttccacggcatccagtactgcgaggagatcctgggcatctacaaggccttcaagttcagcagctacatcatcagcgagagaatctag

SEQ ID NO: 268875 - DNA, 1185 bp, Artificial Sequence
  derived and/or modified sequence
gcaggtatggcgggagctggtgctggcgcaggggctcggggcggagccgccgccggcgtggaggcccgggctagagaccctccccctgcccaccgagcccatccacggcatccccgcccagctgcccagcctagcgccagacgaatggatggagggtccggaggattaggttctggcgacaacgcacctacaaccgaggccctcttcgtcgccctgggggccggagtcactgccctatcccaccctctgctatacgtgaagcttctcatccaagtgggacacgaacctatgccccctaccctcggcacaaacgtgctgggaaggaaggtcctgtacttgcccagcttcttcacctatgctaaatatatcgtccaggtggacgggaagataggccttttcagggggctgagtccacgattaatgagcaatgcactgtccaccgtgacacgggggagcatgaaaaaggtgttccctcccgatgaaattgagcaggtgagcaacaaagatgatatgaagacaagtctaaagaaggtcgtcaaggagacttcttacgagatgatgatgcagtgcgtcagtcgaatgctcgcccaccctctgcacgtgatcagcatgagatgtatggtgcagtttgtcggcagggaagcgaaatattccggtgtgctgtcatcgatcggtaagatcttcaaggaagagggcctgttaggtttcttcgtcgggctcatcccacatctgctgggggatgtggtttttctttggggctgcaacctgctggcacatttcatcaacgcctatctggtagacgacagtttctcccaggccctggccattcgcagctacacaaagttcgtaatgggcattgcagtgtccatgctcacctatccattccttcttgtgggcgatctcatggctgttaataactgtggtctgcaagctggtctacccccctactcgcctgttttcaagagctggatccactgctggaagtatctgtcagtacaagtttccaagcattggactgctgaagccttcccagtgctttgctacatcctgcagttaaagtggttctgcggctgcttcatcgcctgcaaggacaaatggttccacggtatacaatactgtgaggaaattttgggcatctacaaggccttcaaattctccagctatattatcagtgagcgcatctag

SEQ ID NO: 268876 - DNA, 1185 bp, Artificial Sequence
  derived and/or modified sequence
gctggcatggccggggccggggccggggccggggcccggggcggcgctgctgctggggtggaggcccgggcccgggaccccccaccagcccaccgggcccaccccaggcaccccaggcctgctgcccagcccagcgcccggaggatggatggcggcagcggcggcctgggcagcggggacaatgcccccaccacagaggccctgtttgtggccctgggcgctggggtgacagccctgagccaccccctgctgtatgtgaagctgctgatccaggtgggccacgagcccatgccacccaccctgggcaccaacgtgctgggcaggaaggtgctgtacctgcccagcttcttcacctacgccaagtacatcgtgcaggtggatggcaagattggcctcttccggggcctgagcccccggctgatgagcaatgccctgagcacagtgacccggggctccatgaagaaggtgttccccccagatgaaattgagcaggtgagcaacaaggatgacatgaagaccagcctgaagaaggtggtgaaggagaccagctatgagatgatgatgcagtgtgtgtccaggatgctggcccaccccctgcacgtgatctccatgcgctgcatggtgcagtttgtgggccgggaggccaagtacagcggcgtgctgagcagcatcggcaagatcttcaaggaggagggcctgctgggcttctttgtgggcctcatcccccacctgctgggagatgtggtgttcctgtggggctgcaacctgctggcccacttcatcaatgcctacctggtggatgacagcttcagccaggccctggccatccgcagctacaccaagtttgtgatgggcattgctgtgtccatgctgacctaccccttcctgctggtgggggacctgatggctgtgaacaactgtggcctgcaggccggcctgcccccctacagccctgtgttcaagtcctggatccactgctggaagtacctgtctgtgcaggtgtccaagcactggacagctgaggccttccctgtgctgtgctacatcctgcagctgaagtggttctgtggctgcttcatcgcctgcaaggacaagtggttccacggcatccagtactgtgaggagatcctgggcatctacaaggccttcaagttcagcagctacatcatcagcgagcgcatctag

SEQ ID NO: 268877 - DNA, 1572 bp, Artificial Sequence
  derived and/or modified sequence
gcggggatggcgggagccggagctggagccggagctcgcggcggagcggcggcgggggtcgaggctcgagctcgcgatccaccgcccgcgcaccgcgcacatcctcgccaccctcggcctgcggctcagccctcggcccgcaggatggatggcgggtcagggggcctggggtctggggacaacgccccgaccactgaggctcttttcgtggcactgggcgcgggcgtgacggcgctcagccatcccctgctctacgtgaagctgctcatccaggtgggtcatgagccgatgccccccacccttgggaccaatgtgctggggaggaaggtcctctatctgccgagcttcttcacctacgccaagtacatcgtgcaagtggatggtaagatagggctgttccgaggcctgagtccccggctgatgtccaacgccctctctactgtgactcggggtagcatgaagaaggttttccctccagatgagattgagcaggtttccaacaaggatgatatgaagacttccctgaagaaagttgtgaaggagacctcctacgagatgatgatgcagtgtgtgtcccgcatgttggcccaccccctgcatgtcatctcaatgcgctgcatggtccagtttgtgggacgggaggccaagtacagtggtgtgctgagctccattgggaagattttcaaagaggaagggctgctgggattcttcgttggattaatccctcacctcctgggcgatgtggttttcttgtggggctgtaacctgctggcccacttcatcaatgcctacctggtggatgacagcttcagccaggccctggccatccggagctataccaagttcgtgatggggattgcagtgagcatgctgacctaccccttcctgctagttggcgacctcatggctgtgaacaactgcgggctgcaagctgggctccccccttactccccagtgttcaaatcctggattcactgctggaagtacctgagtgtgcaggtgagcaagcactggacggcggaggcctttcctgttctttgctacatccttcagctgaaatggttttgtggatgcttcattgcatgcaaagataagtggtttcatggaattcaatattgtgaggagatacttggtatctataaggcatttaagttttcatcttacataatttcagaaaggatttgaggtggctaagtgtgggtttattttaagattatacatcagacaagaccttttcttctttgagtcttaaagactcttaggataaggataagagaactctggcccaggtggcaggtggtaaagcccaagaactgcttctccttcaagtaacatgggctgaaaattcgaggtctgtaaccagttgagctgagttcctgggttgttagggcggctggcattggaaaccgactcctccctcctgcaggacattcctgggcccaggagagcctgtgggtggggctgggccacgtggggaactggcagcagtaccaaccttgggttctcgtgttctgtaccgaagctacctctccgtagctggagctcttgggcccagcagtcaggggtccaggc

SEQ ID NO: 268878 - DNA, 1159 bp, Artificial Sequence
  derived and/or modified sequence
agctcgcgatccaccgcccgcgcaccgcgcacatcctcgccaccctcggcctgcggctcagccctcggcccgcaggatggatggcgggtcagggggcctggggtctggggacaacgccccgaccactgaggctcttttcgtggcactgggcgcgggcgtgacggcgctcagccatcccctgctctacgtgaagctgctcatccagccaagtacatcgtgcaagtggatggtaagatagggctgttccgaggcctgagtccccggctgatgtccaacgccctctctactgtgactcggggtagcatgaagaaggttttccctccagatgagattgagcaggtttccaacaaggatgatatgaagacttccctgaagaaagttgtgaaggagacctcctacgagatgatgatgcagtgtgtgtcccgcatgttggcccaccccctgcatgtcatctcaatgcgctgcatggtccagtttgtgggacgggaggccaagtacagtggtgtgctgagctccattgggaagattttcaaagaggaagggctgctgggattcttcgttggattaatccctcacctcctgggcgatgtggttttcttgtggggctgtaacctgctggcccacttcatcaatgcctacctggtggatgacagcttcagccaggccctggccatccggagctataccaagttcgtgatggggattgcagtgagcatgctgacctaccccttcctgctagttggcgacctcatggctgtgaacaactgcgggctgcaagctgggctccccccttactccccagtgttcaaatcctggattcactgctggaagtacctgagtgtgcaggtgagcaagcactggacggcggaggcctttcctgttctttgctacatccttcagctgaaatggttttgtggatgcttcattgcatgcaaagataagtggtttcatggaattcaatattgtgaggagatacttggtatctataaggcatttaagttttcatcttacataatttcagaaaggatttgaggtggctaagtgtgggtttattttaagattatacatcagacaagaccttttcttctttgagtcttaaagactcttaggataaggataagagaactctggcccaggtggcaggtggtaaagcccaaga

SEQ ID NO: 268879 - DNA, 1185 bp, Artificial Sequence
  derived and/or modified sequence
gccggcatggccggcgccggcgccggcgccggcgcccggggcggcgccgctgctggagtggaagctcgggccagagatccaccaccagctcacagggctcatcctaggcacccgcgtcctgcagcacaaccttccgctcgcagaatggatgggggctccggcgggctggggtctggtgataacgcgcccaccaccgaagcactgttcgtggctctgggggctggcgtcacggctcttagccacccgcttctgtacgtcaaactgctgatccaggtaggccatgaacctatgcccccgacccttggcaccaacgtgctcggcagaaaggtgctgtacttacccagcttcttcacttacgcaaagtacattgtgcaagtggacggaaaaattggcctgttcagaggactctccccacgtctgatgtctaacgcgctttcgactgttacaaggggtagcatgaagaaagtgttccctcctgatgagattgaacaggtcagcaacaaggacgacatgaaaacttccttgaaaaaggttgtcaaggagactagttacgagatgatgatgcagtgcgtttctcgcatgctagcccaccctctacatgttattagtatgagatgtatggtgcaatttgtaggcagggaggccaagtactccggggttttaagctctattggcaagatctttaaggaggaaggtcttttaggcttctttgtgggcctgatcccccacttactcggagatgtagtgtttctgtggggatgtaatctgctagcacacttcatcaacgcttacctagtggatgactcgttctcccaggccctggcaatcaggtcttacacaaagtttgtgatggggatcgccgttagcatgctgacttaccctttccttttagtgggagacttaatggcagtgaataattgtggccttcaggcgggactccctccatacagcccagtgttcaagtcctggatccactgctggaagtatttaagcgttcaggtatccaagcactggacagcagaggccttccctgtgttgtgttacatcttacaactcaagtggttttgtggttgttttatcgcctgtaaggataagtggttccatgggatccagtactgtgaggaaattctgggcatttataaggcatttaaattttcgtcctacattatcagtgaacgtatttag

SEQ ID NO: 268880 - DNA, 1185 bp, Artificial Sequence
  derived and/or modified sequence
gccggtatggcgggagctggggcaggtgctggtgccagaggaggagcggctgctggcgtcgaagcaagagccagagaccctccccctgcacatcgcgcacacccaagacatccgaggccagctgcccaaccctctgctaggcggatggacggtggcagtggcggactgggaagcggcgacaacgctcctacgactgaggctctgttcgtagccttaggagcaggcgtcaccgccctctcccaccccctgctttatgtgaaactgctgatccaggtaggccacgagccgatgccaccaactctcggcacaaatgtattgggacgaaaggttctgtatctgccatcctttttcacatacgcaaaatacatcgtacaggttgacggcaaaatcgggctgtttcgcggactgagtccacgcctgatgtctaacgcactgagcacagttaccagggggtccatgaagaaagtatttcctccggacgaaatagagcaagtgtcaaataaagatgatatgaaaacatcattgaaaaaagttgtcaaagagactagctatgaaatgatgatgcaatgcgtgagtaggatgctggctcatccactacatgtgatcagcatgcggtgcatggtgcaatttgttggaagggaagcaaaatattccggggtactgagttccattgggaagatattcaaggaggaggggttgttggggtttttcgtagggcttatcccgcatcttctaggcgacgtggtgttcctgtgggggtgtaatctgctggcacacttcataaacgcctatctggttgatgattctttcagtcaggccttggcaatcagatcctataccaaattcgtgatgggcatcgccgtgtctatgttgacttatccatttctgctcgtaggagatctgatggccgtgaataattgcggcctccaggctgggttacctccctattcaccagtgttcaagagctggatccactgttggaaatacttatcagtgcaggtgtccaaacactggacagcagaggcatttcctgtgttgtgctacattctgcagctcaagtggttctgtggctgcttcatcgcatgcaaggacaagtggttccacggaattcaatactgcgaggagattctaggcatttataaagcattcaaatttagctcctatatcatctcagagcgtatttag

SEQ ID NO: 268881 - DNA, 2886 bp, Artificial Sequence
  derived and/or modified sequence
atgctgctgctgctgctgctggcccccctgttcctgcggccccccggtgccggtggggcgcagacaccgaatgccactagtgagggatgtcagataatccatcccccctgggagggagggatcagataccggggcctgacaagggatcaggttaaggccattaacttcctaccagtcgattacgagattgagtatgtgtgcagaggcgagcgcgaagtggtgggcccgaaagtgcgtaaatgccttgccaacggatcctggaccgatatggacacaccaagtcgctgtgtacggatctgtagtaaatcatacctgacactggaaaacggcaaggtgttcctcaccggaggcgatctgccggctctggatggggctcgcgtggattttcgctgcgaccctgactttcacttggtaggcagctcccgttccatctgttctcagggccaatggtccacccctaaacctcattgccaagtgaaccgaacaccccactccgagcggcgggctgtgtatatcggagcgctatttccaatgtccggggggtggcccggaggccaggcctgccagccagccgtagaaatggccctggaagacgtcaatagccggcgtgacattctgccagattatgagctgaaactgatacaccacgacagcaaatgtgaccccggccaggcgacaaaatatctgtacgaactgttatataacgatcctatcaaaatcattctaatgcccggctgcagctctgtgtccactcttgtggcagaagcagcccgcatgtggaatctgatcgtgcttagctacggatccagctctcctgctctgagtaacagacaacgatttcctacctttttcagaactcacccaagcgccaccctccacaatcccacacgggtgaagctctttgagaagtggggctggaagaaaatagcaaccatacaacagacaactgaggtgtttacctccacgctggacgatctggaagaaagagtaaaggaggcgggaatcgaaataacatttcgccagagttttttctctgatcctgccgtacctgtgaaaaatctaaagcggcaggacgccagaattattgtcgggctattctatgagacagaggccaggaaggtgttctgcgaggtgtataaagaaagactcttcgggaagaagtacgtgtggttcctgattggctggtacgccgataactggtttaagatctacgacccttcaatcaactgcactgtggacgaaatgaccgaggctgtcgaggggcacatcaccacagagattgtgatgctgaaccctgcaaatacccgatcaattagtaacatgacatcccaggagttcgtggaaaaacttacaaagaggttaaaaaggcatccagaagagactgggggtttccaggaagctcccctcgcgtacgatgccatctgggccttggcccttgcacttaacaaaacctccggcggtggcggccgatctggggtgagactcgaagactttaattacaacaaccagaccataacagatcagatatatcgggccatgaattcttctagcttcgaaggagtctccggccacgtcgtctttgatgcaagcgggtctcgaatggcctggacactcattgaacagctgcagggaggctcatacaagaagataggatactacgatagcaccaaggatgacctctcatggagcaagacggataagtggattggtgggtctccccccgctgaccagaccttggtgatcaagacctttcgatttctgtctcagaaattgtttatcagcgtaagtgtattgtcgagccttggcatagtgcttgccgtagtgtgcctcagctttaatatttacaactcccacgtccgctacattcagaacagtcagccaaatctgaataatctaacagccgtgggttgtagtcttgcactggctgcagttttccccctgggactggatgggtatcacatcggcagaaaccaattcccgtttgtttgccaagctcgactttggctgctgggcctgggattctccctgggctacggttcaatgttcacaaagatctggtgggtccatacggtgtttacgaaaaaagaagaaaagaaagagtggaggaagacgctcgaaccttggaagctatatgcgaccgtaggcttgctggtgggcatggatgtcctgacactggctatttggcagattgtcgaccccctgcacagaaccattgagacgttcgctaaagaggagcccaaggaggatatcgatgtgtctattctgccacagttggagcactgctcatcaaggaagatgaacacctggctcggcatattctatggctacaagggcctgctgttactgttgggcatttttctggcatacgagactaagtccgtctctacggaaaagattaatgaccaccgggcagtgggtatggcaatctacaatgtggcggtgctttgtctgatcaccgccccagtgacaatgatcctgtccagtcagcaggacgctgccttcgcattcgcgagccttgctattgttttctcaagctatattacactagtcgtcctgttcgtccccaaaatgaggcgtttaatcaccaggggcgagtggcaatctgaggcacaggacacaatgaagacgggatcatccaccaataacaatgaagaggaaaaaagcaggctgctcgagaaagagaatagagaactcgagaagattatcgcagaaaaggaagagcgggtgagcgagctccgccaccagcttcaaagcagacaacagctgcgcagtagacgacaccccccaactccgccagagcccagcgggggcctcccaagaggcccacccgagcccccagatcggttgagctgtgacgggtcccgagtgcacctgttatacaaatag

SEQ ID NO: 268882 - DNA, 2886 bp, Artificial Sequence
  derived and/or modified sequence
atgctccttctgctactgctggccccactctttctgaggccaccgggagctggaggagcacaaacccctaacgccacaagtgagggctgccagataattcacccaccttgggagggtgggattaggtacagaggccttacacgcgaccaggtaaaagcaatcaactttttacccgtggactacgagatcgaatatgtgtgccgaggagaacgagaggttgtgggacctaaggtacgcaagtgtctggcaaacggttcctggactgacatggacacacccagcaggtgtgtgcgcatctgctccaaatcttatctgaccctcgaaaatggaaaggtattcctgacaggaggtgacttacctgcgcttgatggggctcgcgttgatttcagatgcgacccagactttcatcttgtgggttcctcccggagtatctgttctcagggacagtggtccacccccaagcctcactgccaagttaacaggacacctcattcagagaggcgcgctgtgtatattggggctctctttcccatgagtgggggttggccagggggacaggcctgtcaacctgccgtcgagatggctctggaggacgtcaactctcggcgagatatcctgcccgactacgagctgaagctcatccatcatgattccaaatgtgatccaggccaggccacaaagtatttatacgagttactctacaatgatcctatcaaaattatcctcatgccagggtgtagcagcgtttctacactggtggcggaagccgcacgaatgtggaacctaatagtgttaagttacgggtctagctcacccgctttgtctaatcgacagagatttcccactttctttagaacacacccaagcgctaccttacacaatcccactagggtgaagctgttcgaaaagtggggttggaagaagatcgcgaccattcaacagacaactgaggtctttacttccacccttgatgacctagaggagcgcgtgaaagaggccggaattgagattactttccgacagtcctttttcagcgatcccgctgtgccggtgaagaacctcaaacggcaggacgccagaatcatagtgggattgttctatgagactgaggctcgtaaagtcttttgcgaagtatataaggagaggctgtttgggaagaaatacgtgtggtttttgattggatggtacgctgataattggtttaagatctatgatccgtcaatcaattgcaccgttgacgaaatgaccgaagcagtcgaggggcatataacgaccgagatcgtgatgttgaatcccgctaacacgaggtccatctccaacatgaccagtcaggaattcgtggaaaagctgactaaacggctaaagaggcatccagaagaaacaggaggtttccaggaggctcctctcgcctatgacgccatttgggcccttgctctcgcactgaacaaaacgtctggaggtggcggacgatcaggcgtgagactggaggatttcaactataacaaccagaccattaccgaccaaatctaccgcgcaatgaactcttcttcttttgagggtgtgtctggccacgtagtcttcgatgcgagcggatcgcggatggcgtggactctcattgagcagttgcaaggaggatcttataagaaaattggttactatgatagcaccaaagacgacctctcttggtccaaaacagacaagtggattggcggtagccccccagctgatcagaccttggtgatcaaaacattccgcttcctcagccagaagttgtttatctcggtgtctgtgcttagctccctcggcattgtccttgccgtggtgtgtctctcttttaacatctataatagccacgtcaggtatatccagaacagccagccaaacctcaataatcttacggccgtgggctgctcattggcgttagcagccgtcttccccctgggtttagacggatatcatatcgggcgaaaccaatttccatttgtatgtcaagcacgcctgtggctgctggggctgggattctccttgggctacggctccatgttcacaaagatatggtgggtacataccgtcttcacaaaaaaggaggagaagaaggagtggcgcaaaacactggaaccttggaagctctatgctaccgtcggtctgttagttggaatggatgtgctcaccctcgcgatttggcaaatcgtagaccctcttcaccgtactattgagacttttgccaaggaggagccgaaggaggatatcgacgtgtccatcctgcctcagctggagcactgttctagcagaaagatgaatacatggctagggatattttatggatacaagggccttctgttactcctaggaatcttcctcgcttacgagacaaagagtgtgagcacagaaaaaataaatgatcacagagctgtgggcatggccatatataatgttgccgtgctttgtctcatcaccgcgcctgtgaccatgatccttagcagccaacaggacgccgcatttgccttcgcgtcactggcaattgtcttctcaagctacattacactggtggtgctgttcgtaccaaagatgcgccgtctgattacacgaggcgagtggcaatcagaggcgcaggatactatgaagactggatcctccacaaataataacgaggaagaaaaaagtaggctcctggagaaggaaaaccgagaactcgaaaagattattgcggaaaaagaagagagagtgtccgaattacggcaccagttacagtccagacagcagcttcgatctcgccgacatccaccaactccacctgaaccctctggcggtctgccaagaggccctcccgagccacccgaccgtttgtcgtgtgacgggtcaagagtgcacctgttgtacaagtag

SEQ ID NO: 268883 - DNA, 2886 bp, Artificial Sequence
  derived and/or modified sequence
atgctgctactgctgctgcttgccccactcttcttacgcccacccggagctggcggagcacagacccccaacgccacaagtgaaggctgccagattattcatcctccctgggaggggggaattagatacagagggctaacgagagaccaggtgaaagcaatcaattttcttcccgtggactatgagatagagtatgtgtgtagaggagagagagaagtggtcggccctaaagtcagaaagtgccttgcaaacggctcctggactgacatggacactccatctcggtgtgtacgtatttgttcaaagagttacttaaccctagaaaatggcaaggtgttcctgaccggtggggatctccccgctctggacggagctcgagtcgacttccgctgtgaccccgactttcacctggtgggatcctcccgtagtatttgttcccagggacagtggtctactcctaagcctcactgccaggttaaccggacccctcatagcgagaggcgcgctgtgtatattggggcattgttcccaatgagtggcggatggccaggtggccaggcgtgtcagccggcagtcgagatggcactagaagacgtaaattccaggcgggatattctgcctgactatgagctgaaactcattcaccacgattcgaaatgtgacccagggcaagccaccaaatacctgtacgaattgctttacaatgaccctatcaaaattatcctgatgccaggctgcagtagcgtttctacgctggtggccgaagccgctcgcatgtggaatctaatcgtcctgagctacggatcttccagcccagctctcagcaatcgtcaacgcttcccgacattttttcggactcatccttctgcgactctgcataacccaacccgagttaagttattcgagaagtgggggtggaagaaaatcgcaacgatccagcaaacaaccgaggtatttacctctactctcgatgacctggaggaaagagttaaagaggcgggtatagaaatcacattccggcagtcctttttctccgatcccgcagtcccagttaaaaatttgaagcgacaggatgctcgcatcattgtgggcttgttttacgaaactgaagccagaaaggtattttgcgaagtctacaaggaaagactgttcggcaagaaatatgtgtggttcctgatcggttggtatgccgataattggtttaagatctacgatccgtcaatcaattgcactgtcgacgagatgaccgaagctgttgagggacacatcactacggagattgttatgttgaatcctgctaacacgcgcagcatctctaacatgacctctcaagagttcgtagaaaaactgactaaacgcctgaaaagacaccctgaagagacaggaggttttcaagaagcgcctctcgcctacgacgcaatttgggccctggcgttagctctaaacaaaacatctggtggaggcggtaggagcggggtgaggttggaggattttaactacaacaaccagaccattacagaccagatttaccgagctatgaattctagctcgttcgagggtgtgagcggacatgtggtgttcgatgcctctgggtcacgtatggcctggacactgatcgagcaactccagggcggtagttataaaaaaatcggttactatgacagcactaaggatgatctgagctggagcaagacggacaagtggatagggggatcccctcccgcagaccagacattggttataaagaccttccggtttctgtcccaaaagctcttcatctcggtgtctgtgttgagttccctcggaatcgtattagcagtggtttgcttgagcttcaatatttacaacagtcacgtgcgttatatccagaatagccagcccaatcttaacaatttgactgctgtaggatgtagccttgcgctggccgcagtgtttcccctcggtctcgatggctatcatataggaagaaatcagttcccatttgtgtgccaggccagactctggcttctgggactggggttttctctaggatacggatcgatgttcacgaaaatttggtgggtacacaccgtgttcacaaaaaaagaagagaaaaaggaatggcgcaaaaccctcgagccttggaagctctatgctacagtgggtcttttggtcggcatggatgttcttaccctcgctatctggcagatcgtggatcccttacacagaaccattgaaactttcgccaaggaagagcctaaggaagatattgatgtttctatactaccccagctggaacattgctcctcgcggaaaatgaacacatggttgggcatcttttatggctataaggggctgttattgctgctgggcatctttctcgcgtacgaaaccaaaagcgtaagtacggagaagataaatgaccatcgagcagtcggtatggctatctacaacgttgccgtgctttgtttaatcacggcccctgttactatgatcttgagttctcagcaggacgctgcgttcgcatttgcgagcctcgccattgtgttcagctcttatattactctcgttgttctgtttgttcccaaaatgcgacgcctgatcacccggggagaatggcagtccgaggcccaggacacaatgaagactggttcctcaactaataacaacgaggaagagaagagtcgcctgctcgagaaggagaacagggaactcgaaaaaatcatcgctgagaaggaagagagagtttccgagttaagacaccaactgcaatctcgccagcagctgcggtcccggagacaccccccaacacctcccgagccgtcaggagggctcccgaggggtcctccggaaccacctgacagactctcatgcgatggaagcagggtccatctgctgtacaagtag

SEQ ID NO: 268884 - DNA, 2886 bp, Artificial Sequence
  derived and/or modified sequence
atgcttcttctgttactgctggccccactgtttcttcggcctcctggagccggaggcgcacagactccaaacgcaaccagcgaggggtgccaaatcatccaccctccctgggagggcggtattcgctaccgcggacttaccagagaccaggtgaaagcaatcaacttccttcctgtagattatgaaatcgaatatgtttgtcggggtgagcgagaagtggtgggcccaaaggtccgtaagtgcctcgcaaatgggagctggaccgatatggacacgccctcccggtgtgtgaggatttgctctaaatcatatctaacgctggagaatggcaaagtgttcctgactggtggtgatctgcctgccctcgatggggcaagggtggactttcgctgcgatcctgattttcacctggtaggatcctcccgctctatttgctctcagggacagtggtcaacaccaaaaccgcactgccaagtgaatcgaacaccacattctgagagaagagctgtgtacatcggggcactgtttcccatgagcggtggctggccaggcggacaagcctgtcaaccagccgtcgagatggcactggaagacgtgaattcccgaagagatattctcccagactacgagctgaaactgattcaccacgacagcaaatgcgatcccggacaagctactaagtacctttacgaactgctgtataatgacccgatcaaaattatcctgatgcctggttgctccagcgtgtcaactttggtggccgaggcggctcggatgtggaatcttatagtactgtcgtacggcagctccagcccggcattgtctaataggcagcggtttccaacgttcttcagaacacacccaagcgctaccttgcacaaccctacccgcgtgaaactgtttgaaaagtgggggtggaaaaagattgcgacaatacagcagaccacagaagtcttcacaagtaccttggacgatctggaggaacgtgtcaaggaagccggtatagaaataaccttccgtcagtctttttttagtgatcccgctgtgcctgttaagaatcttaagcggcaggacgctcgaataatagtcggcttgttttacgaaacagaggcacggaaggtgttttgtgaagtgtacaaagagagattgtttggtaaaaagtacgtctggttccttataggctggtatgcggataactggtttaagatctacgatccctcgattaattgcaccgtcgatgagatgacggaggccgttgagggtcacatcaccactgaaattgtgatgctcaacccagcaaatactcggagcataagcaacatgacttctcaggagttcgtcgagaaactcactaagagattgaagcggcatccggaagagacgggtggctttcaggaggcccctctggcctatgacgccatttgggctctggcactggcactgaataaaacaagcggaggtggcggtcggtcaggagttcggctggaggacttcaactacaacaaccagactattactgatcaaatatacagagccatgaactcatctagcttcgaaggggtttccggacatgtggtttttgatgctagtgggtccagaatggcatggacactcatcgagcagcttcaggggggatcatacaagaaaattgggtactatgacagtacaaaggatgacctgtcatggagtaagacagataagtggatcggaggtagcccacccgctgatcagacactggtcatcaagacatttagatttttgagtcagaagctgttcatttcagtcagcgttctcagcagtctaggcatcgtcctcgccgtcgtttgtctgtcgttcaatatctacaattcacacgtgagatacatccaaaactcccagcccaatttgaacaatcttactgcagttggatgtagtttggccctggctgccgtttttccattagggttggatggctaccatatcggacgaaatcaattccctttcgtgtgccaagctcgcttatggctgctgggcctgggcttctctttggggtacggctctatgttcacgaagatttggtgggttcataccgtgtttactaagaaagaggaaaaaaaggaatggcggaagactctggaaccctggaaactttatgccactgtggggttgttggttggcatggatgtgctgacgcttgctatttggcagatcgtcgaccctctccatcgaacgatagaaaccttcgccaaggaggaacctaaggaagacatagacgtgagcatcttgccacagttggagcactgctcgagccgaaaaatgaatacctggcttggaatcttttatggctataagggactgctgctgcttttggggatttttctcgcctacgagacaaaaagcgtgtcaactgagaaaatcaatgaccacagggccgtgggtatggccatatataacgtagcagtgttgtgccttataaccgcccctgttacgatgatcttaagctcccagcaagacgccgctttcgcctttgccagcttagcaattgtgttctcttcatatataacattggtcgtgctctttgtgccaaagatgaggcgattgataacgagaggggagtggcagtcagaggctcaggataccatgaaaacaggttcaagtaccaataacaacgaagaagagaagtcgagattgcttgagaaagaaaaccgagagctggaaaaaattatcgccgagaaagaagaacgggtttcagagctgcgtcaccagctgcagtcgcggcagcagctgagatcccgcagacatcctccaacacctccggagccgtcagggggactccccagagggccacccgagccgccagaccggctgtcttgcgacggtagcagagttcatctcctgtataaatag

SEQ ID NO: 268885 - DNA, 2886 bp, Artificial Sequence
  derived and/or modified sequence
atgttgttgctgctactgctcgctcccctctttctccggcctcctggcgctgggggagcccaaactccgaatgccacatcggaggggtgtcagatcatccatcctccatgggaagggggtatcaggtataggggactaacccgtgaccaggttaaagccatcaattttctaccggtcgattacgaaatcgagtacgtgtgtcgaggggaaagggaggtagtgggccctaaggtaagaaagtgcctcgccaacgggagctggaccgatatggacacaccatctagatgtgtgagaatctgcagtaagagctatctgaccctcgagaacgggaaggtgttcctgaccggcggagacctgccagctttggatggagcaagggtggattttagatgcgatcctgatttccatctcgtggggtcctctaggtctatctgtagccagggccagtggagtacaccgaagccccattgccaggtgaaccgaacaccccacagcgaacgccgtgccgtctacatcggggctctgttccccatgtcgggcggttggccagggggtcaggcctgtcaacctgccgtggaaatggcattagaggacgtaaactccaggagagatatactccccgattacgagctaaaactaatacaccacgactccaaatgcgaccccggacaggccactaagtatttgtatgagctcttatataacgatcctatcaaaatcatcctcatgcctggatgttcaagcgtatctaccctcgtcgccgaggccgctaggatgtggaacctcattgtacttagctatggcagctcatcccccgcattgtcaaatcggcagaggtttcctacctttttccgcacgcatccttccgcgacactgcacaaccctacccgtgtgaagctctttgagaaatgggggtggaagaagatcgcaacaattcagcagacaaccgaggtgttcacctctacgttggacgatcttgaagaacgcgtcaaggaggcaggcatagagatcactttcagacagagctttttctctgatcccgcagtacctgtgaagaacctcaagcgccaggacgccaggattatcgtaggcttgttctacgagacagaagcacggaaagtcttctgtgaagtctataaagaacgcctcttcggcaaaaagtatgtatggtttttaatcgggtggtacgcggataattggtttaagatctatgatccatcgataaattgtactgtggatgaaatgactgaggctgtggagggacacatcacaaccgaaattgtcatgctgaaccccgctaatacccgatctatatctaacatgacaagtcaggaatttgtagagaagctaacgaagcggctcaagcggcatccagaagagactggtgggtttcaggaagcccctctcgcttacgatgcaatttgggccctggcactcgcgctaaataaaacttcaggcggtggaggacgtagcggtgttagactggaagacttcaactacaacaaccagactattactgatcagatttaccgggctatgaattcatcctcattcgagggggtgtcaggccacgttgtctttgacgcaagcggttcgcgcatggcctggacactgatagagcagctgcagggtgggagctacaaaaaaatcggttactacgacagcaccaaagacgacctgtcctggtccaagacagataaatggattgggggaagcccaccggcagatcagaccctcgtgatcaaaacctttaggttcttgagccagaagctcttcatttctgtttctgtgctgtcaagcctgggcatcgtgctcgccgtggtctgtctctcctttaacatctacaatagtcacgtcagatacatccagaatagtcaacccaatctgaacaatctgacagctgtaggttgttcccttgctctggccgcagtgtttcctctagggctagatggataccacatcgggcgtaaccagttcccctttgtctgtcaggctagactgtggctgctgggactgggattctctctggggtacggctcgatgttcactaagatctggtgggtccatacagtcttcacaaaaaaagaagagaagaaagaatggagaaaaactttagagccatggaaactgtacgcaacagtcggcctacttgtcggtatggatgttctgacactcgccatttggcagattgtggatccactgcacagaactatcgaaacatttgcaaaagaggagcctaaggaagacattgatgtcagcatacttccccagctcgagcactgtagcagtcggaagatgaatacttggctgggtatcttctacggatataaagggctcctgttgctactaggcatcttcctcgcttatgaaacaaaaagcgtcagtacggaaaagattaacgatcatagagccgtggggatggccatatataatgtcgccgtcttgtgcctgataacagccccagtgaccatgatcttgtcctcgcagcaggacgctgcttttgcattcgcctccctcgccattgtttttagttcctatatcaccctcgttgtgttgttcgtgcccaaaatgcgacggcttatcaccagaggcgaatggcaatcagaagctcaggacaccatgaagactggatcttcaaccaataataacgaagaggagaagtcacggctgctggagaaggaaaaccgagagctggaaaagattatcgccgaaaaggaagaaagggtgagcgaacttcgacatcaattgcagtcaagacagcagcttcgctcacggcgacatccaccgaccccgcctgagccgagtggtgggctccctcggggtccacctgaaccccctgaccggctatcttgcgatggatcacgggtccatctgctctacaaatag

SEQ ID NO: 268886 - DNA, 2886 bp, Artificial Sequence
  derived and/or modified sequence
atgctcttactattgctgctggcaccgctttttctgagacccccaggagctggcggagcgcagactcccaatgctacctcagagggatgtcagattattcacccaccctgggaaggcggaatcagatacaggggccttactagagaccaagtaaaggccatcaatttcctgcctgtagactatgagatcgagtatgtgtgcaggggggagagggaggtggtgggcccaaaagtgcggaagtgtctagccaacggatcatggaccgatatggacactccgtctcgctgcgtgaggatctgcagcaagagctatctgactcttgaaaacggtaaggtgttcctcaccggcggagatttgcctgctttggacggagccagagtggacttccgatgcgatcctgactttcatcttgtaggatcctcgcggtccatctgcagtcaagggcagtggagcacacccaagccccactgccaggtgaacaggactccacatagcgaacggagagcggtctatatcggggcactgtttcctatgtccgggggatggcctggtggacaagcctgtcagcccgcagtcgagatggcgctggaggatgtaaacagcaggcgcgacatcctccccgattacgagttgaagctgatccatcacgacagtaaatgcgatcctggacaggcgacgaaatatctttatgaactgctatacaacgacccgataaagattatcctgatgcccggatgttcatcagtgtccactttggtcgcagaggcagcacgcatgtggaacctcattgtcttgagctacggctcctcctccccggctctgtctaatcgacaaaggttccctactttttttcgcacacacccatctgcaacccttcacaaccctacaagagtcaaactctttgagaagtggggttggaaaaagatcgctaccatccagcagaccaccgaggtgtttacctctacgctcgatgacttagaggaacgcgttaaggaggccggaatcgagatcacatttcggcagagtttcttcagcgaccctgctgttcctgttaaaaacttaaaacgccaggacgcaaggataatagtgggactgttttacgagactgaagcacgaaaagtgttttgtgaagtatataaagaacggctgttcggcaaaaagtatgtgtggttcctcatcgggtggtacgccgataattggtttaagatctatgacccatccatcaattgtaccgtggatgagatgactgaggccgttgagggccacataaccacggagattgttatgttaaaccccgcaaatactagatccatcagcaacatgacaagtcaggagttcgtggagaaattgaccaagcgattaaaacgccaccccgaagagactggaggtttccaagaggccccactggcgtatgacgctatatgggcattagcactcgccttgaacaaaacctccggcggtgggggtcgaagcggcgtcaggctcgaggattttaattataacaatcaaaccatcactgatcagatctatagggctatgaactcttccagctttgaaggtgtgtcaggtcacgtggtgttcgatgcgtccgggtcccggatggcatggactctaattgagcaactacagggagggtcctataaaaagatagggtattatgattccacaaaggatgacctgtcctggagtaagacagataaatggatcggagggagtcctcccgcagatcagacactcgtgatcaagactttccgctttctgagtcaaaagctttttataagtgtctctgttttatcatcactgggcatagtcctcgcggtggtgtgtctgtcgttcaacatttataattcacacgtgagatatattcagaattcccaacctaatcttaacaacctgactgcagtcggatgtagcctagcattggccgctgtctttccactgggcttagatggctaccacatcggtagaaaccaattccctttcgtttgtcaggctcgactgtggctgctgggcctgggattttctctgggctatggatctatgtttaccaaaatttggtgggtacacacagtatttactaagaaggaggagaaaaaggagtggcgtaaaaccctagagccctggaagctctacgccaccgtgggcctgttggttggaatggacgtgctgaccctggcaatatggcaaattgtggacccactgcataggaccatagagacttttgccaaagaggagcctaaggaagatattgacgtctcaatcctgcctcagctggagcattgttctagcagaaagatgaacacctggctaggcatcttctacggttacaagggactgttgctgctgctcggcatattcctggcatatgaaactaagtctgttagtacagagaagatcaatgaccacagggcagtggggatggcgatttataacgttgccgttctgtgcctgatcaccgcccctgttaccatgatcctaagcagccagcaggacgccgctttcgcttttgcctcccttgccattgttttctctagttacataacgctggtggtcctcttcgtcccaaagatgagaagactaattacacgcggtgagtggcagagtgaagctcaggatacaatgaaaaccggctccagcaccaacaacaacgaggaggagaaaagcagactgctcgaaaaggaaaaccgagaactcgaaaagataatagcggaaaaagaagagagggttagcgaactcaggcaccaactgcagagtaggcaacagctgaggtccagacgtcacccccctaccccccctgagccctccggcggtctccccagaggtccaccggaacctccggacagattatcatgcgacggctcgcgggtgcatcttctgtacaaatag

SEQ ID NO: 268887 - DNA, 2886 bp, Artificial Sequence
  derived and/or modified sequence
atgctgctcctcctcttgctggcccctctgttcctgaggcccccaggcgcaggaggcgctcaaacgcccaacgccacttctgaaggatgccagatcatccaccctccgtgggaggggggtatccgatatagaggcctgaccagggaccaggtcaaagcgatcaatttccttcctgtagattacgaaattgagtatgtgtgccggggagagagggaagtggtgggcccaaaagtcaggaagtgtctggccaatggcagttggactgatatggacactccatctcgctgcgtgcggatttgctccaagtcttacctcacactggagaatggcaaagtgttccttaccgggggagatcttcccgcactcgatggagctcgtgttgacttccggtgcgatcctgatttccatctcgtgggctcaagccggagcatttgctcccagggacagtggagcacgccaaagccccactgtcaggtcaaccgtacccctcattccgaaagacgggcagtatatattggcgctcttttccctatgtcaggaggatggccagggggtcaggcctgtcagcccgctgtagagatggcattagaagatgtaaacagtcggagggacatcctgcccgattatgagctaaaattgatacatcacgattccaagtgtgacccaggccaggccaccaagtacctgtatgaactcctatataacgaccctatcaagatcatcctgatgcccggatgctctagtgtgtctaccctcgtcgcggaggctgcaagaatgtggaatttgattgtgctgagttatggctctagctcacccgcactgtcaaataggcagagattcccaactttttttaggacgcatccctccgctactctgcacaaccccacccgggtaaagcttttcgaaaagtgggggtggaaaaaaatcgctaccatccaacagaccaccgaggtgttcacctctacgctcgatgacttggaggaaagagtgaaggaagcagggatcgagatcaccttccgccagtcatttttttccgatcccgcagtacctgtgaaaaatctgaaaaggcaggatgctcgcattatagtcggcctgttttatgagaccgaggccagaaaagtcttttgtgaggtgtacaaggaaaggctcttcggtaagaaatacgtttggtttttaattggctggtatgcagataattggtttaaaatatatgacccaagcatcaattgtactgttgacgagatgactgaggccgtggaggggcacattaccacagagatagttatgttgaatcccgctaacacaagaagtattagtaacatgacttcccaggagttcgtagaaaaactaaccaagagactcaagcgccatcctgaagagacggggggtttccaggaggctcctttggcctatgacgctatttgggctctcgcgctcgcgttaaacaaaacaagcggaggcggaggcagatccggagtgcggcttgaagatttcaactataataaccagacaattacggatcaaatctacagagcgatgaactccagttcatttgagggcgtaagcggacacgtggtttttgatgccagcgggtctcgaatggcttggaccttgattgagcagcttcaggggggaagttacaagaaaatcggctattatgattctacaaaggatgatctgagctggtctaaaactgacaagtggataggaggaagccccccagccgatcagacactggtcatcaaaaccttccggttcctgagtcagaaattgttcatctctgtcagtgtgctctcatctttgggcattgtgctggctgtggtatgtctctccttcaatatatacaatagtcacgtgcggtatatccagaatagccagcccaatctcaataatcttaccgccgtgggctgttctttagctctggccgctgtgttcccactggggctcgacggctaccatatcggtcgcaaccaattcccattcgtgtgtcaggctagactctggttactgggcctcggttttagcttaggctacggttccatgttcactaaaatctggtgggtgcatactgtgttcacaaagaaagaggaaaaaaaggagtggagaaagaccctcgaaccctggaagctatatgcaacagtggggctcctcgtgggcatggacgtgttgaccctggctatttggcagatcgtggatcctttgcacagaacgatcgagacttttgccaaggaagagccgaaggaagacatagacgttagcatccttcctcagctggaacattgcagtagccggaaaatgaacacttggttgggaattttttatggctacaaggggctgctgttactcttgggcatattcctggcttatgaaactaagagcgtctctaccgagaagatcaacgaccatcgggctgtcgggatggccatctataacgtggcagtgttgtgcctgattaccgccccagtcactatgatcctgtcttcccagcaggatgccgcattcgcttttgcttctctggcaatagtcttttcgtcctacatcacgttggtagtcctcttcgtccccaagatgcgacgcctgattacaagaggagagtggcaatccgaggcacaagacaccatgaaaactggaagcagtaccaacaataatgaggaggagaagtctcgcctgctggagaaagagaaccgcgagctagaaaagatcattgccgagaaagaagagcgagtctccgaattaagacatcaactacagagcaggcagcagctcagaagccgcagacaccctccaaccccacctgaaccctcaggagggctaccgagagggcctcctgaacccccagaccgactgtcctgcgatggctcacgggtccaccttctgtataagtag

SEQ ID NO: 268888 - DNA, 2886 bp, Artificial Sequence
  derived and/or modified sequence
atgctcctgcttcttctgttggctcctctgtttctgcggccacctggtgcaggtggtgcccagacaccgaacgccacgagcgagggttgtcagattattcaccccccttgggagggtgggattaggtaccgaggcttgaccagggatcaggtgaaagcgattaattttttgcccgtcgattatgagatcgagtatgtgtgcagaggcgaacgcgaggtcgttggacctaaagtccgaaagtgcctggccaacggcagctggacggacatggatacacccagccggtgcgtgagaatttgcagtaaatcgtacctcacactggagaacggcaaagtattcctcacagggggtgatctacccgctttggacggtgctcgggttgatttccggtgcgatccagacttccatcttgttggctcttctcgctccatttgttcacaaggacagtggagcactcctaagccgcattgccaagtcaacagaacgccgcactcagaacgcagggccgtctacatcggggctctgttcccaatgtcagggggatggcccggaggccaagcttgtcagccggctgtggaaatggctctcgaagatgtcaattcgaggagggatattctccccgattatgagctgaagcttatacatcatgattctaaatgtgatccgggacaagctaccaaatatctttacgaactgttgtataatgatccgatcaagatcatcctgatgccaggctgtagtagcgtgtccacactggtcgcagaagccgctaggatgtggaacctgattgttctgtcttacggctcatcaagccctgccctatctaatagacagaggttcccaacatttttcaggacacacccaagcgctaccctgcataatcctacgcgggtgaagctgtttgagaaatggggatggaagaaaatcgctacgattcagcagacaaccgaagtgtttacttcaacgctggacgaccttgaggaaagagtcaaagaagccggaatcgaaatcacgttccgtcagtcattcttttccgacccagctgtgcctgtaaaaaacctgaagaggcaggacgcgcgtattatcgtcgggctgttttacgagaccgaagcacggaaggtgttctgcgaggtttacaaggagcggctgttcggcaagaagtacgtctggtttttgattggatggtacgctgataactggtttaagatttatgatccctctatcaattgcacagtggatgagatgaccgaagctgtggagggccacatcacaacagagatcgtgatgctcaatcccgctaatacacgtagtatttcaaacatgacatcccaggaattcgtggagaagctaacgaagaggttaaaaagacaccccgaggagaccggcggattccaggaggcacctctggcatatgacgccatctgggccctggctcttgcactaaataagactagcggcggagggggaaggagtggagtccgcctggaggactttaactataacaaccaaactataaccgaccaaatatatcgcgcaatgaacagcagctccttcgagggagtgtcgggacacgtggtgttcgatgcatccgggagtcggatggcatggacgctcatagagcaactgcagggcggaagctataagaaaattggctattatgactccaccaaagatgacttgtcatggagcaagactgataaatggattggaggttctccgcctgctgatcaaacacttgttattaagacattccgattccttagccagaaactttttatttccgtgagcgtcctcagctctctcggcatagtactggcagtggtctgtctttcatttaatatttacaatagccatgtgcgttacatacagaacagccaaccaaacttgaacaacttaaccgcagtgggctgtagcctagctcttgccgctgtatttcctctgggactggatggctatcatattgggagaaaccaattcccctttgtatgccaagcaagactctggctattaggtttgggattctcccttgggtacggctctatgtttacaaaaatttggtgggtccacacagtgttcaccaagaaagaagagaagaaagaatggagaaagactcttgaaccatggaagctttatgccaccgttggcctcctcgtcggaatggatgtgctgaccctggctatatggcagatcgtggacccgcttcatcgaacaatcgagaccttcgccaaggaagagcccaaagaggatattgatgtgtctattctcccacagctggagcattgtagctctagaaagatgaatacgtggttggggattttttacggatataaaggtttgctgttgctcctgggcattttcttagcctacgagactaaatcagtgagtactgagaaaattaacgatcaccgcgctgttggcatggcaatctacaatgtcgcggtgctttgcctgataaccgcgcctgtgaccatgattctttcaagccagcaggacgcagcttttgctttcgcctccctcgcaatcgtattttcatcctacatcaccttggttgtgctgtttgtccctaagatgcgcaggcttataaccaggggagagtggcagagtgaagcacaggatactatgaagactggatcaagtaccaacaacaacgaggaggagaaatcccgcctcttagagaaggagaatagggaactggagaagattatagccgagaaagaggagcgggtgagcgagctgcgacatcaacttcaatcgaggcagcaacttcgcagtcggaggcacccgcctaccccccctgagccatccggcggtctgcctcgtgggcctccagaacccccagatcgtctgagttgcgacggttcccgcgtgcacctgctatacaaatag

SEQ ID NO: 268889 - DNA, 2886 bp, Artificial Sequence
  derived and/or modified sequence
atgctgctcctgctcctactagcaccactctttctgcgtcctccaggagccggaggcgcacagacacctaacgccacatccgaaggttgccaaatcatccacccaccgtgggaggggggaattcgctacaggggactgacccgggatcaagtgaaggcaatcaactttctgcccgttgactatgagatcgaatatgtctgtcggggcgagcgcgaagtggttggaccaaaggttaggaagtgccttgctaacggttcctggacggatatggacactccatcacgctgtgtgcggatctgctctaagagttatttgacactcgagaatggtaaagttttcttaacggggggcgacctcccggccttagatggcgcgcgggtggacttccgatgtgaccctgattttcacctggttggaagcagccgcagtatatgtagccagggacagtggagcacccccaaaccacactgccaggtgaaccgcacccctcacagcgagaggagggcggtgtatattggagcccttttccctatgtcaggcggatggcccgggggacaagcctgccagcctgctgtggagatggctttagaggacgtgaactcccgaagagacatcctgcctgattacgagcttaaattaatccaccacgatagcaaatgcgatcctggccaggccaccaagtatctatatgagctgctgtataatgatcccataaaaatcatactcatgccaggctgttcttcagtttcaacactggttgctgaagcagctagaatgtggaatctgatagtgcttagctatggaagctctagtcccgctctaagtaatcgccagaggttccccactttcttccgcactcacccaagcgcaaccctccataacccaacccgcgtcaagctcttcgaaaaatggggatggaaaaaaatcgcgacaattcagcagactactgaggttttcacctcaacacttgatgatctggaggagcgagtcaaagaagccggtatcgagataacctttcgtcagagtttctttagcgaccctgcagttcctgtcaaaaacttgaaacgtcaggacgcgcgcattatcgtgggcttattttatgagaccgaagcaagaaaggtgttctgcgaggtgtacaaagaacgactgtttggtaagaagtatgtgtggttcctgataggatggtatgctgacaactggtttaaaatttacgatccttctatcaactgtacagtcgatgaaatgacagaagccgtggaagggcatatcacaacagaaatcgtgatgctaaatccagctaacactaggagcatcagtaacatgactagtcaagagttcgtggagaaactcacaaagcgattgaaacggcaccccgaggagacaggaggattccaggaggcccctttagcatatgacgctatttgggccctggccttggctttgaacaaaaccagcggcgggggcgggcggtccggagtgaggttggaagatttcaattataacaaccagactatcaccgatcagatatatcgggctatgaacagtagcagttttgaaggtgtcagcggccacgtcgtgtttgatgcatctggatcccgcatggcctggactttgattgaacaactccaggggggctcttacaaaaagatcggctactatgattccactaaggacgatctgtcatggtctaagaccgacaagtggatcgggggttctccccctgcggatcaaactttagtcatcaagacctttagattcctctcacagaaacttttcatttcagtatccgtgctatcgagccttgggatagttctggccgtggtgtgcctgagtttcaacatctacaactcccacgtccggtacatccaaaatagtcagccgaacctgaataatttaaccgccgtcggttgttcactggctctggctgcggttttcccactgggtctggacggctaccacatcggaagaaatcagtttcctttcgtgtgccaggcccgtctttggctcctaggcctgggattttccttagggtacggctctatgttcaccaaaatctggtgggtgcataccgtgtttacaaaaaaagaggaaaaaaaagagtggagaaaaacacttgaaccttggaagctgtacgccactgttgggctgctagtgggaatggacgtgctgacactggccatttggcagattgtggatccactgcaccgcacaatcgagacttttgccaaggaagaacctaaggaggacattgacgtgtccatcctcccgcagctcgaacactgtagcagcaggaagatgaacacttggctgggcatcttttatgggtacaaagggctgctgctgcttctgggcatcttccttgcctacgaaaccaaaagcgtcagcacggaaaagatcaatgaccacagggccgttggcatggctatctacaacgtcgccgttttgtgcctgatcaccgcccccgtcacaatgatcctttcatcgcagcaagacgccgcgttcgcattcgcatcactcgccatcgtgttcagttcatacataacactggtggttctcttcgtccctaagatgcggaggttgattacgagaggggaatggcagtccgaagcacaggacacgatgaaaactggcagtagtaccaataataatgaagaagaaaaaagccgcctgctagagaaagaaaatagagagctcgagaagatcatcgcagaaaaagaggagcgcgttagtgagttgcgacaccagctccagtcccggcaacaattacgcagcagacgccaccctccaacccctccggaaccttccggtggcttacctcggggaccaccagaacctcctgatagactatcttgcgatggatctagggtccacttactctataaatag

SEQ ID NO: 268890 - DNA, 2886 bp, Artificial Sequence
  derived and/or modified sequence
atgctacttttactcctactggctcccttattcctgcgcccgcccggggccggaggtgcccagacgcccaacgccacttctgagggttgtcagataatacatccgccatgggaaggaggcattcggtacaggggtctgacacgcgatcaggttaaagccatcaattttctccccgtagattatgaaattgagtatgtgtgccgcggcgaaagagaggtcgttggtcctaaagttcggaaatgtctggcgaatggctcttggactgacatggatactccgagcagatgcgttcggatctgtagtaagagctacctcaccctggagaacggaaaagttttcctgactgggggtgaccttcctgcactggatggcgcacgggtcgacttcaggtgtgatcctgattttcacctggtcggcagttccaggtccatttgttctcaaggccagtggtctaccccgaaaccccattgtcaggttaaccggacgcctcacagcgaaagaagggctgtgtacattggcgccctgttccctatgagtggcggctggccgggagggcaggcatgccagcctgccgtggaaatggccctggaagacgtaaacagccgacgggatatactccccgattatgaattgaaactgatccatcatgactccaaatgcgatcccggccaggcaaccaaatacttatatgagttgctctataacgatcctattaaaatcatccttatgcccggatgttcatctgtgtccacccttgtcgccgaagcagcacggatgtggaacctcatagttctcagctatggatctagcagtcctgcacttagcaatagacagcggtttcccacattcttccgcactcaccctagcgccacgctccacaacccaactagggtcaaactgttcgagaagtggggttggaagaagatcgcaactatccaacagacaactgaggtgttcacctctacattagacgatctggaagagcgcgtgaaagaagctgggatagagattacctttcgccagagcttcttcagcgacccagccgtccccgtgaaaaatctgaaacgacaggatgctcggatcattgtgggtctgttctatgaaactgaggctcggaaagttttttgcgaagtgtacaaggagagactatttgggaagaagtatgtctggttcttaatcggctggtatgcagataactggtttaagatttacgaccccagcattaattgcactgtcgatgagatgaccgaggccgtggagggtcatatcactacggagatcgtcatgctgaacccagccaatacaaggagtattagcaatatgaccagccaggagtttgttgagaagcttacgaagagattaaaacggcaccccgaggagacgggggggttccaggaagcgcctttggcatatgatgctatctgggcattagccttagcactgaacaaaacctccgggggaggtggcaggtccggagttcgccttgaggacttcaactacaacaaccagaccatcacagaccagatttatcgcgctatgaactcttccagtttcgaaggcgtgtcaggacatgtcgtgttcgatgcttcggggagcaggatggcctggactctaattgagcaactgcagggaggctcctacaagaagattgggtactacgattctaccaaggacgatttgtcatggtcgaagactgataaatggatcggaggatctcctcctgcggatcagaccctggtcatcaaaacctttcgctttctctcccagaaactgtttatctccgtctcagtgctgagctctttaggaattgttctcgctgttgtgtgcctgtcattcaacatttacaattctcatgtaaggtacattcaaaattcccagcccaacttgaacaaccttacggccgtgggttgttcgctcgccctcgccgcagtgttcccactgggactcgatgggtaccatatcggcagaaaccagtttccttttgtctgccaggccaggctttggttgctaggcctgggattctccctcgggtatgggtcaatgttcaccaagatctggtgggtgcatacagtgtttacaaagaaggaggagaagaaagagtggcgaaaaacccttgaaccatggaaactctacgccaccgtaggcctcctagtggggatggacgtgctgaccttggctatctggcaaatcgtggatccacttcacagaacgatcgagacgttcgctaaggaagagccgaaagaagacatcgatgtttccatactaccacaacttgagcactgttccagccggaaaatgaacacatggcttggtatattctacgggtataaagggctactgttgctccttggaatctttcttgcatacgaaacaaagtccgtttccaccgaaaagattaacgatcatcgagccgttggcatggccatatacaacgttgctgtgctctgcctgattaccgcccccgtgactatgatcttgtcatcccagcaggacgcagcatttgcgttcgcatccctcgctattgtcttctcatcatatataactttagtggtgttatttgtgcctaaaatgcgaagacttatcactcgtggagaatggcagtctgaagcccaagatactatgaagaccggaagttcgacaaataacaatgaggaagaaaagagccggcttcttgaaaaagaaaatagagagttagagaaaatcattgctgagaaagaggaacgcgtatcagagctgagacaccaattgcagtctaggcagcaactccgcagtagaagacatcctccaacaccgcccgagccatccggcggtctgcctcgagggcctcccgaaccacccgacaggctgagctgcgacgggtccagggtccatcttctctataaatag

SEQ ID NO: 268891 - DNA, 2886 bp, Artificial Sequence
  derived and/or modified sequence
atgttgctcttactgcttctggcccccctgtttctgcgcccccccggagccggcggagctcaaactcccaacgctacgagcgaaggctgtcaaatcatccaccccccctgggaaggcggtattcggtatcgaggcttaacgagggatcaagtgaaggccatcaactttctgccagtggattacgagatcgaatatgtgtgtcggggcgaacgagaggtcgttggtccgaaggttcgaaagtgtcttgcaaatggcagttggacagatatggatacacccagcaggtgtgtgaggatctgttcaaaaagctacctcacacttgagaatggcaaggtgttcctgacagggggtgaccttcctgctctggacggagctagggtagattttcggtgcgacccagatttccacctggtggggtcctccaggtctatctgcagccaaggacagtggtctacgcctaaaccccactgtcaagtgaacagaacaccacattccgagcgacgggccgtgtacatcggagctttatttccaatgagcggaggatggcccggcgggcaagcatgtcaacccgctgtcgagatggctcttgaagatgttaattcaagacgcgacatcttgcctgattacgagctaaagttgatacatcacgattcaaaatgtgatcctggccaagccaccaagtacctgtacgaattactttataacgatcctattaagataatcctgatgccagggtgtagctcagtgagcacactggttgccgaggcggctcgaatgtggaacctgatcgttttatcttatggtagctcaagccctgccctcagcaatcgacagcggtttcctacttttttcaggacccatccatcggctacacttcataatcctacaagagttaaactgtttgagaagtggggctggaaaaagatcgctaccatccagcagactaccgaagtcttcactagcaccctggacgacctggaggagcgcgtgaaagaggccggtatcgagatcactttccgacagagctttttctcagaccccgcagtgcccgtgaagaatctgaaaaggcaggacgctcgaataatagtgggcctgttttacgaaacagaggcgaggaaggtgttctgcgaagtgtacaaggagcgcctgtttggcaagaaatatgtttggttccttatcgggtggtatgcagataattggtttaagatatatgaccccagcatcaactgtactgtagacgaaatgactgaagcagtggagggacacatcacaaccgagattgtgatgcttaatcccgcgaatactagaagtatctcaaatatgacctcccaggagttcgtggagaaactgactaaacgtttaaaacgccatccagaggagacgggcggctttcaggaagctccattagcctatgacgccatttgggctctcgcgcttgccctaaacaagacttctggcggcggggggaggtccggagtaaggttggaagatttcaattataacaatcagactatcaccgatcagatctaccgcgccatgaatagctctagtttcgagggcgtgtccggccatgtagtcttcgatgcatcaggatcccggatggcatggactctgattgagcaacttcagggcggttcatacaaaaaaattggctactacgattctactaaggatgacttaagttggtcaaaaactgacaagtggatcggcggcagtcctccagccgaccagactctggttattaagacctttcggttcctgtcacagaagttgttcatctccgtttccgtgctgtcctctctcggcatcgtcctggccgtcgtgtgcctcagctttaatatctataattcccacgtcagatatatccagaactcgcaacctaatctcaataacctgaccgcagtgggatgcagtctggcacttgcagccgtgtttcccttaggacttgatggataccacatcggcagaaaccagtttccattcgtgtgtcaggctaggttgtggttattgggactcggcttctccctgggatatggctcaatgtttactaaaatttggtgggtccacactgtttttactaagaaagaagagaagaaggaatggaggaagacgctggaaccctggaagctgtatgccactgtgggattattggtgggtatggatgtcctcactctggccatttggcagatagtcgatcctttacaccggacgattgagacctttgccaaagaggaacctaaggaagatattgatgtgagcatcctgccccagctggaacattgctccagcaggaagatgaatacatggttaggtatcttctatggttataaagggttgctgttgctgctcggaatttttctggcctatgaaacaaagagtgtcagtactgagaaaattaatgaccacagagccgtgggcatggccatctataacgtcgcggtcctatgcctaatcaccgccccagttactatgatcctcagcagtcagcaagatgccgcctttgcattcgcaagtctggcaatagtgttctcttcatatatcacactggttgttttatttgtgcccaaaatgaggaggctgattacccgcggtgaatggcaaagtgaagcacaggacaccatgaaaaccggcagctctactaacaataacgaagaagagaaatcccggctattagagaaagagaatagagagttagagaagatcatcgcggagaaggaagaacgggtgagcgagctgcgccatcagctgcagtctagacagcagttacgctctagacgccatccccccacaccacctgagccaagcggcggcctccctagaggaccgcctgaaccccccgatcgtctaagttgtgatggaagtcgggtacacctactttataaatag

SEQ ID NO: 268892 - DNA, 2886 bp, Artificial Sequence
  derived and/or modified sequence
atgctcttactgttgctgctggcccccctcttcctcaggcctcctggagcaggtggcgcccagactccaaacgctacttctgaaggatgccaaattattcacccaccttgggaaggcggaatccgctatcgcgggctgactagggatcaagtcaaggccataaatttcttgccagttgactatgagatagagtatgtgtgtaggggcgagagagaggtcgtgggacctaaagttcgcaaatgccttgctaacgggtcctggactgatatggatacaccaagtagatgcgtgagaatatgcagcaagtcctatctgactctcgaaaatggcaaagtgttcctgacaggaggggacctacccgccttggacggagccagagtcgacttccggtgcgacccggactttcacctcgtgggcagttcacgtagcatttgctcccagggacagtggtctacaccaaaaccacactgccaggtcaacaggaccccgcacagcgagcgccgagccgtctatatcggcgcactcttccctatgtcgggaggctggccagggggacaggcttgccagccagctgtcgagatggccctggaggacgtgaatagcagaagggacatcctacccgattatgaattgaagctcatccaccatgacagcaagtgcgacccgggtcaggcgacaaagtatctgtatgaactgttgtacaacgaccctataaagataatcctgatgcccggttgctctagtgtttctactcttgttgccgaagccgcccgaatgtggaatctgatcgtgctgtcttacggctcatctagccccgcactctcgaacaggcaacggtttccaacattcttcagaacccacccctccgctacattacataacccgactcgcgtgaaactcttcgagaagtggggctggaagaaaatcgccactatacaacaaacaaccgaggtctttacgtcaacccttgatgacttggaagagagggtgaaagaggccgggatcgagatcaccttcaggcagtccttctttagcgaccccgcagtccctgtgaagaatctgaaacggcaagatgctcgcatcatcgtcggcctgttctatgagacggaagcacggaaggtgttctgcgaagtgtacaaggagaggctgttcggaaaaaagtacgtgtggtttttaattggttggtatgccgataactggtttaaaatttatgatcccagtattaactgcaccgtcgatgagatgacagaagcagtcgaggggcatatcaccacggaaattgttatgttgaaccctgcgaacactaggtccatctccaatatgacaagccaggaatttgttgaaaaactgactaaacggctgaaaaggcacccagaagaaaccggcggcttccaggaggcccccctcgcatacgacgccatctgggcattggctctggccttgaataagacatcaggcggaggaggaaggtctggagtcagactagaagatttcaactataacaatcaaactattacagaccagatttatcgcgcaatgaattcaagctctttcgagggcgtgtcggggcacgtagtgttcgatgcttctggaagcagaatggcctggactctaattgaacagctccagggggggagttacaaaaaaatcgggtattacgattctacgaaagacgacttgtcgtggagcaagactgataagtggatcggaggatcgccgcctgctgatcaaacactcgtaataaagaccttcagattcttgtcacaaaaactttttattagtgtttccgtgctgtccagcctggggatagtccttgcagttgtgtgcttgtcatttaatatctataactctcacgtgagatacatccagaattcccagcctaacttgaataacctaacagcagtcggatgtagcctagcgctcgccgccgtgttcccgctaggattagatggctatcacattggccggaatcagttccccttcgtttgtcaggccaggttgtggctcctcggcctggggtttagtttaggctacggatcaatgttcaccaagatatggtgggtccacaccgtattcaccaagaaggaggagaaaaaggaatggcgtaagacccttgaaccttggaagctttacgctacagtgggactgctcgttggaatggatgtcttgaccctagccatctggcagattgtcgaccctctgcataggactatagagacttttgccaaagaggaaccaaaggaagacattgacgtttccatccttcctcagctagagcactgcagctcccgaaagatgaatacatggctcggaatcttttacggctacaagggattactgttgctcctggggatttttttagcttacgaaaccaagtctgtgagtaccgaaaaaatcaacgatcacagagcggtgggaatggccatctacaatgtggcagttctgtgcttgatcaccgcacccgtgacaatgattctgagttcacaacaagacgcggccttcgcctttgcctcccttgccatcgtcttttcttcttacattaccttagtggttctgttcgtaccgaagatgagaagactcatcactaggggggaatggcagtcggaagcccaggataccatgaagactggctctagtactaacaacaatgaggaggagaaaagcagattgctggagaaggagaaccgcgagctcgaaaagattatcgctgagaaggaagagagagtcagtgagcttcgtcatcagttacagtctcgtcagcagctcaggagcaggagacaccctcctaccccaccggagccttctggcggacttccacgcggaccccctgagccccctgatcgactgagttgtgatggctctcgcgtgcatcttctgtacaaatag

SEQ ID NO: 268893 - DNA, 2886 bp, Artificial Sequence
  derived and/or modified sequence
atgctccttctcctgcttctggctccattgtttctcaggccacccggcgctggaggagcacagaccccaaatgccacatccgagggctgccaaatcatacatcccccctgggaaggcggtatcaggtatcgcggactgacccgagatcaggtgaaagcgataaacttcctgcctgtggattatgaaattgaatacgtttgccgcggggagagagaggtggttggccctaaagttaggaaatgcctggccaatgggtcttggacagacatggacacacccagtagatgtgtgcgcatctgctccaagtcatacctcacgctggaaaatggcaaggtgttcctcacaggaggcgatctccctgcattagatggcgcgagagtggacttcaggtgtgatccggacttccacttggttggcagcagtcgcagcatttgttcccagggccaatggagtaccccaaagccccattgccaggtgaaccggactccacactcagagaggagggcagtttatataggagctctgttccctatgtctggaggttggcccggcggccaggcgtgccagcctgctgtagaaatggccctggaagacgtgaactctcgtcgcgacatcctcccggactatgaacttaaactaatccaccacgactcaaaatgtgatcctggccaagccaccaagtacctgtacgagttactttacaacgatcccatcaaaatcatcttgatgcctggctgtagcagcgtgtctacactggttgctgaagccgctcggatgtggaatctgatagtattaagctacggttccagctcccccgctcttagcaacagacaaagatttcccaccttcttccgcactcatccctctgcaaccctccacaaccccactcgcgtcaagctgttcgagaagtggggatggaaaaagattgccactatccagcagacaactgaggtattcacttctacactggacgatctggaggaacgcgtaaaagaggcagggattgaaattacgttccgtcagtcatttttctctgaccccgcagtgccagtaaaaaacctgaagcggcaggacgcacgcattatagtcggactgttttatgaaacggaagcacggaaagttttctgtgaggtctataaggaaagactgttcgggaaaaaatatgtgtggtttctgataggttggtacgctgataattggtttaagatttacgatccctccatcaattgtactgtggatgaaatgaccgaagccgtagaaggtcacattactaccgaaattgtgatgcttaatcctgctaatactaggtccatttcaaatatgacctcacaggagttcgtggaaaaacttaccaagcggctgaagcggcatcccgaggagaccggagggttccaggaggcccccttggcttatgacgcgatttgggccctggccctggctctaaataaaactagtgggggcggcggaaggtcaggtgtcaggctggaggattttaattataacaatcaaacgataaccgatcagatctatagggccatgaattcctcttcattcgagggggtgtccggccatgtcgtatttgacgcaagcggatcccgtatggcatggactctcatagaacagctccaaggcggctcctacaagaaaataggatattatgactctacaaaagatgatctcagttggtccaagaccgataagtggatcggcggatctcctcctgcggatcagacccttgtgattaaaacttttaggtttctcagtcagaagctgtttataagcgtgtcagttctatctagtctaggaatcgtgctggccgtggtgtgcctgagctttaacatttataattctcatgtgaggtatattcagaactcccagcccaatctgaacaatctcaccgctgtgggctgtagcctggccctggctgctgtttttcctttaggattggatggttaccacatcgggagaaaccaatttcccttcgtttgccaggccagactctggctcctgggcctaggttttagtctcggatacggcagtatgttcaccaagatctggtgggtccacacagtgtttacgaagaaggaagaaaagaaagaatggagaaaaaccctggagccctggaaactctacgccaccgtgggcctattagtgggcatggacgtgttaaccctggcaatctggcaaatagttgacccactgcatcggaccatagagacctttgcaaaggaggagcctaaagaagatatcgacgttagcatccttcctcaactggagcactgttcaagtcggaaaatgaacacatggcttggaatcttctacggatataaagggcttctgctgctcctaggcatcttccttgcgtacgaaacgaagagcgtcagcacagagaagattaacgatcatcgtgctgttgggatggcaatctacaacgtggccgtactctgtctgataactgcccccgtaacaatgatattgagttctcagcaggatgcagccttcgccttcgcatccctggcgattgtgttcagcagctacattactctagtggtcttattcgtccccaagatgaggcgtctcatcacacgaggggaatggcaaagtgaagctcaggacactatgaagacaggttccagcacaaacaataatgaggaagagaagagccgcctattagagaaagagaatcgggaacttgagaagataattgccgaaaaagaagagcgggttagcgagcttagacatcaactgcagtcccgccaacagttgaggagccgtcgccacccgccaacacctcctgaacccagtgggggtctcccacggggcccaccggagccgcctgacagactgtcatgtgacggctctcgagtacacctgctttataaatag

SEQ ID NO: 268894 - DNA, 2886 bp, Artificial Sequence
  derived and/or modified sequence
atgctccttctgttactgctggcccctctatttcttagacctcctggggcaggaggcgcccaaacccctaacgccacatctgagggctgtcagattatccatcctccctgggagggaggcatcagatacagaggccttactcgggatcaggtgaaggctattaacttcctgcctgttgactatgaaatagaatatgtatgccgaggggaaagagaggtagtaggcccaaaagtaagaaaatgccttgccaacggcagttggacagacatggatacgccatcgagatgtgtaaggatttgtagcaaatcataccttaccctcgagaatggcaaagtcttcctgacagggggggatcttccggcgttggacggcgctagagtggactttagatgtgacccggatttccaccttgttggatcgagccgcagcatctgcagtcaagggcagtggtcaacacctaaaccacactgccaggtcaataggaccccacactcggagaggcgggcagtgtatatcggagccctgtttccaatgtctggcggctggccaggcggacaggcatgtcagccagccgtcgagatggctctggaagacgtgaatagccgcagagatattctgcccgattatgaactaaaattaatccaccacgactctaaatgcgatccagggcaagcgaccaaatacctgtacgaactgctgtataacgatcctatcaagattatcctaatgcccggctgtagttccgtgagcaccttggtggccgaggctgctaggatgtggaatctgattgtcctgtcctatggcagcagttccccggccctgtctaatcgtcaacgcttccccaccttttttagaacccatccatccgctactcttcacaatcccacgcgcgttaagctctttgaaaagtgggggtggaaaaaaattgcgacaattcagcagactacggaggtgttcaccagcacactagatgatctggaggaacgagttaaagaggctggtatcgagataacctttcgtcaatcttttttctccgatccggctgtacctgttaagaacctaaagcggcaggacgcacggattattgtcggattgttttacgagacagaagcacgtaaggttttctgcgaggtgtataaagagagactcttcggtaagaaatatgtttggttcctgatcggttggtacgctgacaactggtttaagatctacgatccatcaatcaactgcactgtggatgagatgaccgaggcggtcgagggtcatataacgacggagattgtgatgcttaaccccgccaatactagatctatctccaatatgaccagccaggagtttgtagagaagctgactaagcgcttgaaaagacaccctgaagagacaggagggtttcaggaggcaccgctcgcctatgacgcaatctgggccctggccttggccctaaacaagacaagcggcggcggcgggcggagcggcgtgcgactcgaagatttcaattacaacaaccagaccatcaccgaccagatctatcgagccatgaattcttcttcttttgagggggtgtctgggcacgtagtgttcgatgcgtcaggatcccgtatggcctggactctgatcgagcagctccaggggggtagttacaagaaaattggatattacgatagcactaaagatgatttgagctggagcaagacggataagtggatcgggggcagccctccggcagaccagacactggtgatcaagactttccggtttttatcacaaaagctattcatctccgtatcggtgctgtccagcctggggattgtgctggccgtggtctgcctctcttttaacatatataacagccacgtgagatatatccagaattctcagcctaaccttaacaatctgaccgccgtaggatgttccctagccctcgctgcagtctttcccctgggactggatggataccacataggtcggaatcagtttcccttcgtgtgtcaggcaaggctgtggcttcttggcctgggattctccttgggctacggttctatgtttacaaaaatttggtgggttcataccgtgtttacaaagaaggaggagaaaaaggagtggaggaaaaccctggagccgtggaaattgtacgctacagtgggcttgctggtgggaatggacgtgttaacgctggccatctggcaaatcgtcgatcccttacatcgcacgattgagactttcgccaaggaagagcccaaggaagatattgacgtgtcgatcctgcctcaactagagcattgctccagccgaaagatgaacacctggctggggatattttacgggtacaaaggactgctgcttctgctcggaatcttcctggcttacgaaacaaaatccgtctcaacagaaaaaatcaatgatcaccgcgcagtgggtatggctatttacaacgtcgccgtcctctgcctgataacagcacccgtgactatgattctgtctagccagcaggacgcagcctttgcctttgcctcactagccatcgtgttcagttcctacatcacacttgtcgtgctgttcgtgcccaagatgcgccgactcattactcgcggagaatggcaaagcgaggcgcaggacacaatgaaaaccggttcatcaaccaataataatgaggaggagaaatcaagactgctcgagaaagaaaaccgcgaacttgagaaaatcatcgctgaaaaagaggaaagggtgtccgaactaagacatcagcttcaatcccggcagcagctgcgcagcaggcggcatcctcctactcctcctgagccaagcggcggactgccccggggtccccctgagccacccgaccggttgtcgtgcgatggatcccgcgtccacctgctgtataaatag

SEQ ID NO: 268895 - DNA, 4509 bp, Artificial Sequence
  derived and/or modified sequence
cccttgcaccctccttcttccctccgcccgggagctctccctggtccccggcgccgcctccttccctcccggctccccgctccccgctcccgtggctgccgccgccccggggaagaagagacaggggtggggtttgggggaagcgagagaggaggggagagaccctggccaggctggagcctggattcgaggggaggagggacgggaggaggagaaaggtggaggagaagggaggggggagcggggaggagcggccggcctggggccttgaggcccggggagagccggggagccgggcccgcgcgccgagatgttgctgctgctgctactggcgccactcttcctccgccccccgggcgcgggcggggcgcagacccccaacgccacctcagaaggttgccagatcatacacccgccctgggaagggggcatcaggtaccggggcctgactcgggaccaggtgaaggctatcaacttcctgccagtggactatgagattgagtatgtgtgccggggggagcgcgaggtggtggggcccaaggtccgcaagtgcctggccaacggctcctggacagatatggacacacccagccgctgtgtccgaatctgctccaagtcttatttgaccctggaaaatgggaaggttttcctgacgggtggggacctcccagctctggacggagcccgggtggatttccggtgtgaccccgacttccatctggtgggcagctcccggagcatctgtagtcagggccagtggagcacccccaagccccactgccaggtgaatcgaacgccacactcagaacggcgcgcagtgtacatcggggcactgtttcccatgagcgggggctggccagggggccaggcctgccagcccgcggtggagatggcgctggaggacgtgaatagccgcagggacatcctgccggactatgagctcaagctcatccaccacgacagcaagtgtgatccaggccaagccaccaagtacctatatgagctgctctacaacgaccctatcaagatcatccttatgcctggctgcagctctgtctccacgctggtggctgaggctgctaggatgtggaacctcattgtgctttcctatggctccagctcaccagccctgtcaaaccggcagcgtttccccactttcttccgaacgcacccatcagccacactccacaaccctacccgcgtgaaactctttgaaaagtggggctggaagaagattgctaccatccagcagaccactgaggtcttcacttcgactctggacgacctggaggaacgagtgaaggaggctggaattgagattactttccgccagagtttcttctcagatccagctgtgcccgtcaaaaacctgaagcgccaggatgcccgaatcatcgtgggacttttctatgagactgaagcccggaaagttttttgtgaggtgtacaaggagcgtctctttgggaagaagtacgtctggttcctcattgggtggtatgctgacaattggttcaagatctacgacccttctatcaactgcacagtggatgagatgactgaggcggtggagggccacatcacaactgagattgtcatgctgaatcctgccaatacccgcagcatttccaacatgacatcccaggaatttgtggagaaactaaccaagcgactgaaaagacaccctgaggagacaggaggcttccaggaggcaccgctggcctatgatgccatctgggccttggcactggccctgaacaagacatctggaggaggcggccgttctggtgtgcgcctggaggacttcaactacaacaaccagaccattaccgaccaaatctaccgggcaatgaactcttcgtcctttgagggtgtctctggccatgtggtgtttgatgccagcggctctcggatggcatggacgcttatcgagcagcttcagggtggcagctacaagaagattggctactatgacagcaccaaggatgatctttcctggtccaaaacagataaatggattggagggtcccccccagctgaccagaccctggtcatcaagacattccgcttcctgtcacagaaactctttatctccgtctcagttctctccagcctgggcattgtcctagctgttgtctgtctgtcctttaacatctacaactcacatgtccgttatatccagaactcacagcccaacctgaacaacctgactgctgtgggctgctcactggctttagctgctgtcttccccctggggctcgatggttaccacattgggaggaaccagttccctttcgtctgccaggcccgcctctggctcctgggcctgggctttagtctgggctacggttccatgttcaccaagatttggtgggtccacacggtcttcacaaagaaggaagaaaagaaggagtggaggaagactctggaaccctggaagctgtatgccacagtgggcctgctggtgggcatggatgtcctcactctcgccatctggcagatcgtggaccctctgcaccggaccattgagacatttgccaaggaggaacctaaggaagatattgacgtctctattctgccccagctggagcattgcagctccaggaagatgaatacatggcttggcattttctatggttacaaggggctgctgctgctgctgggaatcttccttgcttatgagaccaagagtgtgtccactgagaagatcaatgatcaccgggctgtgggcatggctatctacaatgtggcagtcctgtgcctcatcactgctcctgtcaccatgattctgtccagccagcaggatgcagcctttgcctttgcctctcttgccatagttttctcctcctatatcactcttgttgtgctctttgtgcccaagatgcgcaggctgatcacccgaggggaatggcagtcggaggcgcaggacaccatgaagacagggtcatcgaccaacaacaacgaggaggagaagtcccggctgttggagaaggagaaccgtgaactggaaaagatcattgctgagaaagaggagcgtgtctctgaactgcgccatcaactccagtctcggcagcagctccgctcccggcgccacccaccgacacccccagaaccctctgggggcctgcccaggggaccccctgagccccccgaccggcttagctgtgatgggagtcgagtgcatttgctttataagtgagggtagggtgagggaggacaggccagtagggggagggaaagggagaggggaagggcaggggactcaggaagcagggggtccccatccccagctgggaagaacatgctatccaatctcatctcttgtaaatacatgtccccctgtgagttctgggctgatttgggtctctcatacctctgggaaacagacctttttctctcttactgcttcatgtaattttgtatcacctcttcacaatttagttcgtacctggcttgaagctgctcactgctcacacgctgcctcctcagcagcctcactgcatctttctcttcccatgcaacaccctcttctagttaccacggcaacccctgcagctcctctgcctttgtgctctgttcctgtccagcaggggtctcccaacaagtgctctttccaccccaaaggggcctctccttttctccactgtcataatctctttccatcttacttgcccttccatactttctcacatgtggctccccctgaattttgcttcctttgggagctcattcttttcgccaaggctcacatgctccttgcctctgctctgtgcactcacgctcagcacacatgcatcctcccctctcctgcgtgtgcccactgaacatgctcatgtgtacacacgcttttcccgtatgctttcttcatgttcagtcacatgtgctctcgggtgccctgcattcacagctacgtgtgcccctctcatggtcatgggtctgcccttgagcgtgtttgggtaggcatgtgcaatttgtctagcatgctgagtcatgtctttcctatttgcacacgtccatgtttatccatgtactttccctgtgtaccctccatgtaccttgtgtactttcttcccttaaatcatggtattcttctgacagagccatatgtaccctaccctgcacattgttatgcacttttccccaattcatgtttggtggggccatccacaccctctccttgtcacagaatctccatttctgctcagattccccccatctccattgcattcatgtactaccctcagtctacactcacaatcatcttctcccaagactgctcccttttgttttgtgtttttttgaggggaattaaggaaaaataagtgggggcaggtttggagagctgcttccagtggatagttgatgagaatcctgaccaaaggaaggcacccttgactgttgggatagacagatggacctatggggtgggaggtggtgtccctttcacactgtggtgtctcttggggaaggatctccccgaatctcaataaaccagtgaacagtgtgactcgg

SEQ ID NO: 268896 - DNA, 2886 bp, Artificial Sequence
  derived and/or modified sequence
atgttgctgctcctcctgctggctccgctgtttcttagaccacccggggcaggcggggcccagaccccaaacgcgacatccgaaggttgccagataattcaccctccttgggaaggaggcattcggtacagaggactgacgagggaccaagttaaggccatcaattttctgcccgtagactatgagatcgaatacgtgtgccggggcgaacgcgaagtagtgggaccaaaagtgagaaaatgtctggctaatggctcctggacagacatggatacacccagtagatgcgtgagaatttgttcaaagagttacctcactctggagaacggcaaagtgttcttaacaggcggggatcttcccgcattggacggcgcccgagttgatttccgttgcgaccccgacttccaccttgtggggtcttcccgctcaatttgtagtcagggccagtggtcaacgccaaaacctcactgtcaggtaaatcgaacaccacactccgaacggagagctgtctacatcggagcactcttcccaatgagtggtggctggcctgggggacaggcatgtcagcccgcagtagaaatggcgctcgaagacgttaacagcagaagagatattctcccggattatgagctgaagctgattcaccatgatagtaagtgtgatcccgggcaagctacgaagtacctctatgagcttctttacaacgatcctattaagattatactcatgccaggctgctcttccgtatctacgctcgtagcagaggccgcacgcatgtggaacctaattgttctgtcctacggatcgtcatcgccagcgctgagcaacaggcagcgatttcccactttcttccgcacccacccctcggccacactacacaatcccacgagagtcaaactcttcgagaagtgggggtggaagaagatagctaccatacagcagaccactgaagtattcacatctaccctcgacgatctggaagaacgggtgaaggaagctggtatcgagatcacctttaggcaatcttttttcagcgacccggcagtacccgtaaagaacctaaagagacaggacgcccggattatcgtgggattgttctatgaaactgaagctaggaaggtcttctgcgaggtttacaaagagcgcctctttggtaagaagtatgtctggttcctgattggctggtacgccgacaactggttcaaaatttatgatccatctattaattgcacagtcgatgaaatgacagaagcagttgaggggcacatcaccacggagatcgtgatgctcaatcccgccaacacaagaagcatttccaatatgacgtcccaagagtttgtagaaaaacttacgaagagattgaagcgccatcccgaggagacgggtggttttcaggaggctcccctcgcatacgacgccatctgggctttggcgctggctctgaacaagaccagtggtggaggaggaaggtccggcgtcagactagaagactttaactacaataatcagaccataacagaccagatctaccgggccatgaatagcagcagttttgagggggtgagcggtcacgtggtgtttgacgcctcaggctcacggatggcatggacactgattgagcagctgcagggcggcagctataaaaaaatcggttattatgacagtactaaagatgacctcagctggtcaaaaacagacaagtggataggcggttcacccccagccgaccagacactcgtgatcaaaacattccggttcctatcacagaaactctttatcagcgtcagcgtgctgagttccttggggatcgtcctggcggtcgtgtgtctgagctttaatatctataattcccacgtccgctatatccagaacagccagcctaacctgaataatcttaccgccgtagggtgctccctggctttggcagcagtttttcctttaggactcgacgggtaccatattggaagaaatcagtttccctttgtgtgccaagcccgtttgtggttactaggactcgggttttccctgggatacgggtctatgttcactaagatttggtgggtccacaccgtatttactaaaaaggaggaaaagaaggagtggagaaagactttggagccatggaagctctacgctactgtcggtttgctagtcggtatggatgtactaaccttggccatttggcagatcgtggatcccctccatagaacaatcgaaacgttcgctaaagaagagcctaaggaagacattgacgtgagcatattgccccaactggagcattgtagtagtaggaaaatgaatacatggctgggcatcttttatggctataaggggctgttgctcctgcttggcatcttcttagcgtacgagacgaagagcgtgtctactgagaagattaacgaccatagggccgtaggtatggccatttacaatgtggctgtcttatgccttatcacagctccagtgactatgatattatcatctcagcaggatgcagccttcgctttcgcctctctggccatagtgttctcttcttacataacgctggttgtcctattcgtgcctaaaatgaggcggttgatcaccagaggcgaatggcagagtgaggctcaagatactatgaaaaccggttcatctactaacaataacgaagaagaaaagtccagattgttggagaaggagaaccgggagctcgaaaagatcatcgccgagaaagaagaacgcgtgtctgagctgaggcaccagctccagtcgaggcagcagctaaggtctcgacggcacccaccaaccccccccgaacctagtggcggccttccacggggacctcccgagcctcctgatagacttagctgtgatgggtctagagtgcatcttctgtacaaatag

SEQ ID NO: 268897 - DNA, 2886 bp, Artificial Sequence
  derived and/or modified sequence
atgctgttactcctgctgctggcacctttgtttcttcgtcctccaggagccggcggtgcccagacacccaatgccacttcagagggttgtcagattattcatcctccatgggaaggaggaattcggtatagaggtctgactcgtgatcaggtgaaagctattaacttcctgccagtcgactacgagattgaatacgtctgcaggggcgagagagaggtagtgggccccaaagtgcggaagtgcctcgctaacggctcttggacagatatggataccccctcacgatgtgtgcgtatatgctccaagtcataccttaccctcgagaatggtaaagttttcctgacaggaggagaccttcccgccctcgatggcgctcgcgtagatttccggtgcgaccccgacttccacttagtaggtagctctcgatccatctgttcacaggggcagtggtccacccccaaacctcactgtcaagtcaataggacaccacacagcgaacggcgcgctgtctacatcggggcactcttccccatgtctggcggatggcccgggggtcaagcctgccaacccgccgtggagatggccttggaagatgtaaatagccggagagacatcctacccgattatgagctgaaattgattcaccatgacagtaaatgcgatcctggccaggcaacaaagtatctgtatgagctgctttacaacgacccaattaaaatcatcctgatgcccggctgctctagcgtgtccaccttagtcgcagaagcagcacgtatgtggaacctcattgtcctcagctatggctcctcaagccccgccttgtccaaccgccagagatttcccactttctttagaacacaccctagtgctacgctccacaacccaactagagtgaagctgttcgagaagtggggctggaaaaaaattgctacaatacaacagactacggaggttttcacatctactctggatgacctggaagaaagggtgaaggaggcagggattgagatcactttcagacaatctttctttagtgaccccgctgtacccgtcaaaaatctgaaacggcaggacgcccgaatcatagttgggctgttttacgaaactgaggcccggaaggtcttttgtgaagtgtacaaagaaaggctcttcggtaagaaatatgtgtggttcctaatcgggtggtacgcagacaactggttcaaaatctatgatccttcaatcaactgtactgttgatgaaatgactgaagccgttgaagggcatattaccacagagattgtcatgctgaatccagctaacacaaggtctatctcgaatatgacaagccaggagttcgttgagaaactcacaaagcgactcaaaagacaccctgaggaaactggcggattccaagaggccccattggcttacgatgcaatctgggctctggctctagcgttaaataagactagcgggggaggagggaggtcaggggtgaggctagaggacttcaattataacaatcagactatcaccgaccagatctaccgggcaatgaatagcagcagtttcgaaggcgtgagtgggcatgtagtattcgatgccagcggcagccgaatggcttggacactaatagaacagcttcagggcgggtcttacaagaaaatcggctactatgattctaccaaagacgacctttcatggtctaagactgataagtggatcggcggcagccccccagccgaccagacactcgtaatcaagacgtttaggttcttgtcgcaaaaactcttcattagtgtgagcgtactgtcctcattaggaatagtcctcgccgtggtttgcctcagctttaacatctacaacagtcatgttagatacatccaaaattcacagccaaacttaaacaaccttacagccgtgggatgtagccttgctcttgcagcagtttttcccctaggactagatgggtatcatattgggcgtaaccagttcccctttgtgtgtcaggccagactgtggctattgggcttgggcttttcattgggctacggcagcatgttcacaaaaatatggtgggtccacaccgtctttactaagaaagaagaaaaaaaagagtggcgcaagacccttgaaccctggaagctgtatgctaccgtgggcctactcgtagggatggacgtgctgacactagccatttggcagatagtcgatcctttacatcgaaccattgaaacatttgcaaaggaagaacccaaagaagatatagatgtgagtatcctaccacagttggaacattgctcttctagaaagatgaatacatggctggggattttctacggctacaagggattactgttactactggggatattcttagcgtacgaaacgaaatccgtgagtactgaaaagatcaatgatcatcgcgccgtcggtatggccatctataatgtcgctgttctgtgtttgatcaccgcgcccgtgaccatgatcctcagttcccaacaggatgccgcatttgcttttgcctccctcgccattgtgttcagctcatacataacactcgtggtcctgtttgtcccgaagatgcggaggctgattacccgtggagagtggcagtccgaagcgcaagataccatgaaaaccggaagctctacaaataataatgaagaagagaagagtcggctcttggagaaggagaaccgtgagctagaaaaaattattgccgagaaagaggaacgtgtttcggagctcagacatcagctccagtcccgacaacagctgcgatcccgaagacacccacccactccgccagaaccgtccggaggcttaccacgtggaccaccagagccaccagacagactttcatgtgatggatcaagggtccacttgctgtacaaatag

SEQ ID NO: 268898 - DNA, 2886 bp, Artificial Sequence
  derived and/or modified sequence
atgctacttttactcctactggctcccttattcctgcgcccgcccggggccggaggtgcccagacgcccaacgccacttctgagggttgtcagataatacatccgccatgggaaggaggcattcggtacaggggtctgacacgcgatcaggttaaagccatcaattttctccccgtagattatgaaattgagtatgtgtgccgcggcgaaagagaggtcgttggtcctaaagttcggaaatgtctggcgaatggctcttggactgacatggatactccgagcagatgcgttcggatctgttccaaatcttacttgaccctggaaaacggaaaagtctttctcacaggcggcgacctccctgctctggacggcgcgcgcgtggacttcagatgtgaccccgattttcaccttgtaggtagctcgagaagcatttgtagtcaaggccagtggtctaccccgaagcctcactgtcaggttaacagaactccacacagcgagagacgcgccgtttatattggggcactgttccctatgtctggcggctggcccggcggccaggcttgtcaacccgccgtggagatggcactggaagatgtgaatagcaggagagatatattacccgactacgaactgaagttaattcaccatgacagtaagtgcgatcctggacaggccacaaaatacctgtacgaactgttatataacgatcccattaagataatactgatgccaggttgctcttccgtttccaccctggtcgctgaggcagctcgaatgtggaacctgatcgtactttcttatggatcttcctccccggccctcagcaatcgccagcgatttcccacatttttcagaacccacccctctgccacactgcacaatccaacacgagtgaaactctttgagaaatggggctggaaaaaaatcgcaacgattcagcagacgaccgaagtgtttacaagtaccctggacgacctggaggaaagagttaaagaggccgggatagagatcaccttccgccagtcgtttttcagtgatcccgccgtccctgttaaaaatttgaagcggcaagatgctcgaattatcgtcgggctgttctacgaaacagaggcgcgcaaagttttctgcgaggtttataaggagagactcttcgggaaaaagtacgtttggttcctgataggctggtatgctgacaattggttcaaaatttatgaccctagcatcaactgcactgtggatgaaatgacggaggccgtcgaagggcatattaccactgaaattgtcatgctcaacccagctaatacccgctcaatctccaatatgacatcccaagaatttgtggaaaagctgaccaaacgtctcaaaaggcatcccgaggagaccggcggtttccaagaggcaccacttgcttatgatgcaatatgggctctggctttggccttgaacaaaacaagcgggggaggaggaagatctggcgtgcgtctggaggattttaactataataatcagaccattaccgaccagatttaccgagctatgaattcttcgtcctttgagggtgtgtccggacacgtggtgtttgatgcctccggctctagaatggcatggacccttattgagcaactgcagggtgggtcttacaagaaaattggttactacgacagcacaaaagatgatctatcttggtctaagaccgacaagtggataggagggtcaccacccgctgaccagactctggtaatcaagacattccgcttcctgagtcaaaaactgttcattagcgtgtctgttctttctagcctgggcattgtgctcgctgtcgtttgcctaagcttcaacatctacaactcccatgttcgctatatccagaactctcagccaaatctaaacaatcttacagcagttgggtgttctcttgccttggcagccgtgtttcctctcggcctggacgggtaccacatcggccgcaaccaattcccttttgtgtgtcaagctagactctggttattaggcttggggttttctctgggttacgggtccatgtttactaagatctggtgggtccatacagttttcactaagaaggaagaaaaaaaagaatggagaaaaacgcttgaaccctggaagttgtatgccacagtcggactgttggtgggtatggatgtcttgactcttgctatatggcagatcgtggatcccctgcacaggacaatcgagacgtttgcaaaagaagaaccgaaggaagatatagatgtgtccatactccctcaactcgaacattgctcatctcggaagatgaatacttggctcggaattttttacggatataaaggactgttgctgctgctgggtatcttcctcgcttatgaaacaaaaagtgtctctacggaaaagatcaacgatcatcgagccgttggcatggccatatacaacgttgctgtgctctgcctgattaccgcccccgtgactatgatcttgtcatcccagcaggacgcagcatttgcgttcgcatccctcgctattgtcttctcatcatatataactttagtggtgttatttgtgcctaaaatgcgaagacttatcactcgtggagaatggcagtctgaagcccaagatactatgaagaccggaagttcgacaaataacaatgaggaagaaaagagccggcttcttgaaaaagaaaatagagagttagagaaaattatcgcagagaaggaagaacgtgtctccgagttaagacaccaattgcagtctagacaacagctgaggagccgccggcatccacccaccccacctgagccaagtggaggattaccacgaggccctcctgagccccctgaccgcctgtcctgtgacgggtcacgcgtgcatctgctttataaatag

SEQ ID NO: 268899 - DNA, 2886 bp, Artificial Sequence
  derived and/or modified sequence
atgcttctgttgcttctcctcgcacccttgtttttgagaccacctggcgcgggcggcgcccaaaccccaaacgcgaccagtgagggctgtcagattatccatcccccatgggagggtggtatcaggtacagaggattgactagggaccaggtaaaagcaataaatttccttcccgtagattacgagatcgagtacgtatgccgaggtgagagggaggtcgtcggccctaaagtcagaaaatgtcttgcgaacggatcctggacagacatggataccccttctcgctgcgtgaggatttgcagtaaatcttacctgaccctcgaaaatggcaaggtttttcttacggggggtgatctccctgctttggatggcgcacgagtggattttagatgtgacccggactttcacctggtgggatcgtcgcgcagcatttgctctcagggacagtggtccactccaaaacctcactgtcaggtcaatcgcacaccacactccgaacgtagagcggtctatattggagcactgttcccaatgtccggcggttggcccggtggtcaggcctgccaaccagccgttgaaatggcacttgaggacgtaaacagcaggcgagatatactgcctgactacgaattgaagctgatccaccatgatagcaaatgtgaccccgggcaggccaccaaatacctgtacgaattgctgtataatgatcccattaaaattatcctgatgcccggatgttcctctgtgagtaccctggttgccgaagcggctcggatgtggaatttaatcgtgttaagttatggatcaagcagcccagctctttctaatcgccagcgatttcccaccttctttcggacccaccccagcgctactctgcacaaccctacccgagtaaaactgttcgaaaaatgggggtggaagaagatcgcgacaattcaacagacaaccgaggttttcacaagtacactggatgatctggaggaaagagtgaaagaagctggaattgagattacctttaggcagtccttttttagtgatccagccgttccagtgaaaaacctgaagagacaagacgcccgaattattgtgggcttgttctatgaaaccgaagctaggaaagttttttgcgaggtgtataaggagcgactgtttggaaagaaatatgtgtggtttctgatcgggtggtacgctgataactggtttaaaatctacgatccctccattaactgtacagtggatgagatgacagaagcagttgagggccatattactacagaaatcgtgatgttaaaccctgccaacacaaggagtattagtaatatgacaagtcaggaatttgttgagaagctaaccaaacgcttgaagagacatcctgaggagaccgggggattccaggaagcacctttggcctacgacgccatctgggcccttgctctggcactgaataaaaccagcggaggaggaggtaggtcaggagttcggttagaggactttaactacaataaccagaccattaccgaccaaatatatagagcgatgaactcgagctcattcgagggagtttcggggcatgtcgtatttgatgcatccggcagtcgcatggcatggaccctcatcgagcaactgcaaggcggttcctacaagaaaattggctattatgattcaacaaaagacgatctcagttggtccaaaacagataaatggatcggcggttctccccctgccgaccagactttggtcatcaagacattccggtttctcagtcagaagctgtttatctccgtaagcgttctttcctcccttggaatcgttctggctgtcgtatgcctttcctttaatatctacaatagtcacgtgcgttatattcaaaattcacagcctaaccttaacaacctcactgccgtcgggtgctctcttgctcttgctgcagtttttcccctgggtctcgacggttaccatatcggccgtaatcagtttccctttgtatgccaggctcgactttggctgcttggattgggcttttcactgggctacggctccatgttcactaaaatttggtgggtgcacacggtttttactaagaaggaggagaagaaggagtggcggaagacacttgagccctggaaattgtacgcaaccgtgggattattagtggggatggatgtgctgaccctcgccatttggcagattgtagaccccttgcatcggactattgagactttcgctaaggaagaaccgaaagaagatatcgatgtctctattctccctcaactggaacattgcagctcccgcaaaatgaacacgtggctcgggattttctatggatataaaggcttgttactgctgttgggaatatttttggcatacgagacaaaatcagtgagcacggaaaaaattaatgatcacagggccgtcggcatggcgatctataacgtggctgtcttatgcctaattaccgcacccgtgacaatgatactgtcctcccaacaggatgccgcatttgctttcgcctctctcgccatagtcttctcgagttatatcaccctggtagtcttgttcgtgcccaaaatgcggcggttaattacgaggggggaatggcaatctgaagctcaggacacaatgaaaaccggatcaagtacgaataacaatgaagaagaaaaatcaagactgctggagaaggagaatcgggagcttgagaagatcatcgcagagaaggaggaaagagtaagtgaactgcgtcaccagcttcagagtcggcagcaacttagatctaggagacatccccctacccccccagaaccatcaggtgggctgcctcgaggcccacccgagccccccgatcgacttagctgtgacggatcccgcgtgcacttgttatacaaatag

SEQ ID NO: 268900 - DNA, 2886 bp, Artificial Sequence
  derived and/or modified sequence
atgttgttactcctcctgttggcaccactgtttctgcgtccacctggagcaggcggagcccagacccccaacgctactagtgagggatgccagattattcaccccccatgggaaggcggaattagataccgcggcctgacgagagaccaggtgaaagctattaatttcctccccgtggattacgaaatcgaatacgtctgtcgaggcgaacgggaggttgtcggacccaaggttagaaagtgcctggctaatggatcatggactgatatggataccccctctagatgtgtgaggatctgcagcaaaagctacttgacactggagaatggcaaagtgtttctgacgggaggagatctgccggcactagacggggcgcgcgtcgattttaggtgtgaccctgactttcacttagtgggcagcagccgctcaatttgctcacagggccagtggtccacacccaagccccattgccaggtgaacaggacccctcactccgaacgtcgtgctgtctatatcggtgccttattccccatgagtggtggctggcccggcggacaggcatgccaaccggccgtagaaatggctctggaggatgttaattctagaagagatatacttcctgactatgaacttaaattgatccaccacgatagcaaatgcgatccaggccaagctacaaaatatctgtacgagctgctttacaacgaccctattaagattattctcatgcccggatgtagttctgtatctactctggtagcagaagccgctcgcatgtggaatctcatcgtcctttcttatggttcaagctcacccgctctgagtaacaggcaacgcttcccaacttttttccgcacccatcctagcgccacactgcataaccctacccgggtcaagctcttcgaaaagtggggatggaaaaaaattgcaaccattcagcagacaactgaagttttcactagcacacttgacgatttggaggaacgggttaaagaagctggaatcgaaatcacgtttagacagtcgtttttttctgacccagcggtgcctgtgaagaatctaaaacggcaggacgcaaggattatagttgggttattttatgaaacagaagcccggaaagtgttttgtgaggtttacaaagagagactcttcggaaagaaatacgtgtggttcctgatcggctggtacgcggataactggtttaaaatttatgaccctagtattaactgcacagtggacgaaatgactgaggctgtagaaggtcatattacgacagagatcgttatgctcaaccctgcaaatacccgatccatttccaacatgacctcccaagaatttgtagaaaagctgacgaaacgcctcaaacggcatccagaagaaaccggcggattccaggaggcccctctcgcgtacgacgctatctgggccttggctttggcactgaataaaaccagcggtggtggcggaagatctggcgtgaggttggaggactttaattacaataaccaaactattactgatcagatttatcgcgcaatgaattccagctccttcgagggcgttagtggccacgtagtcttcgacgcttccgggtctcgcatggcttggacgctcattgagcagttgcagggaggttcatacaaaaaaataggatactacgacagtactaaagacgatcttagttggtccaagacggacaaatggataggcggatccccacccgccgatcagaccctggtcataaaaacctttagatttttatcacagaaattgtttattagtgtcagtgtgctctcttctctgggaattgtcctagccgttgtttgtctgtcctttaatatatataactcccacgtgcggtatatccagaatagtcagcccaacttgaacaatcttacggccgtaggttgtagtctggccttagcggcagtttttcccctcggacttgatggctatcatattgggcggaatcagttcccattcgtctgccaagctaggctctggctgctgggattgggtttttcgttaggctacggatcgatgtttaccaaaatttggtgggtgcatacagtctttacaaaaaaagaagaaaagaaagagtggagaaaaacgctggaaccttggaagttgtacgcgacagttggccttctcgttggcatggatgtactgacccttgcaatttggcaaatagtggaccctctgcaccgcactatcgaaactttcgccaaggaggaacctaaggaagatatcgacgtgtcaatcctcccacaactcgagcactgctctagccgcaaaatgaatacctggctggggatcttttacggatataaaggactgctgctgctgctcggaatattcttggcatacgaaacgaaatcagtgagtacagagaaaattaacgatcatcgggccgtgggaatggctatttacaatgttgccgttttatgcttgatcactgctcctgtgactatgatcctaagctcccagcaggatgctgcgtttgcttttgcctcccttgctattgtcttctcctcatacatcacgctggtcgttctattcgtgcccaagatgagacgactaattactaggggcgaatggcagagcgaggctcaggacacaatgaaaacaggctcatcgactaataataacgaggaagaaaaatccagactgttagaaaaagagaatcgcgaactcgaaaagatcattgccgagaaggaagagagggtatcagaactgaggcaccagctacaatcccgacaacagttacgctcaaggcgccatccccctaccccgcccgaaccgtcaggtggcctgccccgaggacctcccgagcccccagaccgcctttcctgtgatggctcccgcgtccacttgctgtacaagtag

SEQ ID NO: 268901 - DNA, 2886 bp, Artificial Sequence
  derived and/or modified sequence
atgttgttactgcttctgctagctccattattcctgagaccacccggggcagggggtgcccagactcccaacgctacatctgaaggttgccagattattcatcctccatgggaaggcggtattcgatacagagggctcacccgcgaccaggtgaaagctatcaacttcttacctgttgattatgagatagaatatgtttgccggggagagcgagaagtggtcggccccaaagtcaggaagtgtctcgctaatggctcctggaccgacatggacacccctagccggtgtgtgaggatatgtagtaaatcatacctgactctagagaacggtaaggtgttcttgactggtggggatctaccagccctggatggcgctagagtcgatttcagatgcgaccccgattttcacctcgtgggatccagtcgttctatttgctctcagggacagtggtctactccaaagccgcactgtcaggttaatcgcaccccacattccgagagacgagcggtttatatcggggcccttttccccatgtccggaggatggccgggaggccaggcttgccaaccagcagtagaaatggccctggaggatgtgaactcgaggcgagacattctcccagattacgaactgaaattgatccaccacgactctaaatgtgatcccgggcaggccaccaaatatctctatgaactcctgtacaatgacccgatcaaaataatactcatgcctgggtgcagcagcgtaagtacacttgttgccgaggcagccagaatgtggaatctcattgtcctctcgtatggctcatcttcgcccgcgctctctaataggcaaagatttccaactttttttaggactcacccctcagctaccctgcacaatcccacacgggtgaaactcttcgaaaaatggggctggaaaaaaatcgccacgatacagcagactacggaagttttcacatccactctagatgacctggaggaacgtgtcaaagaagccggcatcgagattacattcagacaatcattcttctctgacccagcagtcccagttaagaatctcaagcggcaagatgcgcgaatcattgtaggtttattctacgagacggaggcaagaaaagttttttgtgaggtgtataaagagaggttgttcggtaaaaagtacgtgtggttcctgattggctggtatgctgataactggtttaaaatctatgatccgtcaatcaattgcaccgttgacgagatgaccgaggctgtagagggccatataacgacagaaatcgtcatgctgaaccccgcaaacacacgtagtatttctaatatgactagtcaagaattcgtggaaaaactgacaaagcgacttaagagacatcctgaagagaccggaggatttcaagaggcacccctcgcatatgacgctatttgggcgctggccctcgctcttaacaagacgtccggcggcggaggccgttcaggagtgagactcgaggacttcaattataataatcaaaccattaccgatcagatttacagggctatgaacagttcaagtttcgagggagtttccggccatgtggttttcgatgccagtgggtcacggatggcatggacccttatcgagcagctgcagggcggctcttacaagaaaatcggctactacgactctaccaaagatgacctgtcctggtcaaaaacagacaaatggatcggagggagcccaccagcagatcagacccttgttatcaaaacattcaggttcctctcacagaagctcttcatctcagtcagtgtcctcagcagcctgggcatcgttctggcggtggtgtgtctgtcattcaacatctataactcacacgttcggtacattcagaactcccagcccaatcttaataatctcaccgcagttggatgctctctcgcgttggccgcagttttccctctcggactggacggatatcatataggaagaaatcaatttcccttcgtgtgtcaagctcgactttggctcctcgggctgggcttctctttgggctacggtagtatgttcactaagatttggtgggtccacaccgtgtttactaaaaaggaggagaaaaaagaatggcggaaaactctagaaccctggaagctgtacgcaactgttggattacttgtaggtatggacgtgttaacccttgctatatggcagatagtcgacccattacaccggaccattgagaccttcgcaaaagaagaacccaaagaagatattgatgtgagtatcttaccacagctagagcactgcagttcccgtaaaatgaatacatggttagggatcttttatggttacaaaggactgctactcttgctcggaatattccttgcctacgaaactaagtcagtgagcactgagaagatcaatgaccacagggcggtcggaatggcaatctataatgtcgccgtgctctgtcttatcacagctcctgtcacaatgatcctctccagtcaacaggacgctgcattcgcatttgccagtctggcgatcgttttctctagctatattacactcgtagtgcttttcgttccaaaaatgagacgcttaattacccgtggggagtggcagtccgaagctcaagatactatgaaaaccggctcttctactaataataatgaggaggaaaagagtagactgttggaaaaggaaaaccgggaacttgaaaagatcattgcagagaaagaagaaagagtgagcgaactaagacaccaactccagagtaggcagcagctaagaagcaggcggcaccccccgaccccccccgaaccgagcggcggcctgccacggggcccccccgaacccccagaccgactctcatgcgacggctccagggtgcatctattatataagtag

SEQ ID NO: 268902 - DNA, 2886 bp, Artificial Sequence
  derived and/or modified sequence
atgctgctgctactgctcctggctccactattcttacgcccacctggggcaggaggcgcccaaactccaaatgctacaagcgaaggctgtcagattatccaccccccttgggagggcggtatcagatatcgggggttgaccagagatcaggtgaaagcaattaatttcctacccgtggactatgagattgagtacgtctgtaggggagagagggaagtcgtcggccctaaagtgaggaaatgcttagcaaatgggtcatggactgacatggataccccaagtagatgtgttcgaatctgctcgaagagttaccttaccttagaaaacgggaaagtttttctgacaggtggcgatctccccgccttagatggagctcgggtggatttcaggtgcgaccccgactttcatctggttgggtcttctagaagcatctgttcacagggacaatggtcaactcctaagccacattgtcaggtcaaccgaaccccacatagcgagagaagggccgtctatatcggagctctcttcccaatgagcgggggctggcccgggggtcaggcctgccagccggctgtcgaaatggccttagaagacgttaattcacgacgagatattctgcccgactacgaactgaagctgatccatcacgatagtaaatgcgaccccgggcaggctactaaatacctgtacgaattgctctacaacgatccaattaaaattattctcatgcctggatgcagcagcgtcagcacccttgtcgcggaagctgcacgcatgtggaacctaatagtcctctcatacggcagctcctctcctgcactttctaatagacagcggtttccaacgtttttccggacccatccctccgctactttacataatcccacccgggtaaagttatttgagaaatggggatggaaaaagatcgcaaccattcaacagaccacagaagtcttcacatctacccttgacgatttagaggaaagagtgaaggaagcaggaatagaaataacatttagacagtcctttttcagtgatcccgccgttccagtaaagaatttaaaaaggcaagatgcccggataatagtgggattgttctacgagaccgaggcacgaaaagttttctgtgaggtgtataaggagcgactcttcggcaaaaagtacgtgtggttcctgattgggtggtatgcggacaactggttcaaaatctatgacccttcaataaactgcacagtggatgaaatgactgaggctgtagaaggtcatattacgactgagattgtaatgttaaatcctgccaacacacgaagtatcagcaacatgacgtcacaggaatttgtggaaaagctgactaagcggctgaaaagacatccggaggaaacaggcggcttccaagaggctccgctcgcatacgatgccatttgggcactggcacttgccttaaataagacctcaggcggaggaggcagatccggggtgagactggaagatttcaactacaacaatcaaacaatcacagaccagatctatagagctatgaacagtagcagctttgaaggggtgtctggccacgtcgtgtttgacgcgtcgggcagtagaatggcctggaccttaatagaacagctgcaaggtggttcttacaaaaaaattgggtattatgactctaccaaggacgatctctcctggagcaagactgacaaatggattggcggaagcccccccgcagaccaaaccttagttattaagacattccgcttcttatctcagaaactgtttatatcagtcagcgtcctttcctcactcgggattgtcttagccgtcgtgtgtttaagttttaacatttacaactcacatgtgaggtatatacagaactcacagccaaatctgaataacctgacagccgtggggtgctctttagctctggcagcagtgttccctctggggcttgacggatatcatattgggagaaatcagtttccgtttgtatgtcaggcgcgactgtggctactggggctggggttttcattaggttacggcagcatgtttacgaaaatctggtgggtgcatactgtcttcacgaagaaagaggaaaagaaggaatggagaaaaacgctggagccttggaagctgtacgccacagtagggttgctcgtcggaatggatgtcctgaccttggccatttggcagatcgtagatccccttcaccgtactatcgagaccttcgccaaagaagagcctaaagaagatattgatgtgagtatactgccacagcttgagcattgctcctctcggaaaatgaacacctggcttgggattttctacggatataagggcctgcttctgctgcttggaatctttctggcatacgaaacaaaatccgtgagtacggaaaagatcaacgatcaccgcgcagtgggtatggctatttacaacgtcgccgtcctctgcctgataacagcacccgtgactatgattctgtctagccagcaggacgcagcctttgcctttgcctcactagccatcgtgttcagttcctacatcacacttgtcgtgctgttcgtgcccaagatgcgccgactcattactcgcggagaatggcaaagcgaggcgcaggacacaatgaaaaccggttcatcaaccaataataatgaggaggagaaatcaagactgctcgagaaagaaaaccgcgaacttgagaaaatcatagcagaaaaagaggaacgcgtgtctgagttacgtcaccagctccagtcccggcaacaactaagatctcgacgacaccctcctacaccacccgagccttcaggcggattacctcgcggacctccggagccccccgaccggctgagttgcgatgggagtagggtacacttactgtacaagtag

SEQ ID NO: 268903 - DNA, 2886 bp, Artificial Sequence
  derived and/or modified sequence
atgcttttgctcttactgctggctccactgtttcttcgaccaccgggagctggtggtgctcagactcccaacgccacttctgaaggctgtcagatcattcatccaccgtgggaaggcgggataaggtaccgtggtttaactcgggatcaggtgaaggccataaactttctcccagtggactatgagatcgagtatgtgtgtaggggcgaacgagaagtcgtgggaccaaaggttcggaaatgtctggcaaatggaagctggactgacatggacacacctagccgatgtgtgaggatttgttcaaagtcttacttaacgctcgaaaatggcaaagtctttcttaccggtggggacctccctgcactcgatggcgctcgcgtcgacttcaggtgtgatccagactttcatctggttggaagtagccggtccatatgctcgcagggtcagtggagcactcccaagcctcattgccaggtcaacaggactccccattcagagcgccgagccgtttatattggcgcgttgttccctatgtctggtggatggcccggtggacaggcgtgtcagcccgctgttgagatggcccttgaggacgttaactctcggcgtgacatacttcccgactacgagctgaagcttatccaccacgacagcaagtgcgaccctggccaagcgaccaagtatctttatgaattgctgtacaacgatccgattaaaattatcctaatgccaggatgctcttctgtgagtacattggtggccgaagctgcccgtatgtggaacttgatcgtgctctcctacgggtctagtagccctgccttaagtaacagacagcgctttccaactttctttaggacccatccttcagccaccttgcataatcccaccagagtgaaactctttgagaagtggggctggaagaaaatcgctactatacagcagactacggaggtcttcaccagtacccttgacgaccttgaagagcgagtgaaggaagcggggattgagattacctttagacagtcgtttttttcagacccagctgtgcccgttaaaaatcttaaacgccaagatgcacgaattatagtcggcttattctatgaaactgaggcaaggaaagtgttttgcgaggtctacaaggaaagactgtttggaaaaaagtatgtttggttcttaatcgggtggtacgctgacaattggtttaagatttacgatccttcgatcaactgcacagtggacgaaatgactgaggctgttgagggacatattactacagagattgtgatgcttaatcctgcaaatactaggagtatttccaacatgacttcccaggaattcgtggaaaagctcacaaaacgactaaaacgccacccagaagaaacgggaggattccaggaagcacctctggcctacgatgctatctgggctctcgcccttgcactcaacaaaacttcaggaggaggcggtagatccggggtgagactcgaagactttaactataacaaccaaaccatcaccgaccagatatacagggccatgaatagttccagcttcgagggcgtgagtggacacgttgtgtttgacgcttcaggttcccggatggcttggaccttaattgaacagctccaaggtgggtcatacaagaaaattgggtattatgattctaccaaggacgatcttagctggtccaaaacagacaaatggattggtggaagcccccccgcagatcaaaccctggtcatcaagaccttcaggttcctgagtcaaaagctcttcattagtgtgagtgtgctgtcctctcttggtatcgtcctcgctgtagtttgtctttcctttaatatctataattcgcacgttcggtatatacaaaactcccagccaaatttgaataacctgactgccgttggttgctccctcgctctggcagccgtattccctctcggcctcgacggctaccacattggacgcaatcagtttccgttcgtttgccaagcccggttgtggttgcttggactcgggtttagccttggctatggttccatgttcaccaagatttggtgggtccataccgtattcacaaagaaggaagagaagaaagaatggagaaaaactctggaaccatggaagctttacgcaacagtgggcttgcttgtggggatggacgtgctgaccttggcgatttggcagatcgtggaccctcttcatcggaccattgaaaccttcgcaaaagaggagcctaaggaagatatcgacgtgtccattttgccccagctcgaacactgttcaagccgaaaaatgaatacatggctgggaattttctatggctataaagggctccttctactgctcggcatcttcttagcatatgaaactaaatctgtcagcaccgaaaaaatcaatgatcacagggccgtcggaatggcaatttacaacgttgcagtactatgcttaatcaccgccccggttaccatgattctgtcttctcaacaggacgctgcgtttgcatttgcttccctggccatagtgttcagttcctatattacactcgtcgtactgttcgtgcccaaaatgcgccggctcatcacccgcggggaatggcagagcgaggcccaggatactatgaagacgggtagctccactaacaataatgaggaagaaaagagtagactgctggaaaaggaaaatcgggagcttgaaaagatcatcgccgagaaagaggagagagtatcagaactacgtcaccaactgcagagtaggcagcagttaagatcccgacgccaccccccaacaccaccagaaccttccggcggtctcccacgtggccccccagaacccccagatcgcctctcctgcgacggctcacgggtgcatttgctgtataaatag

SEQ ID NO: 268904 - DNA, 4199 bp, Artificial Sequence
  derived and/or modified sequence
atgttgctgctgctgctactggcgccactcttcctccgccccccgggcgcgggcggggcgcagacccccaacgccacctcagaaggttgccagatcatacacccgccctgggaagggggcatcaggtaccggggcctgactcgggaccaggtgaaggctatcaacttcctgccagtggactatgagattgagtatgtgtgccggggggagcgcgaggtggtggggcccaaggtccgcaagtgcctggccaacggctcctggacagatatggacacacccagccgctgtgtccgaatctgctccaagtcttatttgaccctggaaaatgggaaggttttcctgacgggtggggacctcccagctctggacggagcccgggtggatttccggtgtgaccccgacttccatctggtgggcagctcccggagcatctgtagtcagggccagtggagcacccccaagccccactgccaggtgaatcgaacgccacactcagaacggcgcgcagtgtacatcggggcactgtttcccatgagcgggggctggccagggggccaggcctgccagcccgcggtggagatggcgctggaggacgtgaatagccgcagggacatcctgccggactatgagctcaagctcatccaccacgacagcaagtgtgatccaggccaagccaccaagtacctatatgagctgctctacaacgaccctatcaagatcatccttatgcctggctgcagctctgtctccacgctggtggctgaggctgctaggatgtggaacctcattgtgctttcctatggctccagctcaccagccctgtcaaaccggcagcgtttccccactttcttccgaacgcacccatcagccacactccacaaccctacccgcgtgaaactctttgaaaagtggggctggaagaagattgctaccatccagcagaccactgaggtcttcacttcgactctggacgacctggaggaacgagtgaaggaggctggaattgagattactttccgccagagtttcttctcagatccagctgtgcccgtcaaaaacctgaagcgccaggatgcccgaatcatcgtgggacttttctatgagactgaagcccggaaagttttttgtgaggtgtacaaggagcgtctctttgggaagaagtacgtctggttcctcattgggtggtatgctgacaattggttcaagatctacgacccttctatcaactgcacagtggatgagatgactgaggcggtggagggccacatcacaactgagattgtcatgctgaatcctgccaatacccgcagcatttccaacatgacatcccaggaatttgtggagaaactaaccaagcgactgaaaagacaccctgaggagacaggaggcttccaggaggcaccgctggcctatgatgccatctgggccttggcactggccctgaacaagacatctggaggaggcggccgttctggtgtgcgcctggaggacttcaactacaacaaccagaccattaccgaccaaatctaccgggcaatgaactcttcgtcctttgagggtgtctctggccatgtggtgtttgatgccagcggctctcggatggcatggacgcttatcgagcagcttcagggtggcagctacaagaagattggctactatgacagcaccaaggatgatctttcctggtccaaaacagataaatggattggagggtcccccccagctgaccagaccctggtcatcaagacattccgcttcctgtcacagaaactctttatctccgtctcagttctctccagcctgggcattgtcctagctgttgtctgtctgtcctttaacatctacaactcacatgtccgttatatccagaactcacagcccaacctgaacaacctgactgctgtgggctgctcactggctttagctgctgtcttccccctggggctcgatggttaccacattgggaggaaccagttccctttcgtctgccaggcccgcctctggctcctgggcctgggctttagtctgggctacggttccatgttcaccaagatttggtgggtccacacggtcttcacaaagaaggaagaaaagaaggagtggaggaagactctggaaccctggaagctgtatgccacagtgggcctgctggtgggcatggatgtcctcactctcgccatctggcagatcgtggaccctctgcaccggaccattgagacatttgccaaggaggaacctaaggaagatattgacgtctctattctgccccagctggagcattgcagctccaggaagatgaatacatggcttggcattttctatggttacaaggggctgctgctgctgctgggaatcttccttgcttatgagaccaagagtgtgtccactgagaagatcaatgatcaccgggctgtgggcatggctatctacaatgtggcagtcctgtgcctcatcactgctcctgtcaccatgattctgtccagccagcaggatgcagcctttgcctttgcctctcttgccatagttttctcctcctatatcactcttgttgtgctctttgtgcccaagatgcgcaggctgatcacccgaggggaatggcagtcggaggcgcaggacaccatgaagacagggtcatcgaccaacaacaacgaggaggagaagtcccggctgttggagaaggagaaccgtgaactggaaaagatcattgctgagaaagaggagcgtgtctctgaactgcgccatcaactccagtctcggcagcagctccgctcccggcgccacccaccgacacccccagaaccctctgggggcctgcccaggggaccccctgagccccccgaccggcttagctgtgatgggagtcgagtgcatttgctttataagtgagggtagggtgagggaggacaggccagtagggggagggaaagggagaggggaagggcaggggactcaggaagcagggggtccccatccccagctgggaagaacatgctatccaatctcatctcttgtaaatacatgtccccctgtgagttctgggctgatttgggtctctcatacctctgggaaacagacctttttctctcttactgcttcatgtaattttgtatcacctcttcacaatttagttcgtacctggcttgaagctgctcactgctcacacgctgcctcctcagcagcctcactgcatctttctcttcccatgcaacaccctcttctagttaccacggcaacccctgcagctcctctgcctttgtgctctgttcctgtccagcaggggtctcccaacaagtgctctttccaccccaaaggggcctctccttttctccactgtcataatctctttccatcttacttgcccttccatactttctcacatgtggctccccctgaattttgcttcctttgggagctcattcttttcgccaaggctcacatgctccttgcctctgctctgtgcactcacgctcagcacacatgcatcctcccctctcctgcgtgtgcccactgaacatgctcatgtgtacacacgcttttcccgtatgctttcttcatgttcagtcacatgtgctctcgggtgccctgcattcacagctacgtgtgcccctctcatggtcatgggtctgcccttgagcgtgtttgggtaggcatgtgcaatttgtctagcatgctgagtcatgtctttcctatttgcacacgtccatgtttatccatgtactttccctgtgtaccctccatgtaccttgtgtactttcttcccttaaatcatggtattcttctgacagagccatatgtaccctaccctgcacattgttatgcacttttccccaattcatgtttggtggggccatccacaccctctccttgtcacagaatctccatttctgctcagattccccccatctccattgcattcatgtactaccctcagtctacactcacaatcatcttctcccaagactgctcccttttgttttgtgtttttttgaggggaattaaggaaaaataagtgggggcaggtttggagagctgcttccagtggatagttgatgagaatcctgaccaaaggaaggcacccttgactgttgggatagacagatggacctatggggtgggaggtggtgtccctttcacactgtggtgtctcttggggaaggatctccccgaatctcaataaaccagtgaacagtgtgactcgg

SEQ ID NO: 268905 - DNA, 2886 bp, Artificial Sequence
  derived and/or modified sequence
atgctgctgctgctgctgctggcccccctgttcctgagaccccccggcgccggcggcgcccagacccccaacgccaccagcgagggctgccagatcatccaccccccctgggagggcggcatcagatacagaggcctgaccagagaccaggtgaaggccatcaacttcctgcccgtggactacgagatcgagtacgtgtgcagaggcgagagagaggtggtgggccccaaggtgagaaagtgcctggccaacggcagctggaccgacatggacacccccagcagatgcgtgagaatctgcagcaagagctacctgaccctggagaacggcaaggtgttcctgaccggcggcgacctgcccgccctggacggcgccagagtggacttcagatgcgaccccgacttccacctggtgggcagcagcagaagcatctgcagccagggccagtggagcacccccaagccccactgccaggtgaacagaaccccccacagcgagagaagagccgtgtacatcggcgccctgttccccatgagcggcggctggcccggcggccaggcctgccagcccgccgtggagatggccctggaggacgtgaacagcagaagagacatcctgcccgactacgagctgaagctgatccaccacgacagcaagtgcgaccccggccaggccaccaagtacctgtacgagctgctgtacaacgaccccatcaagatcatcctgatgcccggctgcagcagcgtgagcaccctggtggccgaggccgccagaatgtggaacctgatcgtgctgagctacggcagcagcagccccgccctgagcaacagacagagattccccaccttcttcagaacccaccccagcgccaccctgcacaaccccaccagagtgaagctgttcgagaagtggggctggaagaagatcgccaccatccagcagaccaccgaggtgttcaccagcaccctggacgacctggaggagagagtgaaggaggccggcatcgagatcaccttcagacagagcttcttcagcgaccccgccgtgcccgtgaagaacctgaagagacaggacgccagaatcatcgtgggcctgttctacgagaccgaggccagaaaggtgttctgcgaggtgtacaaggagagactgttcggcaagaagtacgtgtggttcctgatcggctggtacgccgacaactggttcaagatctacgaccccagcatcaactgcaccgtggacgagatgaccgaggccgtggagggccacatcaccaccgagatcgtgatgctgaaccccgccaacaccagaagcatcagcaacatgaccagccaggagttcgtggagaagctgaccaagagactgaagagacaccccgaggagaccggcggcttccaggaggcccccctggcctacgacgccatctgggccctggccctggccctgaacaagaccagcggcggcggcggcagaagcggcgtgagactggaggacttcaactacaacaaccagaccatcaccgaccagatctacagagccatgaacagcagcagcttcgagggcgtgagcggccacgtggtgttcgacgccagcggcagcagaatggcctggaccctgatcgagcagctgcagggcggcagctacaagaagatcggctactacgacagcaccaaggacgacctgagctggagcaagaccgacaagtggatcggcggcagcccccccgccgaccagaccctggtgatcaagaccttcagattcctgagccagaagctgttcatcagcgtgagcgtgctgagcagcctgggcatcgtgctggccgtggtgtgcctgagcttcaacatctacaacagccacgtgagatacatccagaacagccagcccaacctgaacaacctgaccgccgtgggctgcagcctggccctggccgccgtgttccccctgggcctggacggctaccacatcggcagaaaccagttccccttcgtgtgccaggccagactgtggctgctgggcctgggcttcagcctgggctacggcagcatgttcaccaagatctggtgggtgcacaccgtgttcaccaagaaggaggagaagaaggagtggagaaagaccctggagccctggaagctgtacgccaccgtgggcctgctggtgggcatggacgtgctgaccctggccatctggcagatcgtggaccccctgcacagaaccatcgagaccttcgccaaggaggagcccaaggaggacatcgacgtgagcatcctgccccagctggagcactgcagcagcagaaagatgaacacctggctgggcatcttctacggctacaagggcctgctgctgctgctgggcatcttcctggcctacgagaccaagagcgtgagcaccgagaagatcaacgaccacagagccgtgggcatggccatctacaacgtggccgtgctgtgcctgatcaccgcccccgtgaccatgatcctgagcagccagcaggacgccgccttcgccttcgccagcctggccatcgtgttcagcagctacatcaccctggtggtgctgttcgtgcccaagatgagaagactgatcaccagaggcgagtggcagagcgaggcccaggacaccatgaagaccggcagcagcaccaacaacaacgaggaggagaagagcagactgctggagaaggagaacagagagctggagaagatcatcgccgagaaggaggagagagtgagcgagctgagacaccagctgcagagcagacagcagctgagaagcagaagacacccccccaccccccccgagcccagcggcggcctgcccagaggcccccccgagccccccgacagactgagctgcgacggcagcagagtgcacctgctgtacaagtag

SEQ ID NO: 268906 - DNA, 2886 bp, Artificial Sequence
  derived and/or modified sequence
atgctcctgctcctgttgctggctcccctctttcttaggcccccaggagcaggcggcgcccagactcccaatgccacctctgaaggctgccagatcatacacccaccatgggaggggggtatcagatacagaggtctaacccgagaccaggtaaaggccataaattttctccctgttgactacgagattgagtacgtctgtaggggcgagcgagaggtcgtaggaccaaaggttcgaaaatgtctggctaatgggtcctggacagacatggacactcccagtcgctgcgtacgaatttgcagcaagtcttacttgaccctggagaacggcaaggtttttctcacgggcggcgacttaccagccctggacggggcccgagtggacttcaggtgtgaccctgacttccatctggtcggatcatctcgtagtatatgctcgcaaggtcaatggagcactccgaaaccacactgccaggtgaacaggactcctcactcagagcggagagctgtgtacatcggtgccttattccctatgagtggcgggtggccaggaggacaggcgtgtcaaccagcagtagaaatggccttggaggacgtgaattctcgaagggacatcttgcctgactacgaattgaagcttattcatcacgattctaagtgcgatccaggacaggccacaaagtatctctatgaactcttgtacaatgatcctatcaagataattctgatgcctggttgttcctctgtgagcactctcgtggccgaagccgcaagaatgtggaacctgatcgtgttgtcctacgggtcctcctctcctgccctcagtaatcgccagcgctttccgaccttcttcagaacccacccttcagccactctgcataaccctaccagagtcaagctcttcgaaaaatggggttggaagaagattgccaccatccagcagaccacagaagtttttactagcacactggatgacttagaggaacgcgtaaaagaagccggaattgagataacatttcgacaatccttcttttcagacccagctgtgcctgtaaagaatctgaagcggcaggacgcacgaatcatcgtgggactgttttatgaaaccgaggcgcggaaagtgttttgcgaggtgtacaaggagcgcttgtttggaaagaagtacgtttggttcttaatcggctggtacgcagacaattggttcaaaatttacgatcccagtataaactgtaccgtggacgagatgacagaggctgtggaaggccacattactacagagattgttatgttaaatcctgcgaatacccgttcaatctccaacatgacctctcaggagtttgtcgaaaaattgaccaagcggctgaaacgacatcctgaggaaactggcggcttccaagaggcccccttggcctatgatgctatttgggcactcgcccttgcccttaataagacctctggcggaggcggtcggtcaggcgtgcgtctagaagactttaactacaataaccagactattaccgaccaaatctaccgggccatgaactctagctccttcgagggagtgtcagggcatgtcgtgtttgatgcaagcggctcacggatggcctggaccctcatagagcagctgcagggcggctcttataagaagatcggctactatgacagtacgaaggatgacctgagctggtctaagactgacaagtggatcggggggagccccccagctgatcagactctggtcatcaaaacattccgctttctgagccagaagctattcatctctgtgagtgtgctgtccagcctcgggattgtgctggcagtggtctgtctttcattcaacatatacaacagccacgttaggtacatccagaactcccagccgaacctgaataacttgactgctgtaggatgttctctggcccttgcagccgtgtttccactgggcctggatggatatcacatcggccgcaaccagtttccctttgtatgtcaggctaggctctggctgctgggactagggttctctctcggatatggcagcatgttcacaaagatttggtgggttcacaccgtttttaccaaaaaggaggagaaaaaggagtggagaaaaacactcgagccttggaaactctacgcaactgttgggcttctggtggggatggacgtactaacactcgcaatttggcagattgtcgaccctctccatcgtaccattgaaaccttcgcgaaagaggaacccaaggaagatattgacgtctcaatacttccccagctcgagcattgcagtagcagaaaaatgaatacctggcttggcatcttctacgggtacaaggggctgctacttctgctcgggatttttctcgcctatgagacgaagtccgtctccacagagaagataaatgaccatcgtgctgttggaatggctatttataacgtagccgtgctctgtctcataacagccccggtgacaatgattctgtcttctcagcaggacgcagctttcgcatttgcatctctcgccattgtcttctcgtcctatattaccctcgtggtgttatttgtgccgaagatgaggagacttattacccgaggggagtggcagagcgaggcccaggacaccatgaagacagggagctccaccaacaataacgaagaagaaaagagccgtctgttggaaaaggagaaccgagagctcgagaagatcattgccgaaaaggaagagcgtgttagtgagttgagacaccaactccagtcaagacagcagctaaggtctagaaggcatccaccaaccccccccgagccatctggtggtttaccacgcggcccccctgagccaccagatcgcctgtcctgcgacgggtccagggtgcatctgctttataagtag

SEQ ID NO: 268907 - DNA, 2886 bp, Artificial Sequence
  derived and/or modified sequence
atgttactgctgctgctcctggcacctctcttccttagaccaccaggagcgggcggcgctcagaccccaaacgctaccagcgaggggtgtcagattattcaccctccttgggagggaggcattcggtaccgagggctgacacgcgatcaggtgaaagcaattaactttctgcccgtagattatgagattgaatatgtctgccgcggtgagcgcgaggtggtcggccctaaagtcagaaaatgtttggctaatgggagttggactgacatggatacgcctagccggtgcgtgcgaatctgctccaagtcctatctgacattggaaaacgggaaagttttcctgaccggcggagatctgcccgccctggacggtgccagagtagattttaggtgtgaccccgatttccaccttgtcggcagttctcgctctatctgttcccagggtcagtggagtacccccaagccccattgccaggtgaatcggacaccccactccgaacgtagagccgtgtatatcggagctttgttcccaatgtccggaggctggcccggtggtcaagcatgccagcccgctgtggaaatggcgctggaggacgtaaacagccgcagagacattctacctgactacgagctcaagttgatccatcacgactcaaaatgcgacccaggccaggccacaaagtacctttatgaactgctctacaatgaccctattaagattatacttatgccggggtgtagcagcgtgagtacactggtggccgaggccgcacggatgtggaatttgatcgtgttgtcgtatggttcatcctctcccgcactgtctaaccgccaaaggtttccaaccttctttagaactcaccctagcgccactcttcataaccctaccagggtgaaactctttgaaaagtggggctggaagaagattgctactatccagcagacaacagaggtgttcacttcaaccctggacgatctggaggagcgagtcaaggaagctggcattgaaatcacattccgacagtcctttttttctgacccagcagtgccggtgaagaatctgaagaggcaagacgcccgcatcatcgtagggttgttctatgagactgaggcgagaaaagtgttttgcgaggtgtataaggagcggctgttcgggaaaaagtatgtgtggttcctgattggctggtacgctgacaactggttcaagatctatgatccaagcattaactgcacagtggacgagatgacagaagctgtggagggccatattaccacggagatcgtcatgctgaatccagcaaatacacgctccatatcaaatatgacaagtcaagagttcgttgaaaagcttacgaagagactgaagcggcatcctgaggaaactggtggctttcaagaagcaccgttggcatacgatgccatttgggctctcgctctggcactgaataagacaagtggaggaggcggccggtccggcgtgaggctggaggatttcaattataataaccagacaattaccgaccagatctatcgggccatgaattccagtagcttcgagggcgtgagtggccatgtggtctttgatgccagtggttcccgcatggcctggaccctgatcgagcagttacaagggggtagctacaaaaagatcggctattacgattccaccaaggacgacctgtcctggtccaaaacagataagtggatcggtggttcacctccggctgatcagacgctcgtcatcaagacattcaggttcttgtcgcaaaaactgttcatttcagtctccgtcctatcctcattgggaattgtactagcagtggtgtgtcttagctttaatatttataatagccacgtgcgatacatacagaattcgcagcctaacctcaacaatctgaccgctgtaggctgctctctggccctggctgcagtgtttccactcggtctggacggttaccatattggcaggaaccagttccctttcgtgtgtcaggcacgtctgtggttactcggtttgggcttttctctcggatatgggtccatgttcaccaagatatggtgggtgcacaccgtgttcacgaagaaagaggagaaaaaggaatggcggaaaactctggaaccatggaagctctatgctaccgtcggtctattggtgggtatggatgtactgactctggctatctggcaaatagtcgacccattgcatcgcaccatcgagacgtttgccaaggaagagcccaaggaggacatcgatgttagcattctgccacagctggaacactgttctagtcgcaagatgaacacttggctcggaatattttacggctacaaaggcctcctcctactgctgggcatttttctggcctatgaaacgaaatccgttagtacagagaagattaatgaccacagagccgttggcatggcgatatataatgtggcagttctttgcctgattactgcacctgtcaccatgatcctgagctcacaacaggatgctgccttcgcgtttgcctcccttgctatcgtgtttagctcttatatcaccttagtggtgctgtttgtccccaaaatgcggcgtcttatcactcggggtgagtggcaatccgaagcccaggacacgatgaagacggggagctctacaaataataacgaagaagagaagagtcggctcctcgagaaagaaaatagggaactggaaaaaattattgcagagaaagaagaaagggtgtccgagctgcggcaccagctgcagagccgccagcaattgcggagccggagacatccacctaccccacctgaaccatccggaggtctcccacgcgggccgcctgaacctccggaccgactttcttgcgatgggtctagggtacatctcctgtacaaatag

SEQ ID NO: 268908 - DNA, 2886 bp, Artificial Sequence
  derived and/or modified sequence
atgctgcttttgttgctgttggcgccattatttctcaggcctcccggagccgggggggcacaaaccccgaatgctacatctgaaggatgtcagatcatccaccctccatgggaagggggcataagatatcgggggctcacccgggatcaggtaaaggccatcaatttcctgcccgtagattatgagatcgagtacgtgtgtcgcggtgaacgggaggtggtggggccaaaggtcaggaagtgtctcgcaaacggcagctggaccgatatggatacgccgagccgctgtgtgcgcatctgcagcaagtcctacttaactcttgagaacggcaaggtcttcttgaccgggggcgaccttcctgcactcgatggagctagagtggacttcagatgtgatccggactttcacctcgtgggtagctcaaggtctatctgcagccagggacagtggagcacaccaaaacctcattgccaagtgaataggacccctcactctgaacggagagccgtgtacattggagctctgttccctatgtctggcgggtggccaggggggcaggcctgccagccagcagtggaaatggctctggaagatgtgaattcgagacgggacatcctgccagattacgaacttaaactgattcatcatgatagcaagtgtgatccggggcaggccaccaagtatctgtatgaattattgtacaacgatcctatcaaaatcattttaatgcctggctgtagttcagtcagcactctcgttgctgaggctgcccggatgtggaacctgattgtgctttcatacgggtcttcatcaccggctctttctaacagacagaggttcccaacattctttcgcacccatcccagcgccaccttgcacaatcctactcgtgtgaaactgttcgagaagtggggttggaagaagattgcgaccattcaacagaccaccgaggtcttcacgtccaccctggacgacttggaggagagggtgaaggaagccggaatcgagatcacgtttcgtcagagctttttcagcgaccccgctgttcctgtaaaaaaccttaaaaggcaggatgctagaataatcgttgggttattctacgaaaccgaggctcgaaaggtcttctgcgaggtttataaagagcggctttttggcaagaaatacgtttggtttttgatagggtggtatgcagataactggtttaaaatttacgatccctccatcaattgtacggtggacgaaatgacagaggcagtggaaggtcatatcacgacagagatcgttatgctcaaccccgccaacactcgctccatatcaaacatgacttcgcaggagtttgtggaaaagttgaccaaacgcttaaagcggcaccctgaagaaaccggaggattccaggaagcacccctggcctacgatgccatatgggcattggcacttgccttaaacaagacatctggaggaggcgggagaagcggcgtccgcctggaagactttaactataataatcagacaatcaccgaccagatttatcgagctatgaatagcagctcgttcgaaggcgttagtggtcacgtggtgttcgatgcatcagggtcccggatggcctggacactaatcgagcagttgcaaggggggtcctataagaagattggatattacgatagcactaaggatgatttgtcttggagtaaaacggataagtggatagggggctccccaccggctgatcagactttagtgattaaaaccttcaggttcctttcccagaaacttttcatcagtgtctccgtcctatccagtcttggaatcgttttagcagtcgtgtgcctctcctttaatatttacaactcacacgtccggtatatccagaacagtcagcctaatctgaacaatctcacggccgtgggctgctccctggctctggcggctgtttttccattaggactcgacggctaccacatcgggcggaatcagttcccgtttgtttgccaggcacgcctatggttactcgggctcgggttcagtctagggtatggttctatgttcaccaaaatctggtgggtgcataccgtgttcaccaagaaagaggaaaaaaaagagtggaggaagaccctcgaaccatggaaactgtatgccacagtggggttactggtgggcatggatgttctcacccttgctatatggcaaatcgtggatcccctgcacagaactatcgagacttttgccaaggaagagcctaaagaagacatcgacgtgagtatactcccccagctggaacactgctcctccaggaagatgaatacttggttggggattttttacggatataaagggctgctcctgctcctaggtatcttcctggcctatgaaactaaaagtgtgagcaccgagaaaatcaacgaccacagggccgtgggtatggctatatataatgtggcggtcctgtgtctgatcaccgctccggtcacaatgattctttcttcacagcaggacgccgctttcgcctttgcctccctggccatagtcttcagttcttacataaccctggtggttttatttgtgcccaagatgagaagactgatcactcgcggggagtggcaaagtgaagctcaggacactatgaaaaccgggtcttctactaataataacgaggaggaaaagtccaggcttctagaaaaggaaaaccgtgaactggagaagatcattgccgagaaggaagagagggtgtctgaattgcgtcaccagctacagtcccgacagcaactgcggtcgcggaggcacccacccacgcctcccgaacctagtgggggactgccccgggggcccccagagcctcctgatcgactctcctgtgatggttcccgtgttcaccttctctacaaatag

SEQ ID NO: 268909 - DNA, 2886 bp, Artificial Sequence
  derived and/or modified sequence
atgctgctcctgctgctacttgcccctctctttttgcgcccaccaggggccggaggcgcccagacccccaatgcaaccagcgaagggtgccagattattcatccgccgtgggagggaggcattaggtaccgcggcctgacgagggaccaggtcaaggctataaatttcctgccagtggattacgagatcgaatacgtgtgtcgtggtgagagagaggtggtcgggccaaaagtgcggaagtgcctggcaaacgggagctggacagatatggatacaccctctcgctgtgtgagaatatgttctaagtcatatctgacactggaaaatggaaaggtcttcttgacggggggcgacctgcctgcactcgacggcgcccgagtggactttaggtgcgatccggactttcacctggtgggctctagtaggtcaatttgttcacaggggcagtggtcgacacctaaacctcattgccaagttaatcggactccgcactccgaacgacgcgccgtttacatcggcgcccttttccccatgagtgggggctggcccggtgggcaagcgtgtcagcctgctgtagagatggcccttgaggatgtgaattcacgcagagacatacttccagattatgaattgaagctcatccaccatgactcgaagtgtgatcccggccaggccactaagtacttatacgagctgctgtacaacgacccaatcaagatcatccttatgcctggttgcagttcagtgtctactctggttgccgaagccgctagaatgtggaacctgatcgtgctaagttacgggtcctctagccctgccttaagcaaccgacagcgatttcccacattctttcgaacacacccctctgcaactctgcacaatccaacaagagtaaagctctttgaaaaatggggatggaagaaaatcgcaacaattcagcagaccacggaagtgttcaccagtacacttgatgacctggaagagagagtcaaagaggcggggatagagatcacttttagacagtccttctttagtgatccagctgtgccagtgaagaatctaaagcggcaggacgcccggattatagtaggcctgttttatgaaacagaggctagaaaagtgttttgtgaggtgtacaaagagaggctgttcggcaaaaagtatgtgtggttcctgattggctggtatgccgacaactggttcaaaatctacgacccatctattaattgcaccgtggatgagatgacagaggccgtggaaggacacatcactactgaaatcgtgatgttgaaccctgccaacacccgctccataagcaatatgacatcacaggagttcgtggaaaaacttacaaagagattgaaaagacacccagaagagacaggtgggtttcaggaggcccctctggcctacgatgccatctgggccctggcccttgctttaaacaagacaagcggcgggggtggccgaagcggggtcaggcttgaggattttaactacaataaccagacgatcacggatcagatttatcgcgctatgaactcaagttcattcgagggcgtgtcagggcatgttgtgttcgacgccagcggaagccgaatggcctggacattgatcgaacagcttcagggggggtcctacaagaaaatcggctattacgacagtaccaaagacgatttatcttggagtaaaaccgacaagtggattgggggtagccctcctgcggatcagacactcgtgatcaaaacattccgtttcttgagccagaaactgttcatttcagtgagtgtgctgtcaagcctggggattgttctagcagtcgtgtgtctgagttttaacatctacaattctcatgttcggtacattcagaactcccagccaaaccttaacaaccttacggccgtgggctgtagcttggctcttgctgccgtcttccccctgggactggatgggtaccatatcggtcgaaaccagtttccttttgtttgccaggcaagactgtggcttctcgggctcggcttctccctgggctacgggtctatgttcactaaaatctggtgggtgcacaccgttttcacaaagaaggaggagaaaaaagagtggcggaagaccctggagccttggaaactctacgcgacggttggcctgctcgtggggatggacgtgctcacacttgctatctggcagatcgttgacccgctgcatagaaccatagagacattcgccaaagaggagcctaaagaagacatagatgtgtccattctgccccaacttgagcactgctcttctagaaaaatgaacacatggctggggatcttttatggatataaagggcttcttctgttgcttggcatatttttagcctacgagacaaagagcgtctcgaccgagaagatcaacgaccaccgcgccgttgggatggcaatttataatgtggcagtgctgtgtctgatcacagccccggtgacaatgattctgtcctctcagcaagatgctgccttcgccttcgcgagtctagctattgttttttcctcttacatcacactggtggtcctgttcgttccaaagatgagacgcctgatcacgagaggagaatggcagtcggaggcacaggatactatgaagacagggagcagtaccaacaataacgaggaagagaaaagccggctgctcgagaaagaaaatcgggaactggaaaaaatcatcgcagaaaaggaagaaagagtctccgagcttcgccatcaactgcagtctcggcagcagctgagatcgcgacgacatccccctacccctccagagcccagtggcggtctgcccagaggccctcctgaaccgcccgatagactgtcatgcgacggttcccgcgtccaccttctctataaatag

SEQ ID NO: 268910 - DNA, 2886 bp, Artificial Sequence
  derived and/or modified sequence
atgttacttctcctgctgctggcccccttgtttctacgcccacctggcgccggaggcgcccaaaccccgaatgccacaagtgaggggtgtcagatcatacaccccccttgggaaggcggaataagataccgcgggctcaccagggaccaagtcaaggcgattaatttccttcccgtggattacgagattgagtatgtgtgtaggggggaacgggaggttgttggacctaaggttagaaagtgcttagctaacggttcatggaccgatatggacactccaagcaggtgtgtgcggatttgctccaagtcttatttgaccttggaaaatggtaaagtgttcctcaccgggggcgacctgccggccctggatggagctagggttgactttagatgcgaccccgactttcaccttgtcggcagctcccgtagcatttgcagccaagggcagtggagtacccccaaaccacactgtcaagttaaccggacgcctcacagtgaacggagagctgtttacattggggctttgtttccaatgtccggcggatggcccggcggccaggcatgtcagcctgcggtcgaaatggcactcgaggatgtcaattctcgacgcgatatcctgcccgattacgaactcaagttaatccatcacgacagtaagtgcgaccctggccaggcaacaaagtatttatatgagctcctttacaacgacccgatcaagatcatcctgatgccaggatgctccagcgtatcaaccttagtggcggaggcagcgaggatgtggaatcttatcgtactgtcttacgggagttccagccctgcactcagtaataggcagcggtttcccactttctttcggacacacccttctgctactctccacaatccaacccgggtgaaactgtttgagaagtggggttggaagaaaattgccacaattcagcaaaccactgaggtgttcacaagtacactggacgatctagaagagagggtcaaagaagctggcatcgagatcacctttcggcaaagcttttttagtgatcccgcggtgcctgtgaagaacctaaagcggcaggacgcaaggattatcgtgggcctcttttatgagaccgaagcacgcaaagtgttctgcgaggtgtataaggagagactgtttgggaagaagtacgtatggttccttattgggtggtatgccgataattggtttaaaatctacgacccttctattaactgcactgtggacgaaatgacagaagcggtggaaggccacatcaccacggagatcgtgatgctgaaccctgcaaatactaggagcatttcgaacatgaccagtcaggagttcgtcgaaaagctcacgaagcggctcaaacggcaccccgaagaaaccgggggtttccaggaagcccccctcgcatatgacgcgatatgggcattagctctggccctcaataaaaccagcggtgggggcggaagatctggtgtgaggttggaagatttcaattacaacaaccagacgatcaccgatcagatctatcgggcaatgaattccagctccttcgaaggcgtcagcggccatgtggtgttcgatgctagcggcagcagaatggcttggaccctcatcgaacagttacaaggaggctcttacaagaagatcgggtattatgattccactaaggatgatctatcctggtccaaaaccgacaagtggataggtggctctcctccagccgaccagaccctggtaattaaaactttccgattcttaagtcagaagctgtttataagcgtgagtgtgttgtcatcactgggtatagtgctcgctgtggtgtgcttgtctttcaatatctacaattctcatgtgagatatatccagaattcccagccaaacctgaataatcttactgccgtagggtgtagcctagcactggcagctgtcttcccacttgggctagacggctaccatatcggccgtaatcagtttccgttcgtctgccaagccagactctggcttcttggccttggctttagcctgggctacggctccatgttcaccaaaatctggtgggtccacacagtgtttacaaagaaagaggagaagaaagagtggagaaagactctggagccttggaaactctacgcaactgtggggctcctagtaggaatggacgttctgaccctcgcaatctggcagatagtcgacccgctccatagaaccattgagacattcgccaaggaagagccaaaagaggacatagatgtgtccattttgccccagctggaacattgttcatctcgaaaaatgaatacctggctcggaattttttatgggtataaaggattgttgctgctacttggtatattcctcgcttacgagaccaaatctgtgagcactgagaaaattaatgatcatagagccgtgggaatggccatctacaatgtggcggtgctctgtctgatcaccgcacccgttactatgatcctgagttctcaacaggacgccgccttcgcattcgcgagcctggccatagttttcagctcatatattactctcgtggtgctattcgtgcctaaaatgaggcgactgattactagaggcgaatggcagtcagaggctcaggataccatgaagacagggtcttccaccaataacaatgaggaagaaaaaagcagattgttagagaaggagaatagagagctcgaaaagattatcgcagaaaaggaagagagggtcagcgagctccggcaccagctacagtccaggcaacagctgcggtcgcgacggcacccgcccacaccacccgaacccagtgggggactgcctagaggcccacctgagcctccagatcggctctcatgcgacggtagtcgggtccacttgctttataagtag

SEQ ID NO: 268911 - DNA, 2886 bp, Artificial Sequence
  derived and/or modified sequence
atgctcctgctgctcctgctggccccattgtttctaagaccccccggcgctggcggagcccaaacacccaacgctacctcagagggctgtcagataatccatccaccctgggaagggggcatacggtacagggggctgacacgcgatcaggtgaaggccataaatttcctgcccgtggattacgaaatcgaatacgtgtgtagaggtgagagggaggtggtgggcccaaaggtgaggaagtgtctggctaatgggtcttggactgatatggacaccccctctaggtgcgtgaggatatgtagtaagtcttacctgacactcgagaacggaaaggtctttcttactggcggagaccttccagctctagacggagcgcgggtggattttaggtgcgacccagacttccatctcgtgggtagcagcaggagtatttgttcccagggacaatggagcacccccaagccccattgccaggtgaataggactccacactccgagcgacgtgctgtttatattggtgccctatttccaatgagtgggggatggcccggaggtcaggcatgccaacccgctgtggaaatggcactggaagatgtcaacagcaggcgggatattctgcccgattatgagctgaagctgatacatcacgattcgaagtgcgatcctgggcaggcgaccaagtatctgtatgagttattgtacaacgaccccatcaagattatcctgatgccaggctgttcttctgtcagtactcttgtggccgaggccgcgcgcatgtggaacctaatcgtgttatcgtatggcagctcttccccagcactgtcgaataggcagcggtttcccacctttttccgaacccacccatctgcgaccctgcacaaccccactcgcgtgaagctgttcgagaaatggggctggaagaaaattgcaaccattcagcaaacaactgaggttttcacctcaaccctggatgacttagaggaaagggtgaaagaggcaggcattgaaattaccttcagacagtcgtttttctctgatccagccgtaccagtaaagaatctcaagcgccaggacgcccgaatcatcgtgggccttttctatgagacagaggcacggaaggtgttttgtgaggtttataaggagagactgtttggtaagaaatacgtatggtttctcattggatggtatgctgataactggttcaaaatatacgaccctagcattaattgcaccgttgacgagatgaccgaagctgtggaaggccatatcacaacagaaatcgtcatgctcaacccagccaacacccggtcaatttctaacatgacatctcaagagtttgtcgaaaaattgaccaaacgcctcaaacggcatcccgaggagaccggcggcttccaggaggcacctctggcatacgatgctatctgggctctggcacttgcgctgaataagacatcaggcggggggggcagaagtggagtgagattagaggacttcaactataataatcaaaccatcacagaccagatctatcgagccatgaatagctcaagcttcgaaggggtgtcaggtcatgtggtgttcgatgcctccggatccaggatggcttggacactgatcgaacagctgcagggtggaagttataagaaaattggctattatgactccacaaaagatgacctgtcttggtcaaaaactgataaatggatcggtggtagtccccccgctgatcaaactctggtaatcaaaacgttccgtttcctttctcaaaagttgttcatctctgtatcagtcctctcctctctcggcattgtcctagctgtggtctgtctaagctttaatatttacaactctcatgtgagatacattcaaaattcacaaccaaacctcaacaatttaaccgcagtggggtgctcgctcgccctggctgccgtgttcccactgggcctcgacgggtatcacattggacggaatcagttccctttcgtttgtcaggcacgtctgtggctgttgggattagggttctctctgggatacggtagcatgtttacaaagatctggtgggtgcacactgtctttaccaagaaagaagaaaagaaagaatggagaaaaaccttagagccctggaagctatacgctacagtaggattactggtgggtatggacgtcctcacactagctatatggcagatagtggaccctctgcatcgaacaattgagacatttgccaaagaagaaccaaaagaggacatcgatgtctcaatcctgcctcagctggagcactgctccagtcgaaaaatgaatacttggctaggtattttctacggctacaaagggctgctgctgctgcttggcatattcctcgcatacgaaaccaagtccgtgtctaccgagaaaataaatgaccaccgagccgttgggatggccatttataacgtggctgtgctgtgcttaatcacagccccagtaactatgattctgtctagtcagcaggatgccgcatttgcttttgcatctctcgcaattgtcttctcctcctatatcacccttgtggttttgttcgtccccaagatgagaaggctgatcactcgcggcgagtggcagagtgaggcccaggacactatgaagactggttcctccactaacaataacgaagaggagaaatcaagacttttagagaaagagaatagggagctggagaagatcatagccgagaaggaggagagagtttccgagcttcgacaccaacttcagtcccgccagcagctgaggtcacggagacacccccctacaccaccagaaccgtctggggggctccctaggggaccaccagaacctcccgacagactgtcatgtgatggctctcgcgtgcatctgctgtataagtag

SEQ ID NO: 268912 - DNA, 2886 bp, Artificial Sequence
  derived and/or modified sequence
atgttgttgctactgcttctcgctcccctgttccttagaccaccaggcgcagggggcgcacaaacacccaacgctacatccgagggatgccaaattatccacccgccttgggaggggggcattagataccgcgggctcactagggatcaggtgaaggccatcaacttcctgcccgtggattacgagatagagtatgtttgccgtggtgagcgcgaggtggtggggcctaaagtaagaaaatgcctggctaacggtagctggacggatatggacaccccaagccggtgcgtgcgcatttgttctaaatcttaccttaccctagagaacgggaaggtgttcctgaccggtggagatctacccgccctggacggggctcgggtagatttcaggtgcgaccctgatttccatcttgtgggctcttcacggtccatctgctcacagggacagtggagtaccccaaaaccccattgccaagtcaatcgtactcctcattcagaacgcagggcagtatatatcggcgcccttttccctatgtcaggggggtggcccggcggccaggcttgccaaccagcagtcgagatggcactggaggatgtgaactccaggcgcgacatcctccctgattacgaacttaagttaatccatcacgatagcaagtgcgatcccggccaggctaccaaatacctgtatgaattgctctacaacgatccaattaaaatcatactgatgcctgggtgctcaagcgtgagcacgttagtggcagaggccgcacgcatgtggaacttgatcgtcttgagttacggctcatcctccccagcattatccaatcggcaacgatttccaactttcttccgcacacacccaagcgcaacattacacaacccaactagggtgaagttgtttgagaaatgggggtggaagaaaatagccactatccaacagaccacagaggttttcacttcaacccttgacgatctagaggaacgcgtgaaagaagccggcatcgagataacattcaggcagtcattcttctcagatccagccgtgccagtgaaaaacctgaaacggcaggacgctcgaatcattgtaggcctattctatgaaactgaggcccgcaaagttttttgtgaagtttataaagaacggctgtttggtaaaaaatacgtgtggtttctcattggctggtacgccgataattggtttaagatttacgacccctcaataaactgcactgtcgatgagatgactgaggccgtcgagggacacattactacggagatcgtgatgcttaaccccgcaaatacacgctctatcagtaatatgacgtcccaggaatttgttgaaaaactgacaaagcggctgaaacgacacccagaggaaacgggagggtttcaggaggctcccctggcttacgacgccatctgggctcttgcgttagccctcaacaagaccagcggcggagggggccgcagcggagttagactagaagattttaattataacaatcagacaatcacagatcaaatctaccgagccatgaacagcagcagcttcgaaggggttagcgggcatgtggtgtttgatgccagcggttcaagaatggcttggacactaatcgagcagctccagggaggtagttacaagaaaattggctactacgactctaccaaggatgacctgtcctggagcaagactgacaaatggatcggcgggtccccgcctgcagatcaaaccctggtcattaagactttccgttttctgtctcagaaattgttcattagcgtgagtgttttgtcaagtctgggcatcgttctcgctgtggtctgtttgagttttaacatctacaatagccatgtgcggtatatccagaattcacaaccaaatctgaataacttaacagccgtgggatgtagtcttgccttggctgcggtctttccgttgggacttgatgggtaccacataggccgcaaccaattcccattcgtgtgtcaagctagactttggctcctgggactggggttttctcttgggtatggctccatgttcacaaaaatttggtgggtgcacactgtctttaccaaaaaagaggaaaagaaggagtggagaaagaccctagagccgtggaaactttacgccactgtaggactgcttgttggcatggatgtgctgacattagcgatttggcagattgttgatccattacatcgtacgattgagacctttgccaaggaggaaccgaaagaggatatagacgtcagtattctgcctcagcttgagcactgtagctcccgaaagatgaatacttggctcgggattttttatggctacaagggacttctcttgctgcttggcatattcttagcctatgagaccaaatcggtgtcaacagagaagattaacgaccaccgggcagtaggcatggctatttataacgtcgctgtcctgtgtttaattactgcccccgtgaccatgattctctccagccagcaggatgccgctttcgcctttgcttccctcgcgatcgtgttttcaagctacatcacactcgtggtcctgttcgtccctaaaatgagaaggttaattactaggggagaatggcaatcagaggcgcaggacacaatgaagacaggtagcagtactaacaacaatgaggaagagaaatcacgccttttagagaaggagaacagggagctggagaaaatcattgcagaaaaagaggaacgggtgtccgagctcagacaccaattgcagtcccggcagcagctacgttcaagacgccaccctccgactccacctgagccatcgggtgggttgcctcgcggcccacccgaacctccagatcgcctctcatgcgacggttccagagtgcatcttctgtataagtag

SEQ ID NO: 268913 - DNA, 2886 bp, Artificial Sequence
  derived and/or modified sequence
atgctgctgctgctgctgctggcccccctcttcctgcggcccccaggagctggaggagcccagaccccaaatgccaccagcgagggctgccagatcatccaccccccctgggagggcggcatccgctaccggggcctgacccgggaccaggtgaaggccatcaacttcctgcctgtggactatgaaattgaatatgtgtgccgcggggagcgggaggtggtgggccccaaggtgaggaagtgcctggccaacggctcctggacagacatggacacccccagccgctgtgtgcgcatctgcagcaagagctacctgaccctggagaatggcaaggtgttcctgactggaggagacctgcctgccctggatggagcccgggtggacttccgctgtgaccctgacttccacctggtgggcagcagccgcagcatctgcagccagggccagtggagcacccccaagccccactgccaggtgaacagaacaccccacagcgagaggagagctgtgtacatcggggccctcttccccatgtctgggggctggccaggcggccaggcctgccagcctgctgtggagatggccctggaggatgtgaacagccggcgggacatcctgcctgactatgagctgaagctgatccaccacgacagcaaatgtgaccccggccaggccaccaagtacctgtatgagctgctgtacaatgaccccatcaagatcatcctgatgcctggctgcagctctgtgtccaccctggtggccgaggccgccaggatgtggaacctgattgtgctgtcctatggcagcagcagccctgccctgagcaaccggcagcgcttccccaccttcttccgcacccaccccagcgccaccctgcacaaccccaccagggtgaagctgtttgagaagtggggctggaagaagatcgccaccatccagcagaccacagaggtgttcaccagcaccctggatgacctggaggagcgggtgaaggaggccggcatcgagatcaccttccggcagagcttcttcagtgaccctgctgtgcctgtgaagaacctgaagaggcaggatgcccgcatcatcgtgggcctcttctatgaaacagaggccaggaaggtgttctgtgaggtgtacaaggagcggctgtttgggaagaagtatgtgtggttcctgattggctggtatgctgacaactggttcaagatctatgaccccagcatcaactgcaccgtggatgagatgacagaggccgtggagggccacatcaccacagaaattgtgatgctgaacccagccaacaccaggagcatcagcaacatgaccagccaggagtttgtggagaagctgaccaagaggctgaagaggcaccctgaggagactggaggcttccaggaggcccccctggcctatgatgccatctgggccctggccctggccctgaacaagaccagcggcggcggcggccgctctggagtgcggctggaggacttcaactacaacaaccagaccatcacagaccagatctaccgggccatgaacagcagcagctttgagggcgtgtctggccacgtggtgtttgatgccagcggcagcaggatggcctggaccctgattgagcagctgcagggcggcagctacaagaagattggctactatgacagcaccaaggatgacctgtcctggagcaagacagacaagtggattggaggcagccccccagctgaccagaccctggtgatcaagaccttccgcttcctgagccagaagctgttcatctctgtgtctgtgctgagcagcctgggcatcgtgctggccgtggtgtgcctgtccttcaacatctacaacagccacgtgcgctacatccagaacagccagcccaacctgaacaacctgacagctgtgggctgcagcctggccctggccgctgtgttccccctgggcctggatggctaccacatcggcaggaaccagttcccctttgtgtgccaggcccggctgtggctgctgggcctgggcttcagcctgggctacggctccatgttcaccaagatctggtgggtgcacacagtgttcaccaagaaggaggagaagaaggagtggaggaagaccctggagccctggaagctgtatgccaccgtgggcctgctggtgggcatggatgtgctgaccctggccatctggcagatcgtggaccccctgcacaggaccatcgagacctttgccaaggaggagcccaaggaggacattgatgtgtccatcctgccccagctggagcactgcagcagcaggaagatgaacacctggctgggcatcttctacggctacaagggcctgctgctgctgctgggcatcttcctggcctatgagaccaagtctgtgtccacagagaagatcaatgaccacagagctgtgggcatggccatctacaacgtggccgtgctgtgcctgatcacagcccctgtgaccatgatcctgagcagccagcaggatgctgcctttgcctttgccagcctggccatcgtgttcagcagctacatcaccctggtggtgctgtttgtgcccaagatgaggaggctcatcaccagaggagagtggcagagcgaggcccaggacaccatgaagacaggcagcagcaccaacaacaatgaggaggagaagagccggctgctggagaaggagaaccgggagctggagaagatcatcgccgagaaggaggagcgggtgtctgagctgcggcaccagctgcagagccggcagcagctgcggagcagaagacacccccccaccccacctgagcccagcggcggcctgccccggggccccccagagcccccagaccggctgagctgtgatggcagccgggtgcacctgctgtacaagtag

SEQ ID NO: 268914 - DNA, 4527 bp, Artificial Sequence
  derived and/or modified sequence
ccctctcttccccccgccctgccttcccttgcaccctccttcttccctccgcccgggagctctccctggtccccggcgccgcctccttccctcccggctccccgctccccgctcccgtggctgccgccgccccggggaagaagagacaggggtggggtttgggggaagcgagagaggaggggagagaccctggccaggctggagcctggattcgaggggaggagggacgggaggaggagaaaggtggaggagaagggaggggggagcggggaggagcggccgggcctggggccttgaggcccggggagagccggggagccgggcccgcgcgccgagatgttgctgctgctgctactggcgccactcttcctccgccccccgggcgcgggcggggcgcagacccccaacgccacctcagaaggttgccagatcatacacccgccctgggaagggggcatcaggtaccggggcctgactcgggaccaggtgaaggctatcaacttcctgccagtggactatgagattgagtatgtgtgccggggggagcgcgaggtggtggggcccaaggtccgcaagtgcctggccaacggctcctggacagatatggacacacccagccgctgtgtccgaatctgctccaagtcttatttgaccctggaaaatgggaaggttttcctgacgggtggggacctcccagctctggacggagcccgggtggatttccggtgtgaccccgacttccatctggtgggcagctcccggagcatctgtagtcagggccagtggagcacccccaagccccactgccaggtgaatcgaacgccacactcagaacggcgcgcagtgtacatcggggcactgtttcccatgagcgggggctggccagggggccaggcctgccagcccgcggtggagatggcgctggaggacgtgaatagccgcagggacatcctgccggactatgagctcaagctcatccaccacgacagcaagtgtgatccaggccaagccaccaagtacctatatgagctgctctacaacgaccctatcaagatcatccttatgcctggctgcagctctgtctccacgctggtggctgaggctgctaggatgtggaacctcattgtgctttcctatggctccagctcaccagccctgtcaaaccggcagcgtttccccactttcttccgaacgcacccatcagccacactccacaaccctacccgcgtgaaactctttgaaaagtggggctggaagaagattgctaccatccagcagaccactgaggtcttcacttcgactctggacgacctggaggaacgagtgaaggaggctggaattgagattactttccgccagagtttcttctcagatccagctgtgcccgtcaaaaacctgaagcgccaggatgcccgaatcatcgtgggacttttctatgagactgaagcccggaaagttttttgtgaggtgtacaaggagcgtctctttgggaagaagtacgtctggttcctcattgggtggtatgctgacaattggttcaagatctacgacccttctatcaactgcacagtggatgagatgactgaggcggtggagggccacatcacaactgagattgtcatgctgaatcctgccaatacccgcagcatttccaacatgacatcccaggaatttgtggagaaactaaccaagcgactgaaaagacaccctgaggagacaggaggcttccaggaggcaccgctggcctatgatgccatctgggccttggcactggccctgaacaagacatctggaggaggcggccgttctggtgtgcgcctggaggacttcaactacaacaaccagaccattaccgaccaaatctaccgggcaatgaactcttcgtcctttgagggtgtctctggccatgtggtgtttgatgccagcggctctcggatggcatggacgcttatcgagcagcttcagggtggcagctacaagaagattggctactatgacagcaccaaggatgatctttcctggtccaaaacagataaatggattggagggtcccccccagctgaccagaccctggtcatcaagacattccgcttcctgtcacagaaactctttatctccgtctcagttctctccagcctgggcattgtcctagctgttgtctgtctgtcctttaacatctacaactcacatgtccgttatatccagaactcacagcccaacctgaacaacctgactgctgtgggctgctcactggctttagctgctgtcttccccctggggctcgatggttaccacattgggaggaaccagtttcctttcgtctgccaggcccgcctctggctcctgggcctgggctttagtctgggctacggttccatgttcaccaagatttggtgggtccacacggtcttcacaaagaaggaagaaaagaaggagtggaggaagactctggaaccctggaagctgtatgccacagtgggcctgctggtgggcatggatgtcctcactctcgccatctggcagatcgtggaccctctgcaccggaccattgagacatttgccaaggaggaacctaaggaagatattgacgtctctattctgccccagctggagcattgcagctccaggaagatgaatacatggcttggcattttctatggttacaaggggctgctgctgctgctgggaatcttccttgcttatgagaccaagagtgtgtccactgagaagatcaatgatcaccgggctgtgggcatggctatctacaatgtggcagtcctgtgcctcatcactgctcctgtcaccatgattctgtccagccagcaggatgcagcctttgcctttgcctctcttgccatagttttctcctcctatatcactcttgttgtgctctttgtgcccaagatgcgcaggctgatcacccgaggggaatggcagtcggaggcgcaggacaccatgaagacagggtcatcgaccaacaacaacgaggaggagaagtcccggctgttggagaaggagaaccgtgaactggaaaagatcattgctgagaaagaggagcgtgtctctgaactgcgccatcaactccagtctcggcagcagctccgctcccggcgccacccaccgacacccccagaaccctctgggggcctgcccaggggaccccctgagccccccgaccggcttagctgtgatgggagtcgagtgcatttgctttataagtgagggtagggtgagggaggacaggccagtagggggagggaaagggagaggggaagggcaggggactcaggaagcagggggtccccatccccagctgggaagaacatgctatccaatctcatctcttgtaaatacatgtccccctgtgagttctgggctgatttgggtctctcatacctctgggaaacagacctttttctctcttactgcttcatgtaattttgtatcacctcttcacaatttagttcgtacctggcttgaagctgctcactgctcacacgctgcctcctcagcagcctcactgcatctttctcttcccatgcaacaccctcttctagttaccacggcaacccctgcagctcctctgcctttgtgctctgttcctgtccagcaggggtctcccaacaagtgctctttccaccccaaaggggcctctccttttctccactgtcataatctctttccatcttacttgcccttctatactttctcacatgtggctccccctgaattttgcttcctttgggagctcattcttttcgccaaggctcacatgctccttgcctctgctctgtgcactcacgctcagcacacatgcatcctcccctctcctgcgtgtgcccactgaacatgctcatgtgtacacacgcttttcccgtatgctttcttcatgttcagtcacatgtgctctcgggtgccctgcattcacagctacgtgtgcccctctcatggtcatgggtctgcccttgagcgtgtttgggtaggcatgtgcaatttgtctagcatgctgagtcatgtctttcctatttgcacacgtccatgtttatccatgtactttccctgtgtaccctccatgtaccttgtgtactttcttcccttaaatcatggtattcttctgacagagccatatgtaccctaccctgcacattgttatgcacttttccccaattcatgtttggtggggccatccacaccctctccttgtcacagaatctccatttctgctcagattccccccatctccattgcattcatgtactaccctcagtctacactcacaatcatcttctcccaagactgctcccttttgttttgtgtttttttgaggggaattaaggaaaaataagtgggggcaggtttggagagctgcttccagtggatagttgatgagaatcctgaccaaaggaaggcacccttgactgttgggatagacagatggacctatggggtgggaggtggtgtccctttcacactgtggtgtctcttggggaaggatctccccgaatctcaataaaccagtgaacagtg

SEQ ID NO: 268915 - DNA, 2886 bp, Artificial Sequence
  derived and/or modified sequence
atgctgctgctgctgctgctggcccccctgttcctgcggccccccggtgcaggtggagcgcagacaccgaatgcgacctctgaggggtgtcagattattcatcctccctgggagggagggatccggtacagaggtctgactcgcgaccaggtgaaggctatcaattttctcccagttgactatgaaattgagtacgtgtgccggggcgagcgcgaggtggtcggccccaaggtacgcaaatgtctggctaatggcagttggacagatatggatacgcccagtagatgtgtgcgcatatgtagcaagtcttatttaacattggagaacgggaaagtgtttctaaccggtggtgatctgccagctttggacggcgctcgtgttgatttccgttgtgacccggacttccatcttgtgggtagctcgcgaagtatctgcagtcagggacaatggtcaacccccaagccacattgccaagtaaacagaactccacattcagagcgacgagcagtgtatataggcgcattgtttcctatgtcaggagggtggcctggcggccaagcatgtcagccagctgtcgagatggcactggaggacgtgaatagccgacgcgatatcctccccgattacgaactgaaactgatccaccacgacagtaaatgtgatcccggccaagctactaagtatctctatgagttactttataacgatcctattaaaatcatcttaatgcccggctgctcctccgtgagcaccctggtggccgaagccgctaggatgtggaacctgattgtgctgagctatggtagctcgtctcccgcccttagtaacagacagcgattcccaacttttttcagaacccatccaagtgccaccctccacaatcccacaagagtaaagctgtttgagaagtggggctggaagaagatcgcaaccatacaacaaaccacagaggtgtttacttccacattagacgacctagaagaacgggttaaagaggcaggaatagagatcacgttccgccagtcattctttagtgacccagcggttcctgtcaagaacctgaagagacaggacgcccgtataattgtaggtcttttttacgagaccgaagctcgcaaagtgttctgcgaggtctacaaggagaggctgttcggtaaaaaatatgtatggttcctcattggatggtatgctgataactggtttaaaatatacgacccttccataaactgcaccgttgacgagatgactgaggcggttgaagggcacattacgactgagattgtgatgcttaatccagcgaacacccgctccatctcaaatatgactagtcaggagtttgtggagaaacttacaaaacggttgaaacgccatcccgaggaaacaggagggttccaggaagctcccctggcttacgacgctatttgggctctcgccctcgcgctgaacaaaacatcaggaggcggtgggcgttcaggggtcaggttggaggactttaattacaataatcaaactatcaccgaccagatctaccgggcgatgaatagctcttcctttgagggcgtcagcggacatgtagtctttgacgcgagtgggtcacgcatggcgtggacactaatcgagcagctccagggcggctcttacaagaagattggatactacgactcgactaaagacgatctgtcctggtcaaaaaccgacaagtggattggcggcagcccacccgctgaccaaacactggttatcaaaacattcagattcctgtcccagaagctgtttatatccgtcagtgtgctgtcgtcactggggattgtcttggcagtcgtgtgtctaagcttcaatatctacaattcccatgtccggtacattcagaacagccagcctaacctcaacaatctcaccgcagtcggctgctccctggcccttgccgctgtatttccactgggcctggacgggtatcacatcggccggaaccagttcccatttgtatgtcaggctaggttgtggctgctcggcctaggcttcagtcttggctacggttcaatgttcactaagatatggtgggtccataccgtgttcactaaaaaggaggagaaaaaggagtggagaaaaacactggaaccatggaagctgtatgccaccgttggtttactagtggggatggacgtgctaacgcttgctatttggcagattgttgaccctctccatagaaccattgaaacgtttgccaaggaggagcccaaagaagatatcgacgtttccattctgccccagttagagcactgtagctccagaaaaatgaatacctggttgggaatcttctacgggtacaaaggtctgctcctcctgcttgggatttttttagcctacgaaacaaagagtgtgagcacagaaaagataaatgaccaccgggccgtcggtatggcaatttataatgtggccgtcttgtgtctaatcacagcccccgtcaccatgattcttagctcccagcaggatgcggctttcgcattcgcttccctcgcaatcgtgttctcatcatacattaccctggtggttctgtttgttccaaagatgaggcgcctcattactaggggcgagtggcagtccgaggcccaggataccatgaagactgggagctctactaacaacaacgaggaggagaagtccagactgctggagaaagaaaatcgcgagctggagaagatcattgccgagaaagaggagcgagtctccgagttgcgccaccagttacagtcccgccagcaattacggagccgcagacatcctcccactcctccagagcctagtgggggcctccctcggggccccccggagccccctgaccgcctctcatgcgatggcagcagggtgcacctgctttataagtag

SEQ ID NO: 268916 - DNA, 2886 bp, Artificial Sequence
  derived and/or modified sequence
atgctgctgctgctgctgctggcccccctgttcctgcggccccccggagccggcggcgctcagacccccaatgccacatcagaaggctgccaaattatacaccccccatgggagggcggaattcggtatcgggggcttaccagagaccaggtgaaagccatcaactttttgccagttgactatgagatcgaatatgtctgccggggggagcgggaagtagttggccccaaagtgaggaagtgtctcgctaatggaagctggactgatatggacaccccgtctcgctgtgtgcggatctgcagcaaaagctacctgacgctggagaacgggaaagtgtttttgaccggtggggaccttcccgccctcgacggcgccagggtggattttcggtgtgaccctgattttcacttggtaggcagctctcgcagcatttgttctcagggacagtggtcaacccccaagccccattgccaggttaataggaccccccacagtgagcggcgtgccgtgtatataggggcactgtttcccatgagcggaggatggccaggcggacaagcctgccagcctgcagtggagatggccctcgaggatgtgaattcaagacgggacattcttcccgactatgagcttaagttaatccaccacgactctaagtgtgatcctggtcaggccactaagtatctgtatgaactcctgtacaatgacccgatcaagattatacttatgcctgggtgcagctcagtttccacactggttgctgaagccgcaaggatgtggaatcttatcgtcctgagctacgggtctagcagccccgccttgagtaacagacagaggttccccacattcttccgaacccatccttcagccacattgcataatcccacccgggttaagctttttgaaaaatggggctggaagaagattgctacgattcagcagacgactgaagtcttcacaagtacccttgatgatctcgaagaacgggtgaaagaagcggggatcgaaattacattccggcaatcctttttcagtgatcccgccgtgccagtaaaaaacctcaagaggcaggacgcccgcatcatcgtaggcttattctacgaaacagaggcacggaaggtattctgtgaagtctataaggagcgtctctttggaaaaaagtatgtgtggttcctgatcggttggtatgccgataattggttcaagatttacgaccccagtattaattgcacagttgacgagatgacagaagcagtcgagggtcatatcacaactgaaatcgtaatgctgaaccccgccaatacaagatctatctccaacatgacctcgcaagagttcgtggagaagctgaccaagcgtcttaaaagacacccagaggaaacggggggctttcaggaagctccactggcctatgatgcgatttgggccctggcccttgccttgaataaaaccagcggtgggggcggccgatcgggcgttaggttagaagacttcaactataacaatcaaactattaccgaccagatctaccgtgccatgaactcaagttctttcgaaggcgtgtcaggacacgtggttttcgacgcttcaggcagtcgcatggcatggacactcatcgaacagttacaggggggcagctataagaagatcggttactatgattccaccaaggatgatctaagctggtctaaaaccgacaagtggattggaggttcccccccagctgaccagaccctggtgatcaagacttttagatttctgtcccagaagctttttatatcagtgtcagtgctttcatccttgggcatcgtccttgccgtggtttgcctgtcttttaacatctataacagtcacgtccggtatatccagaactcccaacctaatctcaacaatctgactgcagtgggttgctcattagccctggccgctgtttttccccttggattggatggttatcacataggacgcaatcagtttcccttcgtctgtcaggcaagactgtggctactcggcctggggttctctctggggtacgggagcatgttcactaaaatatggtgggtccacaccgtctttacaaaaaaggaggagaagaaggagtggcggaagacattggagccatggaagctttacgccacagtaggcctactagtaggaatggacgtcctcactctggccatttggcagattgtagaccccctgcaccgaaccatcgaaacctttgcaaaagaagagcccaaagaagacatcgatgtgagtatattgcctcaactagagcattgttctagcaggaaaatgaatacctggttgggcatcttctatggatataaggggcttctgcttctcttgggaatctttctggcttacgagaccaagtctgtgtctacagagaaaattaatgaccaccgcgccgtcggaatggccatctataatgtggcagtgctttgcctgataactgccccggtgacaatgatcctctcatcacaacaggacgccgcattcgcctttgcgtctctggctatcgtgttttctagctacataacactcgtggtgctgttcgtaccgaagatgcggcgactcatcacccggggcgagtggcagagcgaagcgcaggacaccatgaagacgggatccagtaccaataataatgaggaagagaagagcagactgcttgagaaagagaacagagaactggaaaagatcatcgcggaaaaggaggagcgggtctcagagctcagacatcagctccagagcagacagcagctcagaagcaggcgtcatcctcccactcccccagagccttctggagggctccccagaggaccccccgagcccccggacagattaagttgtgatggcagtcgggtacatctcctctacaagtag

SEQ ID NO: 268917 - DNA, 2886 bp, Artificial Sequence
  derived and/or modified sequence
atgctgctgctgctgctgctggcccccctgttcctgcggccccccggtgccggcggtgcgcagacgccgaacgctacgtccgaaggctgtcagattatccatcccccttgggagggcgggatccggtatcgggggctgaccagagaccaggtgaaggcgatcaattttctgcccgtggactacgagatcgagtatgtctgccgcggtgagcgcgaagttgttggacctaaggtgcggaaatgcctggccaatggaagttggacagacatggacacaccttctagatgtgttaggatctgctccaaatcctatctaaccctggaaaacggaaaggtctttctgacgggcggagacttgccagcactggatggcgcacgagtggactttaggtgtgacccagattttcacctggtcggcagcagccgatcgatttgtagccaagggcagtggagtacaccaaagccccattgtcaggttaatcgcacaccgcactcagaaaggagagccgtgtacatcggggcccttttcccgatgagtgggggctggcctggcggccaggcatgccagcctgcagttgagatggcgctcgaagacgtcaacagccggagagatattctgcccgattatgaattgaaattgattcatcatgatagtaaatgtgaccctggacaggccactaagtatctttatgaattgctgtataacgaccctattaagattatactgatgcctggctgtagttccgtgtctactctcgtggcggaggctgcgagaatgtggaatctgatcgtactgtcttatggttccagctcaccagcgctcagcaatcgacagcgtttcccaacattcttcaggactcacccaagtgctacgctgcataaccctacacgcgttaaattgttcgaaaaatggggctggaaaaaaattgccaccatccagcagactacggaggtgtttacctccacgttggatgatctcgaggaacgggtgaaggaggccggcattgagatcacattccggcaatcttttttcagcgacccagctgtgcctgtcaagaatctgaaaagacaggatgctaggatcatcgttggtcttttttatgagacagaggctcgcaaggttttctgtgaagtatacaaggagcgcttattcggcaagaaatatgtctggtttctcatagggtggtatgcggataactggttcaagatttatgatccatcaataaattgtactgtggacgagatgaccgaggcagttgagggccacatcacaaccgaaatcgttatgctgaatccggccaacacccgctcgatctcaaacatgacgtcacaggagtttgtagaaaaactcacaaagagactaaagagacacccagaggaaaccggtggattccaagaagccccacttgcttacgacgccatatgggctctggctctggctctgaacaagacgagcggtggtggtggcagatccggcgttcgccttgaggattttaactacaataatcagacaatcacagatcaaatctaccgggcaatgaattcttcatccttcgagggggtgtccggccacgttgttttcgacgcttccggaagccggatggcatggacactcatcgaacagctccaaggggggtcatataaaaaaattggctattacgactctaccaaagacgacctctcgtggtcgaaaacagacaaatggatcggcgggagccccccagcagaccaaacgcttgttatcaagacttttcgcttcctgagtcagaagcttttcataagtgtaagtgtgctctctagcctggggattgttctcgcggtggtgtgtctgagcttcaacatttataattcacacgttaggtacatacagaacagccagccaaacctcaataacctgaccgcggtagggtgctccctagccctggccgctgtcttcccgctgggtttagatgggtaccatatcggtaggaatcagttcccatttgtgtgccaggcaagattgtggctccttggccttggcttctcacttggatacggatcgatgtttacaaaaatctggtgggttcacaccgtgttcacaaaaaaggaggagaaaaaggagtggagaaagaccttagaaccctggaaactctacgccactgttggactgctggttgggatggatgtgcttaccctcgccatttggcagatcgtggatcccctccacaggacaattgaaacatttgccaaggaagaaccaaaggaggatattgatgtctctatattgccacaactcgaacattgtagcagtcggaagatgaatacctggctgggtatattttatggttacaaggggctcctgctgcttctcgggatttttctcgcttacgaaactaaatctgtgagcactgagaaaatcaacgaccacagagcagtcggcatggccatatataacgtggcagtgctctgcctgataaccgcgcccgtcaccatgatcttgtcttcccagcaggatgctgccttcgccttcgctagcctggctattgtgttttcatcttacatcactctagtagtgctgtttgtaccaaaaatgcgacgcttaataacccggggagagtggcagagtgaggcccaagatacaatgaaaactggctcaagcaccaacaacaacgaagaagaaaagagccgcctccttgagaaggaaaacagagaactcgagaagataatcgctgagaaggaggagcgtgtgagtgaactcagacaccagttgcagagtcgtcagcagctgcgctcccggagacatccccccaccccccctgaaccatccggagggctgccaaggggcccacctgaacccccggacaggcttagctgcgatggctcaagagtgcatctgctctacaagtag

SEQ ID NO: 268918 - DNA, 4510 bp, Artificial Sequence
  derived and/or modified sequence
cccttgcaccctccttcttccctccgcccgggagctctccctggtccccggcgccgcctccttccctcccggctccccgctccccgctcccgtggctgccgccgccccggggaagaagagacaggggtggggtttgggggaagcgagagaggaggggagagaccctggccaggctggagcctggattcgaggggaggagggacgggaggaggagaaaggtggaggagaagggaggggggagcggggaggagcggccgggcctggggccttgaggcccggggagagccggggagccgggcccgcgcgccgagatgttgctgctgctgctactggcgccactcttcctccgccccccgggcgcgggcggggcgcagacccccaacgccacctcagaaggttgccagatcatacacccgccctgggaagggggcatcaggtaccggggcctgactcgggaccaggtgaaggctatcaacttcctgccagtggactatgagattgagtatgtgtgccggggggagcgcgaggtggtggggcccaaggtccgcaagtgcctggccaacggctcctggacagatatggacacacccagccgctgtgtccgaatctgctccaagtcttatttgaccctggaaaatgggaaggttttcctgacgggtggggacctcccagctctggacggagcccgggtggatttccggtgtgaccccgacttccatctggtgggcagctcccggagcatctgtagtcagggccagtggagcacccccaagccccactgccaggtgaatcgaacgccacactcagaacggcgcgcagtgtacatcggggcactgtttcccatgagcgggggctggccagggggccaggcctgccagcccgcggtggagatggcgctggaggacgtgaatagccgcagggacatcctgccggactatgagctcaagctcatccaccacgacagcaagtgtgatccaggccaagccaccaagtacctatatgagctgctctacaacgaccctatcaagatcatccttatgcctggctgcagctctgtctccacgctggtggctgaggctgctaggatgtggaacctcattgtgctttcctatggctccagctcaccagccctgtcaaaccggcagcgtttccccactttcttccgaacgcacccatcagccacactccacaaccctacccgcgtgaaactctttgaaaagtggggctggaagaagattgctaccatccagcagaccactgaggtcttcacttcgactctggacgacctggaggaacgagtgaaggaggctggaattgagattactttccgccagagtttcttctcagatccagctgtgcccgtcaaaaacctgaagcgccaggatgcccgaatcatcgtgggacttttctatgagactgaagcccggaaagttttttgtgaggtgtacaaggagcgtctctttgggaagaagtacgtctggttcctcattgggtggtatgctgacaattggttcaagatctacgacccttctatcaactgcacagtggatgagatgactgaggcggtggagggccacatcacaactgagattgtcatgctgaatcctgccaatacccgcagcatttccaacatgacatcccaggaatttgtggagaaactaaccaagcgactgaaaagacaccctgaggagacaggaggcttccaggaggcaccgctggcctatgatgccatctgggccttggcactggccctgaacaagacatctggaggaggcggccgttctggtgtgcgcctggaggacttcaactacaacaaccagaccattaccgaccaaatctaccgggcaatgaactcttcgtcctttgagggtgtctctggccatgtggtgtttgatgccagcggctctcggatggcatggacgcttatcgagcagcttcagggtggcagctacaagaagattggctactatgacagcaccaaggatgatctttcctggtccaaaacagataaatggattggagggtcccccccagctgaccagaccctggtcatcaagacattccgcttcctgtcacagaaactctttatctccgtctcagttctctccagcctgggcattgtcctagctgttgtctgtctgtcctttaacatctacaactcacatgtccgttatatccagaactcacagcccaacctgaacaacctgactgctgtgggctgctcactggctttagctgctgtcttccccctggggctcgatggttaccacattgggaggaaccagtttcctttcgtctgccaggcccgcctctggctcctgggcctgggctttagtctgggctacggttccatgttcaccaagatttggtgggtccacacggtcttcacaaagaaggaagaaaagaaggagtggaggaagactctggaaccctggaagctgtatgccacagtgggcctgctggtgggcatggatgtcctcactctcgccatctggcagatcgtggaccctctgcaccggaccattgagacatttgccaaggaggaacctaaggaagatattgacgtctctattctgccccagctggagcattgcagctccaggaagatgaatacatggcttggcattttctatggttacaaggggctgctgctgctgctgggaatcttccttgcttatgagaccaagagtgtgtccactgagaagatcaatgatcaccgggctgtgggcatggctatctacaatgtggcagtcctgtgcctcatcactgctcctgtcaccatgattctgtccagccagcaggatgcagcctttgcctttgcctctcttgccatagttttctcctcctatatcactcttgttgtgctctttgtgcccaagatgcgcaggctgatcacccgaggggaatggcagtcggaggcgcaggacaccatgaagacagggtcatcgaccaacaacaacgaggaggagaagtcccggctgttggagaaggagaaccgtgaactggaaaagatcattgctgagaaagaggagcgtgtctctgaactgcgccatcaactccagtctcggcagcagctccgctcccggcgccacccaccgacacccccagaaccctctgggggcctgcccaggggaccccctgagccccccgaccggcttagctgtgatgggagtcgagtgcatttgctttataagtgagggtagggtgagggaggacaggccagtagggggagggaaagggagaggggaagggcaggggactcaggaagcagggggtccccatccccagctgggaagaacatgctatccaatctcatctcttgtaaatacatgtccccctgtgagttctgggctgatttgggtctctcatacctctgggaaacagacctttttctctcttactgcttcatgtaattttgtatcacctcttcacaatttagttcgtacctggcttgaagctgctcactgctcacacgctgcctcctcagcagcctcactgcatctttctcttcccatgcaacaccctcttctagttaccacggcaacccctgcagctcctctgcctttgtgctctgttcctgtccagcaggggtctcccaacaagtgctctttccaccccaaaggggcctctccttttctccactgtcataatctctttccatcttacttgcccttctatactttctcacatgtggctccccctgaattttgcttcctttgggagctcattcttttcgccaaggctcacatgctccttgcctctgctctgtgcactcacgctcagcacacatgcatcctcccctctcctgcgtgtgcccactgaacatgctcatgtgtacacacgcttttcccgtatgctttcttcatgttcagtcacatgtgctctcgggtgccctgcattcacagctacgtgtgcccctctcatggtcatgggtctgcccttgagcgtgtttgggtaggcatgtgcaatttgtctagcatgctgagtcatgtctttcctatttgcacacgtccatgtttatccatgtactttccctgtgtaccctccatgtaccttgtgtactttcttcccttaaatcatggtattcttctgacagagccatatgtaccctaccctgcacattgttatgcacttttccccaattcatgtttggtggggccatccacaccctctccttgtcacagaatctccatttctgctcagattccccccatctccattgcattcatgtactaccctcagtctacactcacaatcatcttctcccaagactgctcccttttgttttgtgtttttttgaggggaattaaggaaaaataagtgggggcaggtttggagagctgcttccagtggatagttgatgagaatcctgaccaaaggaaggcacccttgactgttgggatagacagatggacctatggggtgggaggtggtgtccctttcacactgtggtgtctcttggggaaggatctccccgaatctcaataaaccagtgaacagtgtgactcgg

SEQ ID NO: 268919 - DNA, 4510 bp, Artificial Sequence
  derived and/or modified sequence
cccttgcaccctccttcttccctccgcccgggagctctccctggtccccggcgccgcctccttccctcccggctccccgctccccgctcccgtggctgccgccgccccggggaagaagagacaggggtggggtttgggggaagcgagagaggaggggagagaccctggccaggctggagcctggattcgaggggaggagggacgggaggaggagaaaggtggaggagaagggaggggggagcggggaggagcggccgggcctggggccttgaggcccggggagagccggggagccgggcccgcgcgccgagatgttgctgctgctgctactggcgccactcttcctccgccccccgggcgcgggcggggcgcagacccccaacgccacctcagaaggttgccagatcatacacccgccctgggaagggggcatcaggtaccggggcctgactcgggaccaggtgaaggctatcaacttcctgccagtggactatgagattgagtatgtgtgccggggggagcgcgaggtggtggggcccaaggtccgcaagtgcctggccaacggctcctggacagatatggacacacccagccgctgtgtccgaatctgctccaagtcttatttgaccctggaaaatgggaaggttttcctgacgggtggggacctcccagctctggacggagcccgggtggatttccggtgtgaccccgacttccatctggtgggcagctcccggagcatctgtagtcagggccagtggagcacccccaagccccactgccaggtgaatcgaacgccacactcagaacggcgcgcagtgtacatcggggcactgtttcccatgagcgggggctggccagggggccaggcctgccagcccgcggtggagatggcgctggaggacgtgaatagccgcagggacatcctgccggactatgagctcaagctcatccaccacgacagcaagtgtgatccaggccaagccaccaagtacctatatgagctgctctacaacgaccctatcaagatcatccttatgcctggctgcagctctgtctccacgctggtggctgaggctgctaggatgtggaacctcattgtgctttcctatggctccagctcaccagccctgtcaaaccggcagcgtttccccactttcttccgaacgcacccatcagccacactccacaaccctacccgcgtgaaactctttgaaaagtggggctggaagaagattgctaccatccagcagaccactgaggtcttcacttcgactctggacgacctggaggaacgagtgaaggaggctggaattgagattactttccgccagagtttcttctcagatccagctgtgcccgtcaaaaacctgaagcgccaggatgcccgaatcatcgtgggacttttctatgagactgaagcccggaaagttttttgtgaggtgtacaaggagcgtctctttgggaagaagtacgtctggttcctcattgggtggtatgctgacaattggttcaagatctacgacccttctatcaactgcacagtggatgagatgactgaggcggtggagggccacatcacaactgagattgtcatgctgaatcctgccaatacccgcagcatttccaacatgacatcccaggaatttgtggagaaactaaccaagcgactgaaaagacaccctgaggagacaggaggcttccaggaggcaccgctggcctatgatgccatctgggccttggcactggccctgaacaagacatctggaggaggcggccgttctggtgtgcgcctggaggacttcaactacaacaaccagaccattaccgaccaaatctaccgggcaatgaactcttcgtcctttgagggtgtctctggccatgtggtgtttgatgccagcggctctcggatggcatggacgcttatcgagcagcttcagggtggcagctacaagaagattggctactatgacagcaccaaggatgatctttcctggtccaaaacagataaatggattggagggtcccccccagctgaccagaccctggtcatcaagacattccgcttcctgtcacagaaactctttatctccgtctcagttctctccagcctgggcattgtcctagctgttgtctgtctgtcctttaacatctacaactcacatgtccgttatatccagaactcacagcccaacctgaacaacctgactgctgtgggctgctcactggctttagctgctgtcttccccctggggctcgatggttaccacattgggaggaaccagtttcctttcgtctgccaggcccgcctctggctcctgggcctgggctttagtctgggctacggttccatgttcaccaagatttggtgggtccacacggtcttcacaaagaaggaagaaaagaaggagtggaggaagactctggaaccctggaagctgtatgccacagtgggcctgctggtgggcatggatgtcctcactctcgccatctggcagatcgtggaccctctgcaccggaccattgagacatttgccaaggaggaacctaaggaagatattgacgtctctattctgccccagctggagcattgcagctccaggaagatgaatacatggcttggcattttctatggttacaaggggctgctgctgctgctgggaatcttccttgcttatgagaccaagagtgtgtccactgagaagatcaatgatcaccgggctgtgggcatggctatctacaatgtggcagtcctgtgcctcatcactgctcctgtcaccatgattctgtccagccagcaggatgcagcctttgcctttgcctctcttgccatagttttctcctcctatatcactcttgttgtgctctttgtgcccaagatgcgcaggctgatcacccgaggggaatggcagtcggaggcgcaggacaccatgaagacagggtcatcgaccaacaacaacgaggaggagaagtcccggctgttggagaaggagaaccgtgaactggaaaagatcattgctgagaaagaggagcgtgtctctgaactgcgccatcaactccagtctcggcagcagctccgctcccggcgccacccaccgacacccccagaaccctctgggggcctgcccaggggaccccctgagccccccgaccggcttagctgtgatgggagtcgagtgcatttgctttataagtgagggtagggtgagggaggacaggccagtagggggagggaaagggagaggggaagggcaggggactcaggaagcagggggtccccatccccagctgggaagaacatgctatccaatctcatctcttgtaaatacatgtccccctgtgagttctgggctgatttgggtctctcatacctctgggaaacagacctttttctctcttactgcttcatgtaattttgtatcacctcttcacaatttagttcgtacctggcttgaagctgctcactgctcacacactgcctcctcagcagcctcactgcatctttctcttcccatgcaacaccctcttctagttaccacggcaacccctgcagctcctctgcctttgtgctctgttcctgtccagcaggggtctcccaacaagtgctctttccaccccaaaggggcctctccttttctccactgtcataatctctttccatcttacttgcccttctatactttctcacatgtggctccccctgaattttgcttcctttgggagctcattcttttcgccaaggctcacatgctccttgcctctgctctgtgcactcacgctcagcacacatgcatcctcccctctcctgcgtgtgcccactgaacatgctcatgtgtacacacgcttttcccgtatgctttcttcatgttcagtcacatgtgctctcgggtgccctgcattcacagctacgtgtgcccctctcatggtcatgggtctgcccttgagcgtgtttgggtaggcatgtgcaatttgtctagcatgctgagtcatgtctttcctatttgcacacgtccatgtttatccatgtactttccctgtgtaccctccatgtaccttgtgtactttcttcccttaaatcatggtattcttctgacagagccatatgtaccctaccctgcacattgttatgcacttttccccaattcatgtttggtggggccatccacaccctctccttgtcacagaatctccatttctgctcagattccccccatctccattgcattcatgtactaccctcagtctacactcacaatcatcttctcccaagactgctcccttttgttttgtgtttttttgaggggaattaaggaaaaataagtgggggcaggtttggagagctgcttccagtggatagttgatgagaatcctgaccaaaggaaggcacccttgactgttgggatagacagatggacctatggggtgggaggtggtgtccctttcacactgtggtgtctcttggggaaggatctccccgaatctcaataaaccagtgaacagtgtgactcgg

SEQ ID NO: 268920 - DNA, 2886 bp, Artificial Sequence
  derived and/or modified sequence
atgctgctgctgctgctgctggcccccctgttcctgcggccccccggcgccggcggggcacaaaccccaaacgccaccagtgagggctgccaaattatccatcccccctgggagggcggtattagataccgcggtctaacaagagatcaggtgaaagcaataaattttttgcctgtggactacgaaattgagtatgtgtgtagaggggagcgtgaggtggtgggacccaaggtgcggaagtgtctggcaaacggttcctggacagacatggatactcccagccgttgcgtccggatatgtagtaaatcatacttaacactcgaaaacgggaaagtgtttctcactgggggggaccttccagcactcgacggcgctcgcgtcgacttccgctgtgatccggacttccatctggtaggatcatcacgctccatttgttcacagggccagtggagcactccaaaacctcactgccaggtgaaccggacgccccactcagagcgtagagccgtttacatcggagcgctattccctatgtccggcggatggcccggcggtcaggcctgtcagccagctgtagagatggcattggaagatgtgaactcgcggcgagacatcttgccggattatgagctgaagcttattcatcacgactcaaaatgcgatcccgggcaggcgaccaaatatctctatgagctcctctataacgacccaattaagatcattcttatgccaggatgttcctctgtgtctaccttggtggccgaagcggcccggatgtggaacctgatcgtgctgtcttatggctccagtagccctgccctgagcaaccgacaacgattccccacatttttccgaacacaccccagcgcaacccttcacaacccaacccgagttaagctctttgaaaagtggggatggaagaagatcgccaccatccagcagaccaccgaggtattcacctccacgcttgacgacctggaagagcgggtaaaggaagccgggatcgagattaccttccgtcagagcttcttctcagacccggccgttccagtgaagaatctgaaaaggcaagacgctaggatcatcgtgggcctgttttatgaaactgaagcaagaaaagtgttctgtgaggtctataaagaacgtctgttcggcaagaagtatgtttggtttttaatcggttggtacgctgataactggttcaagatctatgatccatccatcaactgtaccgtcgatgaaatgaccgaagctgtcgagggccacatcacaaccgagattgtgatgctaaacccagctaatacaagaagcattagtaatatgacctctcaagaattcgtcgaaaaactcacaaaaagactgaaaagacatccggaggagacggggggatttcaggaggcacccctggcgtatgatgccatctgggccttagccttagctctgaataagacgagcgggggaggcggacggagtggggtgagactggaggattttaactacaacaatcaaactattacagaccagatataccgggccatgaactcgtccagttttgaaggtgtcagcggacatgttgtttttgacgcctctggctcaagaatggcctggactctaatagagcagttgcagggagggtcttataagaagatcgggtattatgattcgaccaaggacgacttgagctggagcaaaactgataagtggattggaggaagcccccctgcagaccaaacactggttatcaagacctttaggttcctcagtcagaaactgttcatatctgtcagtgtgttaagctccttgggaatagtgctggcagttgtctgcttatccttcaatatttacaattcccatgtgagatatatccagaacagccaacctaatctcaataacctaaccgctgtcgggtgttcccttgccttggctgcggtattccctctgggcttggatgggtatcatatcggtcggaaccaattccctttcgtttgtcaggccaggctctggttacttggtctgggcttttccctgggctatgggagcatgtttacaaaaatttggtgggtacacactgtgttcaccaagaaggaggaaaagaaggagtggcggaaaacattagaaccttggaagctgtatgctacagttggacttctagtcgggatggatgtgctgaccctggccatctggcagatcgtcgatcccctccacagaaccatcgagacctttgccaaggaggagcccaaagaggacatagatgtgagcattctccctcagctcgaacactgctcaagtcggaaaatgaatacatggttaggaatattttatgggtataaaggactgttgctcttgcttggcatttttttagcttatgagactaaaagtgtgagcacagagaagatcaacgatcatcgggctgtcggcatggccatatacaatgtcgcggtactctgtctcatcaccgcccctgtaaccatgatcctttcgagccagcaggatgcggcattcgcatttgccagcttggctatcgtgttttcttcctatataaccctggtcgtgctgttcgtgcctaagatgcgcaggctcataacaagaggagaatggcagtccgaagctcaagatacgatgaagactggctcatcaaccaacaacaatgaggaggagaagtctcggttactggagaaagaaaatagggaactggaaaagatcatcgctgagaaagaggagcgagtatctgagctgcggcatcaactacagagcagacagcagttaagaagcagacggcatccccctacgccccctgaaccttccggtgggctgccccgcgggccgcccgagccacccgataggcttagctgtgatgggtctcgtgtgcacttgctttacaagtag

SEQ ID NO: 268921 - DNA, 2886 bp, Artificial Sequence
  derived and/or modified sequence
atgctgctgctgctgctgctggcccccctgttcctgcggccccccggcgccgggggggcccagactcctaatgctaccagcgagggatgccagatcattcatccgccttgggaagggggcattcgatatcgaggtctgacaagagaccaggtaaaagctattaacttcctccctgtggactatgaaatcgagtacgtttgtaggggtgagcgcgaggtggtgggaccgaaagtccggaaatgcctcgccaacggctcctggactgatatggataccccctccagatgtgtccggatttgttccaagtcttacctcacactggagaatggcaaagtcttcttgacaggaggcgacctgcctgccctggacggagcccgagtggacttccgatgtgatccagactttcatctggtaggcagtagccgttccatttgttcccaggggcagtggagcacgcctaagccacactgccaggtcaatcggaccccacattctgagcgaagggccgtctacataggtgccttattcccgatgagtggtggctggcctggcggacaggcgtgccagcccgctgtggaaatggctcttgaggacgtgaattcccggcgcgatattttacctgactatgagcttaaattaatacaccacgatagcaaatgcgatcccgggcaggccactaaatacctttacgaactactgtataatgatcccatcaagattatccttatgcctgggtgtagctctgtttctacccttgtggcagaagccgctagaatgtggaacctgatcgtgctgagctatggcagctctagccctgcgctatctaatcgacagcgtttccccactttttttagaactcatccctcagccacactgcacaaccctacacgcgtgaaattattcgagaagtggggatggaaaaaaattgcaaccatccagcaaactacagaagtgttcacatctactttggatgacttggaggaaagggtgaaagaagccggaattgagattacctttcggcaatcttttttttccgacccggcggtgccggtcaaaaaccttaaacggcaagatgccagaattattgtgggcctcttttacgagactgaggcccgaaaagtattctgcgaggtttataaggaacgactgttcggcaagaagtacgtgtggttcttgattgggtggtatgctgacaactggtttaaaatctatgatccatctattaattgcaccgttgatgaaatgacggaagctgtggagggccatatcactacagagattgtgatgctgaatcccgctaatacacggtcaattagtaatatgacatctcaggaattcgtcgaaaagctgacaaaaagattgaaaagacacccagaggagacaggcggcttccaggaggccccacttgcttacgatgccatttgggctctggccttggcactgaataagaccagtggtggaggcggccgaagcggcgtgcggctggaagacttcaactataataaccaaacaattactgaccagatttacagggcgatgaatagttcctccttcgagggagtgtccggacatgtggttttcgacgcgagcggttctcggatggcatggactttgatcgagcagctgcaaggaggcagctacaaaaaaattggatactatgatagtaccaaggacgacctctcctggtcaaaaaccgataagtggatcggaggatcgccccctgccgatcagaccctggtgatcaagaccttcagattcctcagtcaaaagctgtttatctccgttagtgtgctgagtagcctgggcatagtactcgccgtggtgtgtctgagtttcaacatctacaattctcacgtgcggtatattcagaactcacagccaaacctaaataacctgactgctgtaggctgttccctcgcgctggccgcggtgtttccactcggcctagacggataccacatcggcagaaatcaatttccgttcgtctgccaagcccggttatggctacttgggctgggattctccttaggatacggctccatgttcaccaagatttggtgggttcacaccgtattcaccaaaaaagaggagaagaaggaatggaggaagaccctggagccgtggaagttgtacgccacagtgggactgctggtaggaatggacgtgctgactctggcaatatggcagattgtcgatccccttcacagaacaatcgagacctttgccaaagaggagccaaaagaggatatcgacgtgagtatcctcccccagctggaacactgttccagccggaaaatgaatacgtggctcggtattttctatggatacaagggcttacttctcctgctgggcatatttttggcgtacgaaactaagtctgtgtcgaccgaaaagattaatgatcacagggccgtgggaatggccatatacaatgtggccgtgctatgcctgatcactgccccggtcactatgatcctgtctagccagcaggatgcggcatttgccttcgcatccttagctatcgtgtttagctcttatataacactggtagtcctcttcgtgcccaaaatgaggagactcataactagaggcgaatggcagtctgaggcccaggacactatgaaaacaggttccagtaccaacaacaacgaggaggaaaagtcccggctgctggagaaggaaaatagagaactggagaagatcatagctgaaaaggaggaacgcgtttctgagctccgccaccagctgcaatcccggcagcagttgcgctctcggcgtcacccaccgaccccacccgagccctcaggcggcctcccaaggggcccaccagagcctccggatcgtctctcttgtgatggcagtagagtgcacttgttgtacaaatag

SEQ ID NO: 268922 - DNA, 2886 bp, Artificial Sequence
  derived and/or modified sequence
atgctgctgctgctgctgctggcccccctgttcctgcggccccccggtgcagggggagcgcagactccgaacgcaaccagtgaaggatgtcagatcatccatccaccttgggaaggcggcatacggtatcgcggtctgactcgcgaccaggtcaaggccataaatttccttcctgtggattatgaaattgaatacgtgtgccgcggggagcgggaagtcgtggggcccaaagtccggaaatgtctcgccaatggcagctggaccgatatggatactccttcacggtgtgtgaggatttgctccaaatcgtacttgaccctggaaaacgggaaagtttttctcaccggcggcgacctacccgccctggacggggcccgcgttgattttaggtgcgatccggacttccatctggttggtagcagtcgaagtatctgtagccagggccagtggagcacgcctaaaccccactgccaggtgaacagaactccgcactctgagcggagggcagtttatattggcgccctgttccccatgtcgggtggctggcctgggggtcaagcctgtcaaccagccgtggagatggccttggaagacgtcaactcccgcagggacatcctgcctgactatgaactgaaactgatccatcatgacagtaagtgtgaccctggacaggcgacgaagtatctttacgagttactatacaatgatccaatcaagatcatattgatgcccggatgttcttcagtttcaactcttgtcgctgaagctgctcggatgtggaacctgatagtgcttagctatggctcctcgagccccgctctctctaacagacagaggtttcctaccttttttcggacccacccaagcgcaactctgcataatccgactcgggtgaagctctttgagaagtggggctggaagaaaattgctactatacaacaaacaactgaagtctttacatctaccctggatgatttggaggaacgtgtgaaggaagccggaatcgagatcacctttagacagagcttctttagcgatccggctgtgcctgtgaagaacctgaaaagacaagacgctcgcatcattgtggggctgttctatgagaccgaagccagaaaggtcttttgtgaagtttacaaggagagactgtttggtaagaagtatgtatggtttctcatcgggtggtatgctgacaactggttcaagatatatgaccccagtatcaactgcactgtcgacgagatgactgaggccgtggagggccacattaccaccgagattgtgatgctgaatcccgctaatacccgaagcatctctaatatgactagccaggagtttgtggagaagctgaccaagcggttgaagcggcatcccgaagaaaccggaggtttccaggaggcgccccttgcctatgacgcaatctgggctctggctctggctctcaataagaccagtggcggcgggggccgctccggtgtccgcctagaagactttaattacaacaaccagacaattaccgatcagatttacagagcaatgaatagctcaagttttgagggtgtttcagggcacgtggtattcgatgcctcgggaagcagaatggcctggacattaatcgagcagctgcaaggcggaagttacaaaaagatcggatattacgacagcaccaaagatgatctcagctggagtaaaaccgataaatggatcggtggatccccaccggcagaccagacgctggtcattaaaacatttcgttttcttagccaaaaactgttcatctcagtgagcgtgcttagcagtctcggtattgtgctcgccgtggtttgtctcagcttcaacatttataacagtcacgtgaggtacatccagaattctcagccgaacctcaataatctgacggcggtgggctgcagtctcgccttggccgctgtgtttcccctgggcttggatggctatcatattggaaggaaccaattcccattcgtttgtcaagcccgcctttggctgctaggccttgggttctcattgggctacgggtctatgttcacaaaaatatggtgggttcacaccgttttcacaaagaaggaagagaaaaaggagtggcggaagactctggaaccttggaagctgtacgccacagttggcttgctcgtcggtatggatgttctgactctggctatttggcagatcgtggatccactgcatagaacaatcgagacatttgcaaaagaagagccaaaagaggatattgatgtgtccatactcccccagctggaacattgtagttcccggaaaatgaacacctggctgggaattttttacggctacaaaggtttgcttctcctattgggtatctttctcgcgtacgagacgaaaagtgtttcaacagagaagataaacgatcaccgcgctgtcgggatggcaatttacaatgtggcagtgctttgcttgattaccgcccccgttacaatgatcctctctagtcagcaggatgcggcgtttgcgtttgcctcgttggcaatagtgttctccagctacattacattggtggtgttattcgttccgaaaatgagacggttaattacccgcggcgaatggcagagcgaagcccaggacaccatgaagacaggtagtagtaccaataacaatgaggaagagaaaagtagattgttagaaaaagagaatcgggagctggaaaagatcatcgctgaaaaggaggagcgagtgagcgaacttagacaccaacttcaaagcagacagcagcttagatcccgaaggcacccacctactccacctgagccgagtggtggcctacccagaggtcctccagagcctccggaccgtctgtcctgtgacggcagccgcgtccacttgctttataagtag

SEQ ID NO: 268923 - RNA, 2886 nt, Artificial Sequence
  derived and/or modified sequence
augcugcuccugcuccuacuagcaccacucuuucugcguccuccaggagccggaggcgcacagacaccuaacgccacauccgaagguugccaaaucauccacccaccgugggaggggggaauucgcuacaggggacugacccgggaucaagugaaggcaaucaacuuucugcccguugacuaugagaucgaauaugucugucggggcgagcgcgaagugguuggaccaaagguuaggaagugccuugcuaacgguuccuggacggauauggacacuccaucacgcugugugcggaucugcucuaagaguuauuugacacucgagaaugguaaaguuuucuuaacggggggcgaccucccggccuuagauggcgcgcggguggacuuccgaugugacccugauuuucaccugguuggaagcagccgcaguauauguagccagggacaguggagcacccccaaaccacacugccaggugaaccgcaccccucacagcgagaggagggcgguguauauuggagcccuuuucccuaugucaggcggauggcccgggggacaagccugccagccugcuguggagauggcuuuagaggacgugaacucccgaagagacauccugccugauuacgagcuuaaauuaauccaccacgauagcaaaugcgauccuggccaggccaccaaguaucuauaugagcugcuguauaaugaucccauaaaaaucauacucaugccaggcuguucuucaguuucaacacugguugcugaagcagcuagaauguggaaucugauagugcuuagcuauggaagcucuagucccgcucuaaguaaucgccagagguuccccacuuucuuccgcacucacccaagcgcaacccuccauaacccaacccgcgucaagcucuucgaaaaauggggauggaaaaaaaucgcgacaauucagcagacuacugagguuuucaccucaacacuugaugaucuggaggagcgagucaaagaagccgguaucgagauaaccuuucgucagaguuucuuuagcgacccugcaguuccugucaaaaacuugaaacgucaggacgcgcgcauuaucgugggcuuauuuuaugagaccgaagcaagaaagguguucugcgagguguacaaagaacgacuguuugguaagaaguaugugugguuccugauaggaugguaugcugacaacugguuuaaaauuuacgauccuucuaucaacuguacagucgaugaaaugacagaagccguggaagggcauaucacaacagaaaucgugaugcuaaauccagcuaacacuaggagcaucaguaacaugacuagucaagaguucguggagaaacucacaaagcgauugaaacggcaccccgaggagacaggaggauuccaggaggccccuuuagcauaugacgcuauuugggcccuggccuuggcuuugaacaaaaccagcggcgggggcgggcgguccggagugagguuggaagauuucaauuauaacaaccagacuaucaccgaucagauauaucgggcuaugaacaguagcaguuuugaaggugucagcggccacgucguguuugaugcaucuggaucccgcauggccuggacuuugauugaacaacuccaggggggcucuuacaaaaagaucggcuacuaugauuccacuaaggacgaucugucauggucuaagaccgacaaguggaucggggguucucccccugcggaucaaacuuuagucaucaagaccuuuagauuccucucacagaaacuuuucauuucaguauccgugcuaucgagccuugggauaguucuggccguggugugccugaguuucaacaucuacaacucccacguccgguacauccaaaauagucagccgaaccugaauaauuuaaccgccgucgguuguucacuggcucuggcugcgguuuucccacugggucuggacggcuaccacaucggaagaaaucaguuuccuuucgugugccaggcccgucuuuggcuccuaggccugggauuuuccuuaggguacggcucuauguucaccaaaaucuggugggugcauaccguguuuacaaaaaaagaggaaaaaaaagaguggagaaaaacacuugaaccuuggaagcuguacgccacuguugggcugcuagugggaauggacgugcugacacuggccauuuggcagauuguggauccacugcaccgcacaaucgagacuuuugccaaggaagaaccuaaggaggacauugacguguccauccucccgcagcucgaacacuguagcagcaggaagaugaacacuuggcugggcaucuuuuauggguacaaagggcugcugcugcuucugggcaucuuccuugccuacgaaaccaaaagcgucagcacggaaaagaucaaugaccacagggccguuggcauggcuaucuacaacgucgccguuuugugccugaucaccgcccccgucacaaugauccuuucaucgcagcaagacgccgcguucgcauucgcaucacucgccaucguguucaguucauacauaacacuggugguucucuucgucccuaagaugcggagguugauuacgagaggggaauggcaguccgaagcacaggacacgaugaaaacuggcaguaguaccaauaauaaugaagaagaaaaaagccgccugcuagagaaagaaaauagagagcucgagaagaucaucgcagaaaaagaggagcgcguuagugaguugcgacaccagcuccagucccggcaacaauuacgcagcagacgccacccuccaaccccuccggaaccuuccgguggcuuaccucggggaccaccagaaccuccugauagacuaucuugcgauggaucuaggguccacuuacucuauaaauag

SEQ ID NO: 268924 - RNA, 2886 nt, Artificial Sequence
  derived and/or modified sequence
augcuacuuuuacuccuacuggcucccuuauuccugcgcccgcccggggccggaggugcccagacgcccaacgccacuucugaggguugucagauaauacauccgccaugggaaggaggcauucgguacaggggucugacacgcgaucagguuaaagccaucaauuuucuccccguagauuaugaaauugaguaugugugccgcggcgaaagagaggucguugguccuaaaguucggaaaugucuggcgaauggcucuuggacugacauggauacuccgagcagaugcguucggaucuguaguaagagcuaccucacccuggagaacggaaaaguuuuccugacugggggugaccuuccugcacuggauggcgcacgggucgacuucaggugugauccugauuuucaccuggucggcaguuccagguccauuuguucucaaggccaguggucuaccccgaaaccccauugucagguuaaccggacgccucacagcgaaagaagggcuguguacauuggcgcccuguucccuaugaguggcggcuggccgggagggcaggcaugccagccugccguggaaauggcccuggaagacguaaacagccgacgggauauacuccccgauuaugaauugaaacugauccaucaugacuccaaaugcgaucccggccaggcaaccaaauacuuauaugaguugcucuauaacgauccuauuaaaaucauccuuaugcccggauguucaucuguguccacccuugucgccgaagcagcacggauguggaaccucauaguucucagcuauggaucuagcaguccugcacuuagcaauagacagcgguuucccacauucuuccgcacucacccuagcgccacgcuccacaacccaacuagggucaaacuguucgagaagugggguuggaagaagaucgcaacuauccaacagacaacugagguguucaccucuacauuagacgaucuggaagagcgcgugaaagaagcugggauagagauuaccuuucgccagagcuucuucagcgacccagccguccccgugaaaaaucugaaacgacaggaugcucggaucauugugggucuguucuaugaaacugaggcucggaaaguuuuuugcgaaguguacaaggagagacuauuugggaagaaguaugucugguucuuaaucggcugguaugcagauaacugguuuaagauuuacgaccccagcauuaauugcacugucgaugagaugaccgaggccguggagggucauaucacuacggagaucgucaugcugaacccagccaauacaaggaguauuagcaauaugaccagccaggaguuuguugagaagcuuacgaagagauuaaaacggcaccccgaggagacggggggguuccaggaagcgccuuuggcauaugaugcuaucugggcauuagccuuagcacugaacaaaaccuccgggggagguggcagguccggaguucgccuugaggacuucaacuacaacaaccagaccaucacagaccagauuuaucgcgcuaugaacucuuccaguuucgaaggcgugucaggacaugucguguucgaugcuucggggagcaggauggccuggacucuaauugagcaacugcagggaggcuccuacaagaagauuggguacuacgauucuaccaaggacgauuugucauggucgaagacugauaaauggaucggaggaucuccuccugcggaucagacccuggucaucaaaaccuuucgcuuucucucccagaaacuguuuaucuccgucucagugcugagcucuuuaggaauuguucucgcuguugugugccugucauucaacauuuacaauucucauguaagguacauucaaaauucccagcccaacuugaacaaccuuacggccguggguuguucgcucgcccucgccgcaguguucccacugggacucgauggguaccauaucggcagaaaccaguuuccuuuugucugccaggccaggcuuugguugcuaggccugggauucucccucggguaugggucaauguucaccaagaucuggugggugcauacaguguuuacaaagaaggaggagaagaaagaguggcgaaaaacccuugaaccauggaaacucuacgccaccguaggccuccuaguggggauggacgugcugaccuuggcuaucuggcaaaucguggauccacuucacagaacgaucgagacguucgcuaaggaagagccgaaagaagacaucgauguuuccauacuaccacaacuugagcacuguuccagccggaaaaugaacacauggcuugguauauucuacggguauaaagggcuacuguugcuccuuggaaucuuucuugcauacgaaacaaaguccguuuccaccgaaaagauuaacgaucaucgagccguuggcauggccauauacaacguugcugugcucugccugauuaccgcccccgugacuaugaucuugucaucccagcaggacgcagcauuugcguucgcaucccucgcuauugucuucucaucauauauaacuuuagugguguuauuugugccuaaaaugcgaagacuuaucacucguggagaauggcagucugaagcccaagauacuaugaagaccggaaguucgacaaauaacaaugaggaagaaaagagccggcuucuugaaaaagaaaauagagaguuagagaaaaucauugcugagaaagaggaacgcguaucagagcugagacaccaauugcagucuaggcagcaacuccgcaguagaagacauccuccaacaccgcccgagccauccggcggucugccucgagggccucccgaaccacccgacaggcugagcugcgacggguccaggguccaucuucucuauaaauag

SEQ ID NO: 268925 - RNA, 2886 nt, Artificial Sequence
  derived and/or modified sequence
auguugcucuuacugcuucuggccccccuguuucugcgcccccccggagccggcggagcucaaacucccaacgcuacgagcgaaggcugucaaaucauccacccccccugggaaggcgguauucgguaucgaggcuuaacgagggaucaagugaaggccaucaacuuucugccaguggauuacgagaucgaauaugugugucggggcgaacgagaggucguugguccgaagguucgaaagugucuugcaaauggcaguuggacagauauggauacacccagcaggugugugaggaucuguucaaaaagcuaccucacacuugagaauggcaagguguuccugacagggggugaccuuccugcucuggacggagcuaggguagauuuucggugcgacccagauuuccaccuggugggguccuccaggucuaucugcagccaaggacaguggucuacgccuaaaccccacugucaagugaacagaacaccacauuccgagcgacgggccguguacaucggagcuuuauuuccaaugagcggaggauggcccggcgggcaagcaugucaacccgcugucgagauggcucuugaagauguuaauucaagacgcgacaucuugccugauuacgagcuaaaguugauacaucacgauucaaaaugugauccuggccaagccaccaaguaccuguacgaauuacuuuauaacgauccuauuaagauaauccugaugccaggguguagcucagugagcacacugguugccgaggcggcucgaauguggaaccugaucguuuuaucuuaugguagcucaagcccugcccucagcaaucgacagcgguuuccuacuuuuuucaggacccauccaucggcuacacuucauaauccuacaagaguuaaacuguuugagaaguggggcuggaaaaagaucgcuaccauccagcagacuaccgaagucuucacuagcacccuggacgaccuggaggagcgcgugaaagaggccgguaucgagaucacuuuccgacagagcuuuuucucagaccccgcagugcccgugaagaaucugaaaaggcaggacgcucgaauaauagugggccuguuuuacgaaacagaggcgaggaagguguucugcgaaguguacaaggagcgccuguuuggcaagaaauauguuugguuccuuaucgggugguaugcagauaauugguuuaagauauaugaccccagcaucaacuguacuguagacgaaaugacugaagcaguggagggacacaucacaaccgagauugugaugcuuaaucccgcgaauacuagaaguaucucaaauaugaccucccaggaguucguggagaaacugacuaaacguuuaaaacgccauccagaggagacgggcggcuuucaggaagcuccauuagccuaugacgccauuugggcucucgcgcuugcccuaaacaagacuucuggcggcggggggagguccggaguaagguuggaagauuucaauuauaacaaucagacuaucaccgaucagaucuaccgcgccaugaauagcucuaguuucgagggcguguccggccauguagucuucgaugcaucaggaucccggauggcauggacucugauugagcaacuucagggcgguucauacaaaaaaauuggcuacuacgauucuacuaaggaugacuuaaguuggucaaaaacugacaaguggaucggcggcaguccuccagccgaccagacucugguuauuaagaccuuucgguuccugucacagaaguuguucaucuccguuuccgugcuguccucucucggcaucguccuggccgucgugugccucagcuuuaauaucuauaauucccacgucagauauauccagaacucgcaaccuaaucucaauaaccugaccgcagugggaugcagucuggcacuugcagccguguuucccuuaggacuugauggauaccacaucggcagaaaccaguuuccauucgugugucaggcuagguugugguuauugggacucggcuucucccugggauauggcucaauguuuacuaaaauuugguggguccacacuguuuuuacuaagaaagaagagaagaaggaauggaggaagacgcuggaacccuggaagcuguaugccacugugggauuauugguggguauggauguccucacucuggccauuuggcagauagucgauccuuuacaccggacgauugagaccuuugccaaagaggaaccuaaggaagauauugaugugagcauccugccccagcuggaacauugcuccagcaggaagaugaauacaugguuagguaucuucuaugguuauaaaggguugcuguugcugcucggaauuuuucuggccuaugaaacaaagagugucaguacugagaaaauuaaugaccacagagccgugggcauggccaucuauaacgucgcgguccuaugccuaaucaccgccccaguuacuaugauccucagcagucagcaagaugccgccuuugcauucgcaagucuggcaauaguguucucuucauauaucacacugguuguuuuauuugugcccaaaaugaggaggcugauuacccgcggugaauggcaaagugaagcacaggacaccaugaaaaccggcagcucuacuaacaauaacgaagaagagaaaucccggcuauuagagaaagagaauagagaguuagagaagaucaucgcggagaaggaagaacgggugagcgagcugcgccaucagcugcagucuagacagcaguuacgcucuagacgccauccccccacaccaccugagccaagcggcggccucccuagaggaccgccugaaccccccgaucgucuaaguugugauggaagucggguacaccuacuuuauaaauag

SEQ ID NO: 268926 - RNA, 2886 nt, Artificial Sequence
  derived and/or modified sequence
augcucuuacuguugcugcuggccccccucuuccucaggccuccuggagcagguggcgcccagacuccaaacgcuacuucugaaggaugccaaauuauucacccaccuugggaaggcggaauccgcuaucgcgggcugacuagggaucaagucaaggccauaaauuucuugccaguugacuaugagauagaguauguguguaggggcgagagagaggucgugggaccuaaaguucgcaaaugccuugcuaacggguccuggacugauauggauacaccaaguagaugcgugagaauaugcagcaaguccuaucugacucucgaaaauggcaaaguguuccugacaggaggggaccuacccgccuuggacggagccagagucgacuuccggugcgacccggacuuucaccucgugggcaguucacguagcauuugcucccagggacaguggucuacaccaaaaccacacugccaggucaacaggaccccgcacagcgagcgccgagccgucuauaucggcgcacucuucccuaugucgggaggcuggccagggggacaggcuugccagccagcugucgagauggcccuggaggacgugaauagcagaagggacauccuacccgauuaugaauugaagcucauccaccaugacagcaagugcgacccgggucaggcgacaaaguaucuguaugaacuguuguacaacgacccuauaaagauaauccugaugcccgguugcucuaguguuucuacucuuguugccgaagccgcccgaauguggaaucugaucgugcugucuuacggcucaucuagccccgcacucucgaacaggcaacgguuuccaacauucuucagaacccaccccuccgcuacauuacauaacccgacucgcgugaaacucuucgagaaguggggcuggaagaaaaucgccacuauacaacaaacaaccgaggucuuuacgucaacccuugaugacuuggaagagagggugaaagaggccgggaucgagaucaccuucaggcaguccuucuuuagcgaccccgcagucccugugaagaaucugaaacggcaagaugcucgcaucaucgucggccuguucuaugagacggaagcacggaagguguucugcgaaguguacaaggagaggcuguucggaaaaaaguacgugugguuuuuaauugguugguaugccgauaacugguuuaaaauuuaugaucccaguauuaacugcaccgucgaugagaugacagaagcagucgaggggcauaucaccacggaaauuguuauguugaacccugcgaacacuagguccaucuccaauaugacaagccaggaauuuguugaaaaacugacuaaacggcugaaaaggcacccagaagaaaccggcggcuuccaggaggccccccucgcauacgacgccaucugggcauuggcucuggccuugaauaagacaucaggcggaggaggaaggucuggagucagacuagaagauuucaacuauaacaaucaaacuauuacagaccagauuuaucgcgcaaugaauucaagcucuuucgagggcgugucggggcacguaguguucgaugcuucuggaagcagaauggccuggacucuaauugaacagcuccagggggggaguuacaaaaaaaucggguauuacgauucuacgaaagacgacuugucguggagcaagacugauaaguggaucggaggaucgccgccugcugaucaaacacucguaauaaagaccuucagauucuugucacaaaaacuuuuuauuaguguuuccgugcuguccagccuggggauaguccuugcaguugugugcuugucauuuaauaucuauaacucucacgugagauacauccagaauucccagccuaacuugaauaaccuaacagcagucggauguagccuagcgcucgccgccguguucccgcuaggauuagauggcuaucacauuggccggaaucaguuccccuucguuugucaggccagguuguggcuccucggccugggguuuaguuuaggcuacggaucaauguucaccaagauaugguggguccacaccguauucaccaagaaggaggagaaaaaggaauggcguaagacccuugaaccuuggaagcuuuacgcuacagugggacugcucguuggaauggaugucuugacccuagccaucuggcagauugucgacccucugcauaggacuauagagacuuuugccaaagaggaaccaaaggaagacauugacguuuccauccuuccucagcuagagcacugcagcucccgaaagaugaauacauggcucggaaucuuuuacggcuacaagggauuacuguugcuccuggggauuuuuuuagcuuacgaaaccaagucugugaguaccgaaaaaaucaacgaucacagagcggugggaauggccaucuacaauguggcaguucugugcuugaucaccgcacccgugacaaugauucugaguucacaacaagacgcggccuucgccuuugccucccuugccaucgucuuuucuucuuacauuaccuuagugguucuguucguaccgaagaugagaagacucaucacuaggggggaauggcagucggaagcccaggauaccaugaagacuggcucuaguacuaacaacaaugaggaggagaaaagcagauugcuggagaaggagaaccgcgagcucgaaaagauuaucgcugagaaggaagagagagucagugagcuucgucaucaguuacagucucgucagcagcucaggagcaggagacacccuccuaccccaccggagccuucuggcggacuuccacgcggacccccugagcccccugaucgacugaguugugauggcucucgcgugcaucuucuguacaaauag

SEQ ID NO: 268927 - RNA, 2886 nt, Artificial Sequence
  derived and/or modified sequence
augcuccuucuccugcuucuggcuccauuguuucucaggccacccggcgcuggaggagcacagaccccaaaugccacauccgagggcugccaaaucauacauccccccugggaaggcgguaucagguaucgcggacugacccgagaucaggugaaagcgauaaacuuccugccuguggauuaugaaauugaauacguuugccgcggggagagagaggugguuggcccuaaaguuaggaaaugccuggccaaugggucuuggacagacauggacacacccaguagaugugugcgcaucugcuccaagucauaccucacgcuggaaaauggcaagguguuccucacaggaggcgaucucccugcauuagauggcgcgagaguggacuucaggugugauccggacuuccacuugguuggcagcagucgcagcauuuguucccagggccaauggaguaccccaaagccccauugccaggugaaccggacuccacacucagagaggagggcaguuuauauaggagcucuguucccuaugucuggagguuggcccggcggccaggcgugccagccugcuguagaaauggcccuggaagacgugaacucucgucgcgacauccucccggacuaugaacuuaaacuaauccaccacgacucaaaaugugauccuggccaagccaccaaguaccuguacgaguuacuuuacaacgaucccaucaaaaucaucuugaugccuggcuguagcagcgugucuacacugguugcugaagccgcucggauguggaaucugauaguauuaagcuacgguuccagcucccccgcucuuagcaacagacaaagauuucccaccuucuuccgcacucaucccucugcaacccuccacaaccccacucgcgucaagcuguucgagaaguggggauggaaaaagauugccacuauccagcagacaacugagguauucacuucuacacuggacgaucuggaggaacgcguaaaagaggcagggauugaaauuacguuccgucagucauuuuucucugaccccgcagugccaguaaaaaaccugaagcggcaggacgcacgcauuauagucggacuguuuuaugaaacggaagcacggaaaguuuucugugaggucuauaaggaaagacuguucgggaaaaaauaugugugguuucugauagguugguacgcugauaauugguuuaagauuuacgaucccuccaucaauuguacuguggaugaaaugaccgaagccguagaaggucacauuacuaccgaaauugugaugcuuaauccugcuaauacuagguccauuucaaauaugaccucacaggaguucguggaaaaacuuaccaagcggcugaagcggcaucccgaggagaccggaggguuccaggaggcccccuuggcuuaugacgcgauuugggcccuggcccuggcucuaaauaaaacuagugggggcggcggaaggucaggugucaggcuggaggauuuuaauuauaacaaucaaacgauaaccgaucagaucuauagggccaugaauuccucuucauucgaggggguguccggccaugucguauuugacgcaagcggaucccguauggcauggacucucauagaacagcuccaaggcggcuccuacaagaaaauaggauauuaugacucuacaaaagaugaucucaguugguccaagaccgauaaguggaucggcggaucuccuccugcggaucagacccuugugauuaaaacuuuuagguuucucagucagaagcuguuuauaagcgugucaguucuaucuagucuaggaaucgugcuggccguggugugccugagcuuuaacauuuauaauucucaugugagguauauucagaacucccagcccaaucugaacaaucucaccgcugugggcuguagccuggcccuggcugcuguuuuuccuuuaggauuggaugguuaccacaucgggagaaaccaauuucccuucguuugccaggccagacucuggcuccugggccuagguuuuagucucggauacggcaguauguucaccaagaucugguggguccacacaguguuuacgaagaaggaagaaaagaaagaauggagaaaaacccuggagcccuggaaacucuacgccaccgugggccuauuagugggcauggacguguuaacccuggcaaucuggcaaauaguugacccacugcaucggaccauagagaccuuugcaaaggaggagccuaaagaagauaucgacguuagcauccuuccucaacuggagcacuguucaagucggaaaaugaacacauggcuuggaaucuucuacggauauaaagggcuucugcugcuccuaggcaucuuccuugcguacgaaacgaagagcgucagcacagagaagauuaacgaucaucgugcuguugggauggcaaucuacaacguggccguacucugucugauaacugcccccguaacaaugauauugaguucucagcaggaugcagccuucgccuucgcaucccuggcgauuguguucagcagcuacauuacucuaguggucuuauucguccccaagaugaggcgucucaucacacgaggggaauggcaaagugaagcucaggacacuaugaagacagguuccagcacaaacaauaaugaggaagagaagagccgccuauuagagaaagagaaucgggaacuugagaagauaauugccgaaaaagaagagcggguuagcgagcuuagacaucaacugcagucccgccaacaguugaggagccgucgccacccgccaacaccuccugaacccagugggggucucccacggggcccaccggagccgccugacagacugucaugugacggcucucgaguacaccugcuuuauaaauag

SEQ ID NO: 268928 - RNA, 2886 nt, Artificial Sequence
  derived and/or modified sequence
augcuccuucuguuacugcuggccccucuauuucuuagaccuccuggggcaggaggcgcccaaaccccuaacgccacaucugagggcugucagauuauccauccucccugggagggaggcaucagauacagaggccuuacucgggaucaggugaaggcuauuaacuuccugccuguugacuaugaaauagaauauguaugccgaggggaaagagagguaguaggcccaaaaguaagaaaaugccuugccaacggcaguuggacagacauggauacgccaucgagauguguaaggauuuguagcaaaucauaccuuacccucgagaauggcaaagucuuccugacagggggggaucuuccggcguuggacggcgcuagaguggacuuuagaugugacccggauuuccaccuuguuggaucgagccgcagcaucugcagucaagggcaguggucaacaccuaaaccacacugccaggucaauaggaccccacacucggagaggcgggcaguguauaucggagcccuguuuccaaugucuggcggcuggccaggcggacaggcaugucagccagccgucgagauggcucuggaagacgugaauagccgcagagauauucugcccgauuaugaacuaaaauuaauccaccacgacucuaaaugcgauccagggcaagcgaccaaauaccuguacgaacugcuguauaacgauccuaucaagauuauccuaaugcccggcuguaguuccgugagcaccuugguggccgaggcugcuaggauguggaaucugauuguccuguccuauggcagcaguuccccggcccugucuaaucgucaacgcuuccccaccuuuuuuagaacccauccauccgcuacucuucacaaucccacgcgcguuaagcucuuugaaaaguggggguggaaaaaaauugcgacaauucagcagacuacggagguguucaccagcacacuagaugaucuggaggaacgaguuaaagaggcugguaucgagauaaccuuucgucaaucuuuuuucuccgauccggcuguaccuguuaagaaccuaaagcggcaggacgcacggauuauugucggauuguuuuacgagacagaagcacguaagguuuucugcgagguguauaaagagagacucuucgguaagaaauauguuugguuccugaucgguugguacgcugacaacugguuuaagaucuacgauccaucaaucaacugcacuguggaugagaugaccgaggcggucgagggucauauaacgacggagauugugaugcuuaaccccgccaauacuagaucuaucuccaauaugaccagccaggaguuuguagagaagcugacuaagcgcuugaaaagacacccugaagagacaggaggguuucaggaggcaccgcucgccuaugacgcaaucugggcccuggccuuggcccuaaacaagacaagcggcggcggcgggcggagcggcgugcgacucgaagauuucaauuacaacaaccagaccaucaccgaccagaucuaucgagccaugaauucuucuucuuuugagggggugucugggcacguaguguucgaugcgucaggaucccguauggccuggacucugaucgagcagcuccagggggguaguuacaagaaaauuggauauuacgauagcacuaaagaugauuugagcuggagcaagacggauaaguggaucgggggcagcccuccggcagaccagacacuggugaucaagacuuuccgguuuuuaucacaaaagcuauucaucuccguaucggugcuguccagccuggggauugugcuggccguggucugccucucuuuuaacauauauaacagccacgugagauauauccagaauucucagccuaaccuuaacaaucugaccgccguaggauguucccuagcccucgcugcagucuuuccccugggacuggauggauaccacauaggucggaaucaguuucccuucgugugucaggcaaggcuguggcuucuuggccugggauucuccuugggcuacgguucuauguuuacaaaaauuugguggguucauaccguguuuacaaagaaggaggagaaaaaggaguggaggaaaacccuggagccguggaaauuguacgcuacagugggcuugcuggugggaauggacguguuaacgcuggccaucuggcaaaucgucgaucccuuacaucgcacgauugagacuuucgccaaggaagagcccaaggaagauauugacgugucgauccugccucaacuagagcauugcuccagccgaaagaugaacaccuggcuggggauauuuuacggguacaaaggacugcugcuucugcucggaaucuuccuggcuuacgaaacaaaauccgucucaacagaaaaaaucaaugaucaccgcgcaguggguauggcuauuuacaacgucgccguccucugccugauaacagcacccgugacuaugauucugucuagccagcaggacgcagccuuugccuuugccucacuagccaucguguucaguuccuacaucacacuugucgugcuguucgugcccaagaugcgccgacucauuacucgcggagaauggcaaagcgaggcgcaggacacaaugaaaaccgguucaucaaccaauaauaaugaggaggagaaaucaagacugcucgagaaagaaaaccgcgaacuugagaaaaucaucgcugaaaaagaggaaaggguguccgaacuaagacaucagcuucaaucccggcagcagcugcgcagcaggcggcauccuccuacuccuccugagccaagcggcggacugccccggggucccccugagccacccgaccgguugucgugcgauggaucccgcguccaccugcuguauaaauag

SEQ ID NO: 268929 - RNA, 2886 nt, Artificial Sequence
  derived and/or modified sequence
auguugcugcuccuccugcuggcuccgcuguuucuuagaccacccggggcaggcggggcccagaccccaaacgcgacauccgaagguugccagauaauucacccuccuugggaaggaggcauucgguacagaggacugacgagggaccaaguuaaggccaucaauuuucugcccguagacuaugagaucgaauacgugugccggggcgaacgcgaaguagugggaccaaaagugagaaaaugucuggcuaauggcuccuggacagacauggauacacccaguagaugcgugagaauuuguucaaagaguuaccucacucuggagaacggcaaaguguucuuaacaggcggggaucuucccgcauuggacggcgcccgaguugauuuccguugcgaccccgacuuccaccuuguggggucuucccgcucaauuuguagucagggccaguggucaacgccaaaaccucacugucagguaaaucgaacaccacacuccgaacggagagcugucuacaucggagcacucuucccaaugagugguggcuggccugggggacaggcaugucagcccgcaguagaaauggcgcucgaagacguuaacagcagaagagauauucucccggauuaugagcugaagcugauucaccaugauaguaagugugaucccgggcaagcuacgaaguaccucuaugagcuucuuuacaacgauccuauuaagauuauacucaugccaggcugcucuuccguaucuacgcucguagcagaggccgcacgcauguggaaccuaauuguucuguccuacggaucgucaucgccagcgcugagcaacaggcagcgauuucccacuuucuuccgcacccaccccucggccacacuacacaaucccacgagagucaaacucuucgagaaguggggguggaagaagauagcuaccauacagcagaccacugaaguauucacaucuacccucgacgaucuggaagaacgggugaaggaagcugguaucgagaucaccuuuaggcaaucuuuuuucagcgacccggcaguacccguaaagaaccuaaagagacaggacgcccggauuaucgugggauuguucuaugaaacugaagcuaggaaggucuucugcgagguuuacaaagagcgccucuuugguaagaaguaugucugguuccugauuggcugguacgccgacaacugguucaaaauuuaugauccaucuauuaauugcacagucgaugaaaugacagaagcaguugaggggcacaucaccacggagaucgugaugcucaaucccgccaacacaagaagcauuuccaauaugacgucccaagaguuuguagaaaaacuuacgaagagauugaagcgccaucccgaggagacgggugguuuucaggaggcuccccucgcauacgacgccaucugggcuuuggcgcuggcucugaacaagaccagugguggaggaggaagguccggcgucagacuagaagacuuuaacuacaauaaucagaccauaacagaccagaucuaccgggccaugaauagcagcaguuuugagggggugagcggucacgugguguuugacgccucaggcucacggauggcauggacacugauugagcagcugcagggcggcagcuauaaaaaaaucgguuauuaugacaguacuaaagaugaccucagcuggucaaaaacagacaaguggauaggcgguucacccccagccgaccagacacucgugaucaaaacauuccgguuccuaucacagaaacucuuuaucagcgucagcgugcugaguuccuuggggaucguccuggcggucgugugucugagcuuuaauaucuauaauucccacguccgcuauauccagaacagccagccuaaccugaauaaucuuaccgccguagggugcucccuggcuuuggcagcaguuuuuccuuuaggacucgacggguaccauauuggaagaaaucaguuucccuuugugugccaagcccguuugugguuacuaggacucggguuuucccugggauacgggucuauguucacuaagauuugguggguccacaccguauuuacuaaaaaggaggaaaagaaggaguggagaaagacuuuggagccauggaagcucuacgcuacugucgguuugcuagucgguauggauguacuaaccuuggccauuuggcagaucguggauccccuccauagaacaaucgaaacguucgcuaaagaagagccuaaggaagacauugacgugagcauauugccccaacuggagcauuguaguaguaggaaaaugaauacauggcugggcaucuuuuauggcuauaaggggcuguugcuccugcuuggcaucuucuuagcguacgagacgaagagcgugucuacugagaagauuaacgaccauagggccguagguauggccauuuacaauguggcugucuuaugccuuaucacagcuccagugacuaugauauuaucaucucagcaggaugcagccuucgcuuucgccucucuggccauaguguucucuucuuacauaacgcugguuguccuauucgugccuaaaaugaggcgguugaucaccagaggcgaauggcagagugaggcucaagauacuaugaaaaccgguucaucuacuaacaauaacgaagaagaaaaguccagauuguuggagaaggagaaccgggagcucgaaaagaucaucgccgagaaagaagaacgcgugucugagcugaggcaccagcuccagucgaggcagcagcuaaggucucgacggcacccaccaaccccccccgaaccuaguggcggccuuccacggggaccucccgagccuccugauagacuuagcugugaugggucuagagugcaucuucuguacaaauag

SEQ ID NO: 268930 - RNA, 2886 nt, Artificial Sequence
  derived and/or modified sequence
augcuguuacuccugcugcuggcaccuuuguuucuucguccuccaggagccggcggugcccagacacccaaugccacuucagaggguugucagauuauucauccuccaugggaaggaggaauucgguauagaggucugacucgugaucaggugaaagcuauuaacuuccugccagucgacuacgagauugaauacgucugcaggggcgagagagagguagugggccccaaagugcggaagugccucgcuaacggcucuuggacagauauggauacccccucacgaugugugcguauaugcuccaagucauaccuuacccucgagaaugguaaaguuuuccugacaggaggagaccuucccgcccucgauggcgcucgcguagauuuccggugcgaccccgacuuccacuuaguagguagcucucgauccaucuguucacaggggcagugguccacccccaaaccucacugucaagucaauaggacaccacacagcgaacggcgcgcugucuacaucggggcacucuuccccaugucuggcggauggcccgggggucaagccugccaacccgccguggagauggccuuggaagauguaaauagccggagagacauccuacccgauuaugagcugaaauugauucaccaugacaguaaaugcgauccuggccaggcaacaaaguaucuguaugagcugcuuuacaacgacccaauuaaaaucauccugaugcccggcugcucuagcguguccaccuuagucgcagaagcagcacguauguggaaccucauuguccucagcuauggcuccucaagccccgccuuguccaaccgccagagauuucccacuuucuuuagaacacacccuagugcuacgcuccacaacccaacuagagugaagcuguucgagaaguggggcuggaaaaaaauugcuacaauacaacagacuacggagguuuucacaucuacucuggaugaccuggaagaaagggugaaggaggcagggauugagaucacuuucagacaaucuuucuuuagugaccccgcuguacccgucaaaaaucugaaacggcaggacgcccgaaucauaguugggcuguuuuacgaaacugaggcccggaaggucuuuugugaaguguacaaagaaaggcucuucgguaagaaauaugugugguuccuaaucgggugguacgcagacaacugguucaaaaucuaugauccuucaaucaacuguacuguugaugaaaugacugaagccguugaagggcauauuaccacagagauugucaugcugaauccagcuaacacaaggucuaucucgaauaugacaagccaggaguucguugagaaacucacaaagcgacucaaaagacacccugaggaaacuggcggauuccaagaggccccauuggcuuacgaugcaaucugggcucuggcucuagcguuaaauaagacuagcgggggaggagggaggucaggggugaggcuagaggacuucaauuauaacaaucagacuaucaccgaccagaucuaccgggcaaugaauagcagcaguuucgaaggcgugagugggcauguaguauucgaugccagcggcagccgaauggcuuggacacuaauagaacagcuucagggcgggucuuacaagaaaaucggcuacuaugauucuaccaaagacgaccuuucauggucuaagacugauaaguggaucggcggcagccccccagccgaccagacacucguaaucaagacguuuagguucuugucgcaaaaacucuucauuagugugagcguacuguccucauuaggaauaguccucgccgugguuugccucagcuuuaacaucuacaacagucauguuagauacauccaaaauucacagccaaacuuaaacaaccuuacagccgugggauguagccuugcucuugcagcaguuuuuccccuaggacuagauggguaucauauugggcguaaccaguuccccuuugugugucaggccagacuguggcuauugggcuugggcuuuucauugggcuacggcagcauguucacaaaaauaugguggguccacaccgucuuuacuaagaaagaagaaaaaaaagaguggcgcaagacccuugaacccuggaagcuguaugcuaccgugggccuacucguagggauggacgugcugacacuagccauuuggcagauagucgauccuuuacaucgaaccauugaaacauuugcaaaggaagaacccaaagaagauauagaugugaguauccuaccacaguuggaacauugcucuucuagaaagaugaauacauggcuggggauuuucuacggcuacaagggauuacuguuacuacuggggauauucuuagcguacgaaacgaaauccgugaguacugaaaagaucaaugaucaucgcgccgucgguauggccaucuauaaugucgcuguucuguguuugaucaccgcgcccgugaccaugauccucaguucccaacaggaugccgcauuugcuuuugccucccucgccauuguguucagcucauacauaacacucgugguccuguuugucccgaagaugcggaggcugauuacccguggagaguggcaguccgaagcgcaagauaccaugaaaaccggaagcucuacaaauaauaaugaagaagagaagagucggcucuuggagaaggagaaccgugagcuagaaaaaauuauugccgagaaagaggaacguguuucggagcucagacaucagcuccagucccgacaacagcugcgaucccgaagacacccacccacuccgccagaaccguccggaggcuuaccacguggaccaccagagccaccagacagacuuucaugugauggaucaaggguccacuugcuguacaaauag

SEQ ID NO: 268931 - RNA, 2886 nt, Artificial Sequence
  derived and/or modified sequence
augcuacuuuuacuccuacuggcucccuuauuccugcgcccgcccggggccggaggugcccagacgcccaacgccacuucugaggguugucagauaauacauccgccaugggaaggaggcauucgguacaggggucugacacgcgaucagguuaaagccaucaauuuucuccccguagauuaugaaauugaguaugugugccgcggcgaaagagaggucguugguccuaaaguucggaaaugucuggcgaauggcucuuggacugacauggauacuccgagcagaugcguucggaucuguuccaaaucuuacuugacccuggaaaacggaaaagucuuucucacaggcggcgaccucccugcucuggacggcgcgcgcguggacuucagaugugaccccgauuuucaccuuguagguagcucgagaagcauuuguagucaaggccaguggucuaccccgaagccucacugucagguuaacagaacuccacacagcgagagacgcgccguuuauauuggggcacuguucccuaugucuggcggcuggcccggcggccaggcuugucaacccgccguggagauggcacuggaagaugugaauagcaggagagauauauuacccgacuacgaacugaaguuaauucaccaugacaguaagugcgauccuggacaggccacaaaauaccuguacgaacuguuauauaacgaucccauuaagauaauacugaugccagguugcucuuccguuuccacccuggucgcugaggcagcucgaauguggaaccugaucguacuuucuuauggaucuuccuccccggcccucagcaaucgccagcgauuucccacauuuuucagaacccaccccucugccacacugcacaauccaacacgagugaaacucuuugagaaauggggcuggaaaaaaaucgcaacgauucagcagacgaccgaaguguuuacaaguacccuggacgaccuggaggaaagaguuaaagaggccgggauagagaucaccuuccgccagucguuuuucagugaucccgccgucccuguuaaaaauuugaagcggcaagaugcucgaauuaucgucgggcuguucuacgaaacagaggcgcgcaaaguuuucugcgagguuuauaaggagagacucuucgggaaaaaguacguuugguuccugauaggcugguaugcugacaauugguucaaaauuuaugacccuagcaucaacugcacuguggaugaaaugacggaggccgucgaagggcauauuaccacugaaauugucaugcucaacccagcuaauacccgcucaaucuccaauaugacaucccaagaauuuguggaaaagcugaccaaacgucucaaaaggcaucccgaggagaccggcgguuuccaagaggcaccacuugcuuaugaugcaauaugggcucuggcuuuggccuugaacaaaacaagcgggggaggaggaagaucuggcgugcgucuggaggauuuuaacuauaauaaucagaccauuaccgaccagauuuaccgagcuaugaauucuucguccuuugaggguguguccggacacgugguguuugaugccuccggcucuagaauggcauggacccuuauugagcaacugcagggugggucuuacaagaaaauugguuacuacgacagcacaaaagaugaucuaucuuggucuaagaccgacaaguggauaggagggucaccacccgcugaccagacucugguaaucaagacauuccgcuuccugagucaaaaacuguucauuagcgugucuguucuuucuagccugggcauugugcucgcugucguuugccuaagcuucaacaucuacaacucccauguucgcuauauccagaacucucagccaaaucuaaacaaucuuacagcaguuggguguucucuugccuuggcagccguguuuccucucggccuggacggguaccacaucggccgcaaccaauucccuuuugugugucaagcuagacucugguuauuaggcuugggguuuucucuggguuacggguccauguuuacuaagaucugguggguccauacaguuuucacuaagaaggaagaaaaaaaagaauggagaaaaacgcuugaacccuggaaguuguaugccacagucggacuguugguggguauggaugucuugacucuugcuauauggcagaucguggauccccugcacaggacaaucgagacguuugcaaaagaagaaccgaaggaagauauagauguguccauacucccucaacucgaacauugcucaucucggaagaugaauacuuggcucggaauuuuuuacggauauaaaggacuguugcugcugcuggguaucuuccucgcuuaugaaacaaaaagugucucuacggaaaagaucaacgaucaucgagccguuggcauggccauauacaacguugcugugcucugccugauuaccgcccccgugacuaugaucuugucaucccagcaggacgcagcauuugcguucgcaucccucgcuauugucuucucaucauauauaacuuuagugguguuauuugugccuaaaaugcgaagacuuaucacucguggagaauggcagucugaagcccaagauacuaugaagaccggaaguucgacaaauaacaaugaggaagaaaagagccggcuucuugaaaaagaaaauagagaguuagagaaaauuaucgcagagaaggaagaacgugucuccgaguuaagacaccaauugcagucuagacaacagcugaggagccgccggcauccacccaccccaccugagccaaguggaggauuaccacgaggcccuccugagcccccugaccgccuguccugugacgggucacgcgugcaucugcuuuauaaauag

SEQ ID NO: 268932 - RNA, 2886 nt, Artificial Sequence
  derived and/or modified sequence
augcuucuguugcuucuccucgcacccuuguuuuugagaccaccuggcgcgggcggcgcccaaaccccaaacgcgaccagugagggcugucagauuauccaucccccaugggagggugguaucagguacagaggauugacuagggaccagguaaaagcaauaaauuuccuucccguagauuacgagaucgaguacguaugccgaggugagagggaggucgucggcccuaaagucagaaaaugucuugcgaacggauccuggacagacauggauaccccuucucgcugcgugaggauuugcaguaaaucuuaccugacccucgaaaauggcaagguuuuucuuacggggggugaucucccugcuuuggauggcgcacgaguggauuuuagaugugacccggacuuucaccuggugggaucgucgcgcagcauuugcucucagggacagugguccacuccaaaaccucacugucaggucaaucgcacaccacacuccgaacguagagcggucuauauuggagcacuguucccaauguccggcgguuggcccgguggucaggccugccaaccagccguugaaauggcacuugaggacguaaacagcaggcgagauauacugccugacuacgaauugaagcugauccaccaugauagcaaaugugaccccgggcaggccaccaaauaccuguacgaauugcuguauaaugaucccauuaaaauuauccugaugcccggauguuccucugugaguacccugguugccgaagcggcucggauguggaauuuaaucguguuaaguuauggaucaagcagcccagcucuuucuaaucgccagcgauuucccaccuucuuucggacccaccccagcgcuacucugcacaacccuacccgaguaaaacuguucgaaaaauggggguggaagaagaucgcgacaauucaacagacaaccgagguuuucacaaguacacuggaugaucuggaggaaagagugaaagaagcuggaauugagauuaccuuuaggcaguccuuuuuuagugauccagccguuccagugaaaaaccugaagagacaagacgcccgaauuauugugggcuuguucuaugaaaccgaagcuaggaaaguuuuuugcgagguguauaaggagcgacuguuuggaaagaaauaugugugguuucugaucgggugguacgcugauaacugguuuaaaaucuacgaucccuccauuaacuguacaguggaugagaugacagaagcaguugagggccauauuacuacagaaaucgugauguuaaacccugccaacacaaggaguauuaguaauaugacaagucaggaauuuguugagaagcuaaccaaacgcuugaagagacauccugaggagaccgggggauuccaggaagcaccuuuggccuacgacgccaucugggcccuugcucuggcacugaauaaaaccagcggaggaggagguaggucaggaguucgguuagaggacuuuaacuacaauaaccagaccauuaccgaccaaauauauagagcgaugaacucgagcucauucgagggaguuucggggcaugucguauuugaugcauccggcagucgcauggcauggacccucaucgagcaacugcaaggcgguuccuacaagaaaauuggcuauuaugauucaacaaaagacgaucucaguugguccaaaacagauaaauggaucggcgguucucccccugccgaccagacuuuggucaucaagacauuccgguuucucagucagaagcuguuuaucuccguaagcguucuuuccucccuuggaaucguucuggcugucguaugccuuuccuuuaauaucuacaauagucacgugcguuauauucaaaauucacagccuaaccuuaacaaccucacugccgucgggugcucucuugcucuugcugcaguuuuuccccugggucucgacgguuaccauaucggccguaaucaguuucccuuuguaugccaggcucgacuuuggcugcuuggauugggcuuuucacugggcuacggcuccauguucacuaaaauuuggugggugcacacgguuuuuacuaagaaggaggagaagaaggaguggcggaagacacuugagcccuggaaauuguacgcaaccgugggauuauuaguggggauggaugugcugacccucgccauuuggcagauuguagaccccuugcaucggacuauugagacuuucgcuaaggaagaaccgaaagaagauaucgaugucucuauucucccucaacuggaacauugcagcucccgcaaaaugaacacguggcucgggauuuucuauggauauaaaggcuuguuacugcuguugggaauauuuuuggcauacgagacaaaaucagugagcacggaaaaaauuaaugaucacagggccgucggcauggcgaucuauaacguggcugucuuaugccuaauuaccgcacccgugacaaugauacuguccucccaacaggaugccgcauuugcuuucgccucucucgccauagucuucucgaguuauaucacccugguagucuuguucgugcccaaaaugcggcgguuaauuacgaggggggaauggcaaucugaagcucaggacacaaugaaaaccggaucaaguacgaauaacaaugaagaagaaaaaucaagacugcuggagaaggagaaucgggagcuugagaagaucaucgcagagaaggaggaaagaguaagugaacugcgucaccagcuucagagucggcagcaacuuagaucuaggagacaucccccuacccccccagaaccaucaggugggcugccucgaggcccacccgagccccccgaucgacuuagcugugacggaucccgcgugcacuuguuauacaaauag

SEQ ID NO: 268933 - RNA, 2886 nt, Artificial Sequence
  derived and/or modified sequence
auguuguuacuccuccuguuggcaccacuguuucugcguccaccuggagcaggcggagcccagacccccaacgcuacuagugagggaugccagauuauucaccccccaugggaaggcggaauuagauaccgcggccugacgagagaccaggugaaagcuauuaauuuccuccccguggauuacgaaaucgaauacgucugucgaggcgaacgggagguugucggacccaagguuagaaagugccuggcuaauggaucauggacugauauggauacccccucuagaugugugaggaucugcagcaaaagcuacuugacacuggagaauggcaaaguguuucugacgggaggagaucugccggcacuagacggggcgcgcgucgauuuuaggugugacccugacuuucacuuagugggcagcagccgcucaauuugcucacagggccagugguccacacccaagccccauugccaggugaacaggaccccucacuccgaacgucgugcugucuauaucggugccuuauuccccaugagugguggcuggcccggcggacaggcaugccaaccggccguagaaauggcucuggaggauguuaauucuagaagagauauacuuccugacuaugaacuuaaauugauccaccacgauagcaaaugcgauccaggccaagcuacaaaauaucuguacgagcugcuuuacaacgacccuauuaagauuauucucaugcccggauguaguucuguaucuacucugguagcagaagccgcucgcauguggaaucucaucguccuuucuuaugguucaagcucacccgcucugaguaacaggcaacgcuucccaacuuuuuuccgcacccauccuagcgccacacugcauaacccuacccgggucaagcucuucgaaaaguggggauggaaaaaaauugcaaccauucagcagacaacugaaguuuucacuagcacacuugacgauuuggaggaacggguuaaagaagcuggaaucgaaaucacguuuagacagucguuuuuuucugacccagcggugccugugaagaaucuaaaacggcaggacgcaaggauuauaguuggguuauuuuaugaaacagaagcccggaaaguguuuugugagguuuacaaagagagacucuucggaaagaaauacgugugguuccugaucggcugguacgcggauaacugguuuaaaauuuaugacccuaguauuaacugcacaguggacgaaaugacugaggcuguagaaggucauauuacgacagagaucguuaugcucaacccugcaaauacccgauccauuuccaacaugaccucccaagaauuuguagaaaagcugacgaaacgccucaaacggcauccagaagaaaccggcggauuccaggaggccccucucgcguacgacgcuaucugggccuuggcuuuggcacugaauaaaaccagcggugguggcggaagaucuggcgugagguuggaggacuuuaauuacaauaaccaaacuauuacugaucagauuuaucgcgcaaugaauuccagcuccuucgagggcguuaguggccacguagucuucgacgcuuccgggucucgcauggcuuggacgcucauugagcaguugcagggagguucauacaaaaaaauaggauacuacgacaguacuaaagacgaucuuaguugguccaagacggacaaauggauaggcggauccccacccgccgaucagacccuggucauaaaaaccuuuagauuuuuaucacagaaauuguuuauuagugucagugugcucucuucucugggaauuguccuagccguuguuugucuguccuuuaauauauauaacucccacgugcgguauauccagaauagucagcccaacuugaacaaucuuacggccguagguuguagucuggccuuagcggcaguuuuuccccucggacuugauggcuaucauauugggcggaaucaguucccauucgucugccaagcuaggcucuggcugcugggauuggguuuuucguuaggcuacggaucgauguuuaccaaaauuuggugggugcauacagucuuuacaaaaaaagaagaaaagaaagaguggagaaaaacgcuggaaccuuggaaguuguacgcgacaguuggccuucucguuggcauggauguacugacccuugcaauuuggcaaauaguggacccucugcaccgcacuaucgaaacuuucgccaaggaggaaccuaaggaagauaucgacgugucaauccucccacaacucgagcacugcucuagccgcaaaaugaauaccuggcuggggaucuuuuacggauauaaaggacugcugcugcugcucggaauauucuuggcauacgaaacgaaaucagugaguacagagaaaauuaacgaucaucgggccgugggaauggcuauuuacaauguugccguuuuaugcuugaucacugcuccugugacuaugauccuaagcucccagcaggaugcugcguuugcuuuugccucccuugcuauugucuucuccucauacaucacgcuggucguucuauucgugcccaagaugagacgacuaauuacuaggggcgaauggcagagcgaggcucaggacacaaugaaaacaggcucaucgacuaauaauaacgaggaagaaaaauccagacuguuagaaaaagagaaucgcgaacucgaaaagaucauugccgagaaggaagagaggguaucagaacugaggcaccagcuacaaucccgacaacaguuacgcucaaggcgccaucccccuaccccgcccgaaccgucagguggccugccccgaggaccucccgagcccccagaccgccuuuccugugauggcucccgcguccacuugcuguacaaguag

SEQ ID NO: 268934 - RNA, 2886 nt, Artificial Sequence
  derived and/or modified sequence
auguuguuacugcuucugcuagcuccauuauuccugagaccacccggggcagggggugcccagacucccaacgcuacaucugaagguugccagauuauucauccuccaugggaaggcgguauucgauacagagggcucacccgcgaccaggugaaagcuaucaacuucuuaccuguugauuaugagauagaauauguuugccggggagagcgagaaguggucggccccaaagucaggaagugucucgcuaauggcuccuggaccgacauggacaccccuagccggugugugaggauauguaguaaaucauaccugacucuagagaacgguaagguguucuugacugguggggaucuaccagcccuggauggcgcuagagucgauuucagaugcgaccccgauuuucaccucgugggauccagucguucuauuugcucucagggacaguggucuacuccaaagccgcacugucagguuaaucgcaccccacauuccgagagacgagcgguuuauaucggggcccuuuuccccauguccggaggauggccgggaggccaggcuugccaaccagcaguagaaauggcccuggaggaugugaacucgaggcgagacauucucccagauuacgaacugaaauugauccaccacgacucuaaaugugaucccgggcaggccaccaaauaucucuaugaacuccuguacaaugacccgaucaaaauaauacucaugccugggugcagcagcguaaguacacuuguugccgaggcagccagaauguggaaucucauuguccucucguauggcucaucuucgcccgcgcucucuaauaggcaaagauuuccaacuuuuuuuaggacucaccccucagcuacccugcacaaucccacacgggugaaacucuucgaaaaauggggcuggaaaaaaaucgccacgauacagcagacuacggaaguuuucacauccacucuagaugaccuggaggaacgugucaaagaagccggcaucgagauuacauucagacaaucauucuucucugacccagcagucccaguuaagaaucucaagcggcaagaugcgcgaaucauuguagguuuauucuacgagacggaggcaagaaaaguuuuuugugagguguauaaagagagguuguucgguaaaaaguacgugugguuccugauuggcugguaugcugauaacugguuuaaaaucuaugauccgucaaucaauugcaccguugacgagaugaccgaggcuguagagggccauauaacgacagaaaucgucaugcugaaccccgcaaacacacguaguauuucuaauaugacuagucaagaauucguggaaaaacugacaaagcgacuuaagagacauccugaagagaccggaggauuucaagaggcaccccucgcauaugacgcuauuugggcgcuggcccucgcucuuaacaagacguccggcggcggaggccguucaggagugagacucgaggacuucaauuauaauaaucaaaccauuaccgaucagauuuacagggcuaugaacaguucaaguuucgagggaguuuccggccaugugguuuucgaugccagugggucacggauggcauggacccuuaucgagcagcugcagggcggcucuuacaagaaaaucggcuacuacgacucuaccaaagaugaccuguccuggucaaaaacagacaaauggaucggagggagcccaccagcagaucagacccuuguuaucaaaacauucagguuccucucacagaagcucuucaucucagucaguguccucagcagccugggcaucguucuggcgguggugugucugucauucaacaucuauaacucacacguucgguacauucagaacucccagcccaaucuuaauaaucucaccgcaguuggaugcucucucgcguuggccgcaguuuucccucucggacuggacggauaucauauaggaagaaaucaauuucccuucgugugucaagcucgacuuuggcuccucgggcugggcuucucuuugggcuacgguaguauguucacuaagauuugguggguccacaccguguuuacuaaaaaggaggagaaaaaagaauggcggaaaacucuagaacccuggaagcuguacgcaacuguuggauuacuuguagguauggacguguuaacccuugcuauauggcagauagucgacccauuacaccggaccauugagaccuucgcaaaagaagaacccaaagaagauauugaugugaguaucuuaccacagcuagagcacugcaguucccguaaaaugaauacaugguuagggaucuuuuaugguuacaaaggacugcuacucuugcucggaauauuccuugccuacgaaacuaagucagugagcacugagaagaucaaugaccacagggcggucggaauggcaaucuauaaugucgccgugcucugucuuaucacagcuccugucacaaugauccucuccagucaacaggacgcugcauucgcauuugccagucuggcgaucguuuucucuagcuauauuacacucguagugcuuuucguuccaaaaaugagacgcuuaauuacccguggggaguggcaguccgaagcucaagauacuaugaaaaccggcucuucuacuaauaauaaugaggaggaaaagaguagacuguuggaaaaggaaaaccgggaacuugaaaagaucauugcagagaaagaagaaagagugagcgaacuaagacaccaacuccagaguaggcagcagcuaagaagcaggcggcaccccccgaccccccccgaaccgagcggcggccugccacggggcccccccgaacccccagaccgacucucaugcgacggcuccagggugcaucuauuauauaaguag

SEQ ID NO: 268935 - RNA, 2886 nt, Artificial Sequence
  derived and/or modified sequence
augcugcugcuacugcuccuggcuccacuauucuuacgcccaccuggggcaggaggcgcccaaacuccaaaugcuacaagcgaaggcugucagauuauccaccccccuugggagggcgguaucagauaucggggguugaccagagaucaggugaaagcaauuaauuuccuacccguggacuaugagauugaguacgucuguaggggagagagggaagucgucggcccuaaagugaggaaaugcuuagcaaaugggucauggacugacauggauaccccaaguagauguguucgaaucugcucgaagaguuaccuuaccuuagaaaacgggaaaguuuuucugacagguggcgaucuccccgccuuagauggagcucggguggauuucaggugcgaccccgacuuucaucugguugggucuucuagaagcaucuguucacagggacaauggucaacuccuaagccacauugucaggucaaccgaaccccacauagcgagagaagggccgucuauaucggagcucucuucccaaugagcgggggcuggcccgggggucaggccugccagccggcugucgaaauggccuuagaagacguuaauucacgacgagauauucugcccgacuacgaacugaagcugauccaucacgauaguaaaugcgaccccgggcaggcuacuaaauaccuguacgaauugcucuacaacgauccaauuaaaauuauucucaugccuggaugcagcagcgucagcacccuugucgcggaagcugcacgcauguggaaccuaauaguccucucauacggcagcuccucuccugcacuuucuaauagacagcgguuuccaacguuuuuccggacccaucccuccgcuacuuuacauaaucccacccggguaaaguuauuugagaaauggggauggaaaaagaucgcaaccauucaacagaccacagaagucuucacaucuacccuugacgauuuagaggaaagagugaaggaagcaggaauagaaauaacauuuagacaguccuuuuucagugaucccgccguuccaguaaagaauuuaaaaaggcaagaugcccggauaauagugggauuguucuacgagaccgaggcacgaaaaguuuucugugagguguauaaggagcgacucuucggcaaaaaguacgugugguuccugauugggugguaugcggacaacugguucaaaaucuaugacccuucaauaaacugcacaguggaugaaaugacugaggcuguagaaggucauauuacgacugagauuguaauguuaaauccugccaacacacgaaguaucagcaacaugacgucacaggaauuuguggaaaagcugacuaagcggcugaaaagacauccggaggaaacaggcggcuuccaagaggcuccgcucgcauacgaugccauuugggcacuggcacuugccuuaaauaagaccucaggcggaggaggcagauccggggugagacuggaagauuucaacuacaacaaucaaacaaucacagaccagaucuauagagcuaugaacaguagcagcuuugaaggggugucuggccacgucguguuugacgcgucgggcaguagaauggccuggaccuuaauagaacagcugcaaggugguucuuacaaaaaaauuggguauuaugacucuaccaaggacgaucucuccuggagcaagacugacaaauggauuggcggaagcccccccgcagaccaaaccuuaguuauuaagacauuccgcuucuuaucucagaaacuguuuauaucagucagcguccuuuccucacucgggauugucuuagccgucguguguuuaaguuuuaacauuuacaacucacaugugagguauauacagaacucacagccaaaucugaauaaccugacagccguggggugcucuuuagcucuggcagcaguguucccucuggggcuugacggauaucauauugggagaaaucaguuuccguuuguaugucaggcgcgacuguggcuacuggggcugggguuuucauuagguuacggcagcauguuuacgaaaaucuggugggugcauacugucuucacgaagaaagaggaaaagaaggaauggagaaaaacgcuggagccuuggaagcuguacgccacaguaggguugcucgucggaauggauguccugaccuuggccauuuggcagaucguagauccccuucaccguacuaucgagaccuucgccaaagaagagccuaaagaagauauugaugugaguauacugccacagcuugagcauugcuccucucggaaaaugaacaccuggcuugggauuuucuacggauauaagggccugcuucugcugcuuggaaucuuucuggcauacgaaacaaaauccgugaguacggaaaagaucaacgaucaccgcgcaguggguauggcuauuuacaacgucgccguccucugccugauaacagcacccgugacuaugauucugucuagccagcaggacgcagccuuugccuuugccucacuagccaucguguucaguuccuacaucacacuugucgugcuguucgugcccaagaugcgccgacucauuacucgcggagaauggcaaagcgaggcgcaggacacaaugaaaaccgguucaucaaccaauaauaaugaggaggagaaaucaagacugcucgagaaagaaaaccgcgaacuugagaaaaucauagcagaaaaagaggaacgcgugucugaguuacgucaccagcuccagucccggcaacaacuaagaucucgacgacacccuccuacaccacccgagccuucaggcggauuaccucgcggaccuccggagccccccgaccggcugaguugcgaugggaguaggguacacuuacuguacaaguag

SEQ ID NO: 268936 - RNA, 2886 nt, Artificial Sequence
  derived and/or modified sequence
augcuuuugcucuuacugcuggcuccacuguuucuucgaccaccgggagcugguggugcucagacucccaacgccacuucugaaggcugucagaucauucauccaccgugggaaggcgggauaagguaccgugguuuaacucgggaucaggugaaggccauaaacuuucucccaguggacuaugagaucgaguauguguguaggggcgaacgagaagucgugggaccaaagguucggaaaugucuggcaaauggaagcuggacugacauggacacaccuagccgaugugugaggauuuguucaaagucuuacuuaacgcucgaaaauggcaaagucuuucuuaccgguggggaccucccugcacucgauggcgcucgcgucgacuucaggugugauccagacuuucaucugguuggaaguagccgguccauaugcucgcagggucaguggagcacucccaagccucauugccaggucaacaggacuccccauucagagcgccgagccguuuauauuggcgcguuguucccuaugucugguggauggcccgguggacaggcgugucagcccgcuguugagauggcccuugaggacguuaacucucggcgugacauacuucccgacuacgagcugaagcuuauccaccacgacagcaagugcgacccuggccaagcgaccaaguaucuuuaugaauugcuguacaacgauccgauuaaaauuauccuaaugccaggaugcucuucugugaguacauugguggccgaagcugcccguauguggaacuugaucgugcucuccuacgggucuaguagcccugccuuaaguaacagacagcgcuuuccaacuuucuuuaggacccauccuucagccaccuugcauaaucccaccagagugaaacucuuugagaaguggggcuggaagaaaaucgcuacuauacagcagacuacggaggucuucaccaguacccuugacgaccuugaagagcgagugaaggaagcggggauugagauuaccuuuagacagucguuuuuuucagacccagcugugcccguuaaaaaucuuaaacgccaagaugcacgaauuauagucggcuuauucuaugaaacugaggcaaggaaaguguuuugcgaggucuacaaggaaagacuguuuggaaaaaaguauguuugguucuuaaucgggugguacgcugacaauugguuuaagauuuacgauccuucgaucaacugcacaguggacgaaaugacugaggcuguugagggacauauuacuacagagauugugaugcuuaauccugcaaauacuaggaguauuuccaacaugacuucccaggaauucguggaaaagcucacaaaacgacuaaaacgccacccagaagaaacgggaggauuccaggaagcaccucuggccuacgaugcuaucugggcucucgcccuugcacucaacaaaacuucaggaggaggcgguagauccggggugagacucgaagacuuuaacuauaacaaccaaaccaucaccgaccagauauacagggccaugaauaguuccagcuucgagggcgugaguggacacguuguguuugacgcuucagguucccggauggcuuggaccuuaauugaacagcuccaaggugggucauacaagaaaauuggguauuaugauucuaccaaggacgaucuuagcugguccaaaacagacaaauggauugguggaagcccccccgcagaucaaacccuggucaucaagaccuucagguuccugagucaaaagcucuucauuagugugagugugcuguccucucuugguaucguccucgcuguaguuugucuuuccuuuaauaucuauaauucgcacguucgguauauacaaaacucccagccaaauuugaauaaccugacugccguugguugcucccucgcucuggcagccguauucccucucggccucgacggcuaccacauuggacgcaaucaguuuccguucguuugccaagcccgguugugguugcuuggacucggguuuagccuuggcuaugguuccauguucaccaagauuugguggguccauaccguauucacaaagaaggaagagaagaaagaauggagaaaaacucuggaaccauggaagcuuuacgcaacagugggcuugcuuguggggauggacgugcugaccuuggcgauuuggcagaucguggacccucuucaucggaccauugaaaccuucgcaaaagaggagccuaaggaagauaucgacguguccauuuugccccagcucgaacacuguucaagccgaaaaaugaauacauggcugggaauuuucuauggcuauaaagggcuccuucuacugcucggcaucuucuuagcauaugaaacuaaaucugucagcaccgaaaaaaucaaugaucacagggccgucggaauggcaauuuacaacguugcaguacuaugcuuaaucaccgccccgguuaccaugauucugucuucucaacaggacgcugcguuugcauuugcuucccuggccauaguguucaguuccuauauuacacucgucguacuguucgugcccaaaaugcgccggcucaucacccgcggggaauggcagagcgaggcccaggauacuaugaagacggguagcuccacuaacaauaaugaggaagaaaagaguagacugcuggaaaaggaaaaucgggagcuugaaaagaucaucgccgagaaagaggagagaguaucagaacuacgucaccaacugcagaguaggcagcaguuaagaucccgacgccaccccccaacaccaccagaaccuuccggcggucucccacguggccccccagaacccccagaucgccucuccugcgacggcucacgggugcauuugcuguauaaauag

SEQ ID NO: 268937 - protein, 303 aa, Artificial Sequence
  derived and/or modified sequence
MGSAGRLHYLAMTAENPTPGDLAPAPLITCKLCLCEQSLDKMTTLQECQCIFCTACLKQYMQLAIREGCGSPITCPDMVCLNHGTLQEAEIACLVPVDQFQLYQRLKFEREVHLDPYRTWCPVADCQTVCPVASSDPGQPVLVECPSCHLKFCSCCKDAWHAEVSCRDSQPIVLPTEHRALFGTDAEAPIKQCPVCRVYIERNEGCAQMMCKNCKHTFCWYCLQNLDNDIFLRHYDKGPCRNKLGHSRASVMWNRTQVVGILVGLGIIALVTSPLLLLASPCIICCVCKSCRGKKKKHDPSTT

SEQ ID NO: 268938 - protein, 214 aa, Artificial Sequence
  derived and/or modified sequence
MLWITMPHPAHLGLFIAVTLSEVHLDPYRTWCPVADCQTVCPVASSDPGQPVLVECPSCHLKFCSCCKDAWHAEVSCRDSQPIVLPTEHRALFGTDAEAPIKQCPVCRVYIERNEGCAQMMCKNCKHTFCWYCLQNLDNDIFLRHYDKGPCRNKLGHSRASVMWNRTQVVGILVGLGIIALVTSPLLLLASPCIICCVCKSCRGKKKKHDPSTT

SEQ ID NO: 268939 - DNA, 912 bp, Artificial Sequence
  derived and/or modified sequence
atgggcagcgccggcagactgcactacctggccatgaccgccgagaaccccacccccggcgacctggcccccgcccccctgatcacctgcaagctgtgcctgtgcgagcagagcctggacaagatgaccaccctgcaggagtgccagtgcatcttctgcaccgcctgcctgaagcagtacatgcagctggccatcagagagggctgcggcagccccatcacctgccccgacatggtgtgcctgaaccacggcaccctgcaggaggccgagatcgcctgcctggtgcccgtggaccagttccagctgtaccagagactgaagttcgagagagaggtgcacctggacccctacagaacctggtgccccgtggccgactgccagaccgtgtgccccgtggccagcagcgaccccggccagcccgtgctggtggagtgccccagctgccacctgaagttctgcagctgctgcaaggacgcctggcacgccgaggtgagctgcagagacagccagcccatcgtgctgcccaccgagcacagagccctgttcggcaccgacgccgaggcccccatcaagcagtgccccgtgtgcagagtgtacatcgagagaaacgagggctgcgcccagatgatgtgcaagaactgcaagcacaccttctgctggtactgcctgcagaacctggacaacgacatcttcctgagacactacgacaagggcccctgcagaaacaagctgggccacagcagagccagcgtgatgtggaacagaacccaggtggtgggcatcctggtgggcctgggcatcatcgccctggtgaccagccccctgctgctgctggccagcccctgcatcatctgctgcgtgtgcaagagctgcagaggcaagaagaagaagcacgaccccagcaccacctag

SEQ ID NO: 268940 - DNA, 912 bp, Artificial Sequence
  derived and/or modified sequence
atgggttccgctggacgtctacactacctggccatgaccgctgaaaacccaaccccgggcgaccttgccccagctcctttaattacttgtaagttgtgcctctgcgagcaaagcctggacaaaatgacaacattgcaggagtgccaatgtatcttttgcaccgcttgccttaagcagtatatgcagctcgctattagagaaggctgcgggtctcccatcacgtgccctgatatggtctgtctcaatcatggcaccctgcaggaggcagagatcgcatgtctggtgccagtggatcagttccaactgtatcaaagactgaagttcgagcgggaagtccatctggacccctacaggacatggtgtccagttgccgactgccagacagtctgccccgtcgccagttccgaccctgggcagccagtattggtcgagtgcccttcctgccatctcaaattctgcagctgttgcaaggatgcatggcatgcagaggtaagctgccgcgactcacagccaatagtcctccctacagagcatcgggcattgttcggaactgatgccgaggctcctattaagcagtgtccggtgtgccgagtttacatcgagcgaaacgaaggctgtgcacaaatgatgtgcaagaattgcaagcacaccttctgctggtactgtctgcagaacttggacaacgatatttttctgcggcattacgataaggggccttgccggaataaattgggtcattctcgcgcctctgtcatgtggaacagaactcaggtagttgggatcctcgtcggcctgggaatcatagcacttgtgacatctccactgttattgctggcaagtccctgtattatttgctgcgtatgcaagtcttgccgtgggaaaaagaaaaagcatgatccctccacaacatag

SEQ ID NO: 268941 - DNA, 912 bp, Artificial Sequence
  derived and/or modified sequence
atgggcagcgctggccgcctgcactacctggccatgacagctgagaaccccacccctggggacctggccccagcccccctcatcacctgcaagctgtgcctgtgtgagcagagcctggacaagatgaccaccctgcaggagtgccagtgcatcttctgcacagcctgcctgaagcagtacatgcagctggccatccgggagggctgcggcagccccatcacctgcccagacatggtgtgcctgaaccacggcaccctgcaggaggccgagatcgcctgcctggtgcctgtggaccagttccagctgtaccagaggctgaagtttgagcgggaggtgcacctggacccctaccgcacctggtgccctgtggccgactgccagacagtgtgccctgtggccagcagtgaccccggccagcctgtgctggtggagtgccccagctgccacctgaagttctgcagctgctgcaaggatgcctggcacgccgaggtgtcctgccgggacagccagcccatcgtgctgcccacagagcaccgggccctgtttggaacagatgctgaggcccccatcaagcagtgccctgtgtgccgggtgtacatcgagagaaatgaaggctgtgcccagatgatgtgcaagaactgcaagcacaccttctgctggtactgcctgcagaacctggacaatgacatcttcctgcggcactatgacaagggcccctgcaggaacaagctgggccacagccgggcctctgtgatgtggaacagaacccaggtggtgggcatcctggtgggcctgggcatcatcgccctggtgaccagccccctgctgctgctggccagcccctgcatcatctgctgcgtgtgcaagagctgccggggcaagaagaagaagcatgaccccagcaccacctag

SEQ ID NO: 268942 - DNA, 912 bp, Artificial Sequence
  derived and/or modified sequence
atgggcagcgccggccggctgcactacctggccatgaccgccgagaacccaacgcccggagacctcgcacctgcccctctgatcacatgcaagctgtgcctgtgtgagcaatctctggataagatgaccacgctacaggagtgtcaatgcatcttctgtaccgcctgtttgaagcagtacatgcagcttgcaatacgagaagggtgtgggtccccaattacttgcccggatatggtgtgcctcaatcacgggaccctgcaggaggcagaaatcgcctgtctggtccccgtagaccagttccagttatatcagaggctcaagttcgagcgagaggtgcacctcgatccctataggacttggtgccccgtggccgactgtcagacggtgtgccccgtggcatcaagcgacccaggccagccagtgctcgttgaatgcccttcctgtcacctgaagttttgctcctgctgtaaagatgcatggcatgctgaggtctcatgtcgagatagtcagcccatcgtgttacctacggaacacagggctttgttcggtaccgatgcagaggctccgattaaacaatgccccgtttgtcgcgtgtacatcgagcggaacgaggggtgcgcacagatgatgtgcaagaattgcaagcacacattttgctggtattgtcttcagaacctcgacaacgatatcttcctgcggcactatgacaaagggccttgcaggaacaagctgggccatagtagggcttcggttatgtggaacagaacgcaggtagtgggaattctggtggggctgggtataatagctctggtgacaagtccactgttgctgttggcaagcccttgcattatttgttgtgtatgcaaaagctgccgggggaagaaaaaaaaacacgacccatctactacgtag

SEQ ID NO: 268943 - DNA, 912 bp, Artificial Sequence
  derived and/or modified sequence
atgggctctgcaggcaggctgcactatttggccatgacagctgaaaaccccaccccaggagatttggctccagccccactcattacctgcaaactgtgtctctgtgaacagtcattggataaaatgaccactctacaggagtgccagtgcatattttgtaccgcctgcctgaagcaatacatgcaactggccatacgtgagggctgtggttcccctattacgtgccctgacatggtttgtttaaatcacggaacccttcaggaggctgaaatcgcttgcttagttcctgttgatcagtttcagctgtaccagcgcctgaagtttgaaagggaggtacatttggacccatatcggacctggtgcccggtggccgactgtcagacagtgtgcccagtggctagctcagaccctggccaacctgttttggtggaatgcccctcttgccacctgaagttctgctcctgttgtaaagacgcatggcacgccgaagtgagttgcagagacagccagcctatcgtcctgccgaccgaacatagagcactgttcggaacggacgctgaagcccctattaaacagtgccccgtctgtcgggtttatatcgaaagaaacgaggggtgtgcccaaatgatgtgtaagaattgcaagcataccttctgctggtactgtttacagaatttggataacgacatcttcctgagacattacgataaagggccttgcaggaacaagctgggacactcccgcgcatcagttatgtggaacaggacacaggtcgtcgggatcttggtgggacttggaatcatcgcattggtgaccagtcccctgcttctgctggcttcaccatgtattatctgctgtgtgtgcaagtcttgccgcggaaagaagaagaagcacgatccctccactacgtag

SEQ ID NO: 268944 - DNA, 5036 bp, Artificial Sequence
  derived and/or modified sequence
gagctgtgccccacgctcccgctgcaacagtcccgggcatcgcagctgccagtcaaggctaggaggcggtcggggactccgcctcctcccgacccgtaggtctgggagcgcaagtcctgttgcagtcttgcaaagtgtaaagctgtcagccgcagagcacggaggaaagacggagagaatggaagagctcctgtccggtgtgccagcagcccggactggcggtgagcgcgagggaggctactgagaagcccggcgacggaggaacgcaggtctgctgccagggattgaggagactgaagaatgctgaagacaggctgatgggctcagctggtaggctccactatctcgccatgactgctgaaaatcccactcctggagacctggctccggcccccctcatcacttgcaaactctgcctgtgtgagcagtctctggacaagatgaccacactccaggaatgccagtgcatcttttgcacagcttgcctgaaacagtacatgcagctggcaatccgagaaggatgtgggtctcccatcacttgccctgacatggtgtgcctaaaccacgggaccctgcaggaagctgagattgcctgtttggtacctgtggaccagtttcaactttatcagaggttaaaatttgaaagagaagttcatctggacccctaccgaacatggtgtcctgttgcagactgtcagacagtgtgccctgttgcctcgagtgacccaggacagcctgtgctggtggaatgcccttcttgccacctgaaattctgctcgtgttgcaaggatgcttggcatgcagaggtctcctgtagagacagtcagcctattgtcctgccaacagagcaccgagccctctttgggacagatgcagaagcccccattaagcagtgcccagtttgccgggtttatatcgaacgcaatgaaggctgcgctcagatgatgtgcaaaaactgcaagcatacattttgctggtactgcctccagaacttggataatgacattttcctcagacattatgacaaagggccatgcaggaataaacttggccactcaagagcatcagtgatgtggaaccgaacacaggtggtggggattctcgtaggcttgggcatcattgccttggttacttcacccttgttactcctggcctccccatgtataatctgttgtgtctgcaagtcctgtcggggcaagaagaaaaagcacgacccatccacaacctaaagatctctgtgttcatacgccccagatatgtgagttacatgagatggcacagtgataaagccccatttagtgaccttgcctccttctccttgccaactttgaaagtgcctccgtgtccagactttgaacttgcctgccagccttcagcatcaggaaaggccaagtcctgggtgtgagtgttcctgtgtaacaagaactgggctcaacggtccagctgtttctatggagctttggggttccttgagatgaatgaacatatcattttatcatccaaaggatctcactggactgttcaacttccagccaaattcaaggagcttgcgggaacatttgatataacaaatgtgttgtcattgttggcaacatacaagataaccaagaagctggagtctgttctgtgttgatttgactgccatgagaaacacaggggaaacctgatgaggagaaggataagactgcgtaaggagaaatcctcataggagctataaagcaggctgctgatctcagcagttgatatggtggttgtgcctctgctggctactgggtgtgctgtccccatgttcccgctgtgatttggcagaaacacaataggcttctccttgtgtgatctcagcttcaagcaggtgaaactgctgtgcagagggagttgccccttcccagtaaaagagttgcagcctgttaaacaatgtggtctaatttagtgtctctcccttggcaaatgtaagttttctaagttggccaacttgtctcttacagccagtggctgtggtctacagaattgtttcatataaaatacgggtagagtggtagagtttcaaaactttcgtcatagatatctgggacctttctcaggatctgtgttcacacagccaatagatttggaatcaggcctaagagtacacatggagggtaaatattaaagtgcgtattatgtacatctagaatccatgtgacttgcagcctacctgtaatttctatccattgagcatgcatggatatacccaatagtacacacaaaataaatgtttacttaagagccattctatccttttgtgactgaaatggtttattgtaaatctgcctaaagattttttgcatattatatatgtgaattttggttgtaagttcataacttacccaagggtatagactcataactcttttaaaacagtgcttagtacaatatcctgccatctctgtaaaaacgctaattgataaccgagtcatttacatgttttcgaacacagaatagctcttttctcagcatcattattgctctttcagcatctgttaggacagtctgaatactttctgtttcaaggcactgataaaaccgcaacaaaaacatgtaagaaataaaatagaaatgctttatataatttagtttaaatttatgtatcacctcattgtgacttattttttccattataccattagtcagatttgaataacgaggttttgaaaggataaaaccttttctccaatgacaggattatataattgctattggcaatgtagcctggtgcttcatgagacctatgctaaatgttactggagagttcttgaagccagggataccatatcaggaactattcaggatctatgatattttctgaggtaactgggtaatagaatatcaaattgctgctatctcggacctattgttaaaggatgatgctttgcctatgtaataggatatatcctaagtggggatgtgtatatttcaggaactttaattcacaagtatatattgatatctgatgtgtgtatagtacatctgttggttatgtacattttaatttacatgttgtgtagaacatagatgagaactctgggaaaacttgggaatggcaaccaaccaaaatcatttttaatcatttattagaaatttctcaatattgtgtctttttcttttgaaactctaaacacttcagaaaaaaacactatcagtgtagttcatgttagtataattatagatttacatatatttgaatagttaatttgctttgttttacacgtagcccactgcctcattataggtaaaaggcatttataactgctcaggggattacgagaactcaactgaaactgaatttttgtaacaagaatgttaatagtggcaaagtcctctgtcagtaaactctttaagcttggtgctgcaaagagtctttaaatgggggctgatttcaagtaacctaaaagactgtgttatcagaggaagaggtcccaaatttggagtaaagatgggagaaaataaatatgtgctatttccttggcgagttgagggaatttgccaccttacagagtttgtatcactgaattagctgcttttgtttttttttttttttttttgccagggctatggagtgggggttgtttgtcaaactgattttcaataattggatttaattttttttaacattgaaaagtgcctgaaaaatggtaaattcttaaatgtgtgtgagattgtcagaatcaacaaaactaggttggttaaacatatctctggtacatcaaggggcatgatacaaaccagtctaaagactgtttataaaggagagagctggcgacttatttttatttttattttttggacagagtctccctttgtcacccaggccggagtgcagtggcatgatcatggttcacttcaacccctacctcctgggctcaagtgttcctctcaccttatcctcctgagcagctgggactacaggcacacaccaccacacctggctaagttttgtattttttgtagagatggggtttctctgtgttgcccagtcttgtctcaaactcctgggctcaagcgatccacccaccttgggctcccaaagtgttgggattacaggtgtgtgtcactgtgcctgacagctgacagttttaactgacaactttgataacagaggctgctatttttgttttagataattggccagtgacagagtttacccttgcctcctttcttggtctgccagctttgtcctttctgagtgattctctttctgtattgagaggaagtgtgggtctacatagggatgtttggatgctatggcaagaatctttttgtgtttggagtgtagtccatttgcaatagaaataaaaaaatccgtcaccaaattgtaacctggatgttatagcccagcatctagaaatcctatgaaacgtattagcacaatatcttgccattgtcccatctaggaaattttttcttgttgtgaggtagggaagtgaggaggaaagccatgccgaagcaaatgttagaatcttaggcatcctatttgttcatgccatgggtatttgctttggacttggagtctgtactttgaaagaggcctttgaaaaacaaataattctgtgtgaattttcttgtagcgtgcttcatgaaaatatctacttatccaggtttgcaaatgtacatgttcatttgaatgtaaatcaccatttcttggaaccccacgttttttcttaaaaattattctgaattaaatgtatatttctttagccttccctacacagtactaataaaagacttttctttctgttcatgaatggatgcctttatgtgatatagagtcatgtgtgtatgtgtagctttaagggcaatttcagaaatgcattagatgaatgacattttataaagcgatcacaattgatatctacaggctattatgtctcatgttgattcatgatccaggaagttttatgtatttaaaaaattgctatcgtgttatatttttccaatttttggagaagaaaatagctgtttaggctctctagccacaataaatgtaagcaggaaatcaa

SEQ ID NO: 268945 - DNA, 645 bp, Artificial Sequence
  derived and/or modified sequence
atgctgtggatcaccatgccccaccccgcccacctgggcctgttcatcgccgtgaccctgagcgaggtgcacctggacccctacagaacctggtgccccgtggccgactgccagaccgtgtgccccgtggccagcagcgaccccggccagcccgtgctggtggagtgccccagctgccacctgaagttctgcagctgctgcaaggacgcctggcacgccgaggtgagctgcagagacagccagcccatcgtgctgcccaccgagcacagagccctgttcggcaccgacgccgaggcccccatcaagcagtgccccgtgtgcagagtgtacatcgagagaaacgagggctgcgcccagatgatgtgcaagaactgcaagcacaccttctgctggtactgcctgcagaacctggacaacgacatcttcctgagacactacgacaagggcccctgcagaaacaagctgggccacagcagagccagcgtgatgtggaacagaacccaggtggtgggcatcctggtgggcctgggcatcatcgccctggtgaccagccccctgctgctgctggccagcccctgcatcatctgctgcgtgtgcaagagctgcagaggcaagaagaagaagcacgaccccagcaccacctag

SEQ ID NO: 268946 - DNA, 645 bp, Artificial Sequence
  derived and/or modified sequence
atgctgtggattaccatgcctcaccctgcacacttaggactattcatcgcagtgactttaagtgaggttcacctggacccctatcggacgtggtgccctgtcgctgattgtcagaccgtgtgccctgtcgcatctagcgacccaggacaacctgtgcttgtggaatgcccatcttgtcatctcaagttctgctcttgttgcaaggacgcttggcatgctgaagtttcttgccgcgatagtcagcccattgtcctgccaaccgagcacagagcactgttcggcaccgacgctgaggcacccatcaagcagtgtccagtttgccgcgtctacatcgagcgtaatgaagggtgtgcgcagatgatgtgtaaaaattgtaaacacaccttttgctggtattgtctccagaatctggataacgatatttttctgaggcattatgacaaaggcccttgtaggaacaaactgggccactccagggcctcggtcatgtggaaccgtactcaggtagtgggtatcttagtgggtctgggtattatcgcccttgtcacctcacctctccttctgctggcaagcccttgcataatttgctgcgtgtgtaaatcttgtagagggaagaagaagaagcacgatccgagcaccacctag

SEQ ID NO: 268947 - DNA, 645 bp, Artificial Sequence
  derived and/or modified sequence
atgctgtggatcaccatgccccacccagcccacctgggcctcttcatcgctgtgaccctgtctgaggtgcacctggacccctaccgcacctggtgccctgtggccgactgccagacagtgtgccctgtggccagcagtgaccccggccagcctgtgctggtggagtgccccagctgccacctgaagttctgcagctgctgcaaggatgcctggcatgctgaggtgtcctgccgggacagccagcccatcgtgctgcccacagagcaccgggccctgtttggaacagatgctgaggcccccatcaagcagtgccctgtgtgccgggtgtacattgaaagaaatgaaggctgtgcccagatgatgtgcaagaactgcaagcacaccttctgctggtactgcctgcagaacctggacaatgacatcttcctgcggcactatgacaagggcccctgcaggaacaagctgggccacagccgggcctctgtgatgtggaacagaacccaggtggtgggcatcctggtgggcctgggcatcatcgccctggtgaccagccccctgctgctgctggccagcccctgcatcatctgctgcgtgtgcaagagctgccggggcaagaagaagaagcatgaccccagcaccacctag

SEQ ID NO: 268948 - DNA, 645 bp, Artificial Sequence
  derived and/or modified sequence
atgctgtggatcaccatgccccaccccgcccacctgggcctgttcatcgcagtgactttgtctgaggttcacctggacccatatcgcacttggtgtcctgttgcagactgtcaaacagtgtgtccagtggccagcagcgaccctggtcaaccagtcctcgtggagtgcccaagctgccaccttaaattctgcagctgttgtaaagatgcctggcacgccgaagtgtcttgtagggatagtcaacctatcgtgttgcctacagagcaccgggccctgttcggcaccgatgccgaagcgcctatcaagcagtgccccgtgtgtagagtctacattgagaggaatgagggctgcgcccaaatgatgtgtaagaactgtaagcatacattttgttggtattgcctgcagaatcttgacaatgatatttttttacgccactacgacaaaggcccatgtaggaacaagctggggcacagtcgagccagcgtgatgtggaatcgcacacaagtggttgggatcctggttggcttggggatcatcgcactggttacgagccccttgctgctgctggcatccccctgtatcatttgttgtgtgtgcaagtcttgtcgcggcaaaaagaaaaagcacgacccatccaccacttag

SEQ ID NO: 268949 - DNA, 645 bp, Artificial Sequence
  derived and/or modified sequence
atgctgtggatcaccatgcctcacccagcccatctcgggctgtttatagcagtgaccctctctgaagtccaccttgatccttaccggacatggtgtcccgtcgctgactgccagaccgtttgccctgttgccagctctgaccccggacagcccgttctggtggagtgcccctcttgccaccttaaattttgctcatgttgtaaggacgcttggcatgccgaggttagttgtagggattcgcagccaatcgtgctgcccactgagcacagggcccttttcggaactgatgccgaggcccctataaagcagtgcccagtttgccgtgtgtacattgagcgaaacgaagggtgcgcccaaatgatgtgtaagaattgtaagcacaccttctgttggtactgcctacaaaatttagataatgatatttttctgagacactacgacaaggggccatgcagaaataaattgggccattcccgggcatccgtgatgtggaacagaacgcaagttgttggcattctcgtggggctggggataattgctttggtgacttcccccctcctgctgttagctagtccgtgcataatctgctgcgtgtgtaagtcatgtcgtgggaagaagaagaagcacgatccctctaccacttag

SEQ ID NO: 268950 - DNA, 999 bp, Artificial Sequence
  derived and/or modified sequence
gtaggtgaggccgtcagcgctggtgaagagctgctgtgggatgagcccgtcctcaggcacgtagccggtgcagcagttgctcagatagtccgccatgctgcgggagaccccgcgaccccacgtaaacacccgcgcagccgctgctgctgctgctgttgttactgttgccgccattttttaaatataaaatatagtctaattcagggcatgctgtggatcacaatgcctcatcctgctcacttggggttatttattgccgtcacactttctgaagttcatctggacccctaccgaacatggtgtcctgttgcagactgtcagacagtgtgccctgttgcctcgagtgacccaggacagcctgtgctggtggaatgcccttcttgccacctgaaattctgctcgtgttgcaaggatgcttggcatgcagaggtctcctgtagagacagtcagcctattgtcctgccaacagagcaccgagccctctttgggacagatgcagaagcccccattaagcagtgcccagtttgccgggtttatatcgaacgcaatgaaggctgcgctcagatgatgtgcaaaaactgcaagcatacattttgctggtactgcctccagaacttggataatgacattttcctcagacattatgacaaagggccatgcaggaataaacttggccactcaagagcatcagtgatgtggaaccgaacacaggtggtggggattctcgtaggcttgggcatcattgccttggttacttcacccttgttactcctggcctccccatgtataatctgttgtgtctgcaagtcctgtcggggcaagaagaaaaagcacgacccatccacaacctaaagatctctgtgttcatacgccccagatatgtgagttacatgagatggcacagtgataaagccccatttagtgaccttgcctccttctccttgccaactttgaaagtgcctccgtgtccagactttgaacttgcctgccagccttcag

SEQ ID NO: 268951 - protein, 335 aa, Artificial Sequence
  derived and/or modified sequence
MGSASPGLSSVSPSHLLLPPDTVSRTGLEKAAAGAVGLERRDWSPSPPATPEQGLSAFYLSYFDMLYPEDSSWAAKAPGASSREEPPEEPEQCPVIDSQAPAGSLDLVPGGLTLEEHSLEQVQSMVVGEVLKDIETACKLLNITADPMDWSPSNVQKWLLWTEHQYRLPPMGKAFQELAGKELCAMSEEQFRQRSPLGGDVLHAHLDIWKSAAWMKERTSPGAIHYCASTSEESWTDSEVDSSCSGQPIHLWQFLKELLLKPHSYGRFIRWLNKEKGIFKIEDSAQVARLWGIRKNRPAMNYDKLSRSIRQYYKKGIIRKPDISQRLVYQFVHPI

SEQ ID NO: 268952 - DNA, 1894 bp, Artificial Sequence
  derived and/or modified sequence
gtctgacttcctcccagcacattcctgcactctgccgtgtccacactgccccacagacccagtcctccaagcctgctgccagctccctgcaagcccctcaggttgggccttgccacggtgccagcaggcagccctgggctgggggtaggggactccctacaggcacgcagccctgagacctcagagggccaccccttgagggtggccaggcccccagtggccaacctgagtgctgcctctgccaccagccctgctggcccctggttccgctggccccccagatgcctggctgagacacgccagtggcctcagctgcccacacctcttcccggcccctgaagttggcactgcagcagacagctccctgggcaccaggcagctaacagacacagccgccagcccaaacagcagcggcatgggcagcgccagcccgggtctgagcagcgtatcccccagccacctcctgctgccccccgacacggtgtcgcggacaggcttggagaaggcggcagcgggggcagtgggtctcgagagacgggactggagtcccagtccacccgccacgcccgagcagggcctgtccgccttctacctctcctactttgacatgctgtaccctgaggacagcagctgggcagccaaggcccctggggccagcagtcgggaggagccacctgaggagcctgagcagtgcccggtcattgacagccaagccccagcgggcagcctggacttggtgcccggcgggctgaccttggaggagcactcgctggagcaggtgcagtccatggtggtgggcgaagtgctcaaggacatcgagacggcctgcaagctgctcaacatcaccgcagatcccatggactggagccccagcaatgtgcagaagtggctcctgtggacagagcaccaataccggctgccccccatgggcaaggccttccaggagctggcgggcaaggagctgtgcgccatgtcggaggagcagttccgccagcgctcgcccctgggtggggatgtgctgcacgcccacctggacatctggaagtcagcggcctggatgaaagagcggacttcacctggggcgattcactactgtgcctcgaccagtgaggagagctggaccgacagcgaggtggactcatcatgctccgggcagcccatccacctgtggcagttcctcaaggagttgctactcaagccccacagctatggccgcttcattaggtggctcaacaaggagaagggcatcttcaaaattgaggactcagcccaggtggcccggctgtggggcatccgcaagaaccgtcccgccatgaactacgacaagctgagccgctccatccgccagtattacaagaagggcatcatccggaagccagacatctcccagcgcctcgtctaccagttcgtgcaccccatctgagtgcctggcccagggcctgaaacccgccctcaggggcctctctcctgcctgccctgcctcagccaggccctgagatgggggaaaacgggcagtctgctctgctgctctgaccttccagagcccaaggtcagggaggggcaaccaactgccccagggggatatgggtcctctggggccttcgggaccatggggcaggggtgcttcctcctcaggcccagctgctcccctggaggacagagggagacagggctgctccccaacacctgcctctgaccccagcatttccagagcagagcctacagaagggcagtgactcgacaaaggccacaggcagtccaggcctctctctgctccatccccctgcctcccattctgcaccacacctggcatggtgcagggagacatctgcacccctgagttgggcagccaggagtgcccccgggaatggataataaagatactagagaactg

SEQ ID NO: 268953 - DNA, 1895 bp, Artificial Sequence
  derived and/or modified sequence
gtctgacttcctcccagcacattcctgcactctgccgtgtccacactgccccacagacccagtcctccaagcctgctgccagctccctgcaagcccctcaggttgggccttgccacggtgccagcaggcagccctgggctgggggtaggggactccctacaggcacgcagccctgagacctcagagggccaccccttgagggtggccaggcccccagtggccaacctgagtgctgcctctgccaccagccctgctggcccctggttccgctggccccccagatgcctggctgagacacgccagtggcctcagctgcccacacctcttcccggcccctgaagttggcactgcagcagacagctccctgggcaccaggcagctaacagacacagccgccagcccaaacagcagcggcatgggcagcgccagcccgggtctgagcagcgtatcccccagccacctcctgctgccccccgacacggtgtcgcggacaggcttggagaaggcggcagcgggggcagtgggtctcgagagacgggactggagtcccagtccacccgccacgcccgagcagggcctgtccgccttctacctctcctactttgacatgctgtaccctgaggacagcagctgggcagccaaggcccctggggccagcagtcgggaggagccacctgaggagcctgagcagtgcccggtcattgacagccaagccccagcgggcagcctggacttggtgcccggcgggctgaccttggaggagcactcgctggagcaggtgcagtccatggtggtgggcgaagtgctcaaggacatcgagacggcctgcaagctgctcaacatcaccgcagatcccatggactggagccccagcaatgtgcagaagtggctcctgtggacagagcaccaataccggctgccccccatgggcaaggccttccaggagctggcgggcaaggagctgtgcgccatgtcggaggagcagttccgccagcgctcgcccctgggtggggatgtgctgcacgcccacctggacatctggaagtcagcggcctggatgaaagagcggacttcacctggggcgattcactactgtgcctcgaccagtgaggagagctggaccgacagcgaggtggactcatcatgctccgggcagcccatccacctgtggcagttcctcaaggagttgctactcaagccccacagctatggccgcttcattaggtggctcaacaaggagaagggcatcttcaaaattgaggactcagcccaggtggcccggctgtggggcatccgcaagaaccgtcccgccatgaactacgacaagctgagccgctccatccgccagtattacaagaagggcatcatccggaagccagacatctcccagcgcctcgtctaccagttcgtgcaccccatctgagtgcctggcccagggcctgaaacccgccctcaggggcctctctcctgcctgccctgcctcagccaggccctgagatgggggaaaacgggcagtctgctctgctgctctgaccttccagagcccaaggtcagggaggggcaaccaactgccccagggggatatgggtcctctggggccttcgggaccctggggcaggggtgcttcctcctcaggcccagctgctcccctggaggacagagggagacagggctgctccccaacacctgcctctgaccccagcatttccagagcagagcctacagaagggcagtgactcgacaaaggccacaggcagtccaggcctctctctgctccatccccctgcctcccattctgcaccacacctggcatggtgcagggagacatctgcacccctgagttgggcagccaggagtgcccccgggaatggataataaagatactagagaactga

SEQ ID NO: 268954 - DNA, 1677 bp, Artificial Sequence
  derived and/or modified sequence
aactcttcatctcgcggctgtctgacttcctcccagcacattcctgcactctgccgtgtccacactgccccacagacccagtcctccaagcctgctgccagctccctgcaagcccctcaggttgggccttgccacggtgccagcaggcagccctgggctgggggtaggggactccctacaggcacgcagccctgagacctcagagggccaccccttgagggtggccaggcccccagtggccaacctgagtgctgcctctgccaccagccctgctggcccctggttccgctggccccccagatgcctggctgagacacgccagtggcctcagctgcccacacctcttcccggcccctgaagttggcactgcagcagacagctccctgggcaccaggcagctaacagacacagccgccagcccaaacagcagcggcatgggcagcgccagcccgggtctgagcagcgtatcccccagccacctcctgctgccccccgacacggtgtcgcggacaggcttggagaaggcggcagcgggggcagtgggtctcgagagacgggactggagtcccagtccacccgccacgcccgagcagggcctgtccgccttctacctctcctactttgacatgctgtaccctgaggacagcagctgggcagccaaggcccctggggccagcagtcgggaggagccacctgaggagcctgagcagtgcccggtcattgacagccaagccccagcgggcagcctggacttggtgcccggcgggctgaccttggaggagcactcgctggagcaggtgcagtccatggtggtgggcgaagtgctcaaggacatcgagacggcctgcaagctgctcaacatcaccgcagatcccatggactggagccccagcaatgtgcagaagtggctcctgtggacagagcaccaataccggctgccccccatgggcaaggccttccaggagctggcgggcaaggagctgtgcgccatgtcggaggagcagttccgccagcgctcgcccctgggtggggatgtgctgcacgcccacctggacatctggaagtcagcctcgaccagtgaggagagctggaccgacagcgaggtggactcatcatgctccgggcagcccatccacctgtggcagttcctcaaggagttgctactcaagccccacagctatggccgcttcattaggtggctcaacaaggagaagggcatcttcaaaattgaggactcagcccaggtggcccggctgtggggcatccgcaagaaccgtcccgccatgaactacgacaagctgagccgctccatccgccagtattacaagaagggcatcatccggaagccagacatctcccagcgcctcgtctaccagttcgtgcaccccatctgagtgcctggcccagggcctgaaacccgccctcaggggcctctctcctgcctgccctgcctcagccaggccctgagatgggggaaaacgggcagtctgctctgctgctctgaccttccagagcccaaggtcagggaggggcaaccaactgccccagggggatatgggtcctctggggccttcgggaccctggggcaggggtgcttcctcctcaggcccagctgctcccctggaggacagagggagacagggctgctccccaacacctgcctctgaccccagcatt

SEQ ID NO: 268955 - protein, 574 aa, Artificial Sequence
  derived and/or modified sequence
MLENYGNMVSLGFPFPKPPLISHLEREVDPCVQDPQDRESLSCSYPVSADKMWPENEKASSQQEIFENGEAYWMKFNSLLKVDSRDPKVREVCVQDVKLENQWETSIREKLREEKEGSEEVTCKKGKNQKVLSKNLNPNSKHSQCNKVLIAQKLHECARCGKNFSWHSDLILHEQIHSGEKPHVCNECGKAFKTRNQLSMHRIIHTGEKPFNCTQCGKAFNSRSALCRHKKTHSGEKPHECRDCGKAFKTRNRLCMHQLIHTGEKPYKCNCCGKAFQFKHSLTIHGRIHTGEKPYECEECGKAFSGSSDLTKHIRIHTGERPYECSKCGRAFSRSSDLSKHKRIHTREKHYGCPQCGKDFSIKAELTKHRRIHTEEKRYRCEECGKAFRHNCKRRAHEREHTGEKPYQCRDCGKTFQDKHCLTIHQRIHTGEKPYKCLECGKAFSGKSNLTNHRRIHTGEKPHKCEVCGMAFHHSSVLRQHKRIHTGEKPYTCSECGTSFRQGSALIGHKRVHTGEKPYECEECGKAFRVSSNLTGHKKRKHQVWSTHELDGSRKSLSPVTVSQTSVVSILTSA

SEQ ID NO: 268956 - protein, 121 aa, Artificial Sequence
  derived and/or modified sequence
MAASVLNTVLRRLPMLSLFRGSHRVQVPLQTLCTKAPSEEDSLSSVPISPYKDEPWKYLESEEYQERYGSRPVWADYRRNHKGGVPPQRTRKTCIRRNKVVGNPCPICRDHKLHVDFRESV

SEQ ID NO: 268957 - DNA, 366 bp, Artificial Sequence
  derived and/or modified sequence
atggccgcctcagtactcaatacagtcctgagaaggcttcccatgctcagcttattcagaggatctcacagggtgcaggtccccctccagactctgtgcacaaaggctccttccgaggaggatagcctgagctccgtgcctatttctccttataaagacgaaccatggaagtacctcgaatccgaagagtaccaggagcggtacggcagccgacccgtgtgggcggattatcgtagaaatcataagggaggagttccccctcagaggaccaggaagacctgcataaggcggaataaggttgtgggtaatccgtgccctatttgtagagaccacaagctgcatgtggatttccgagagagcgtgtag

SEQ ID NO: 268958 - DNA, 366 bp, Artificial Sequence
  derived and/or modified sequence
atggccgcatccgtcttgaataccgtcctacgaaggctccctatgctgagcttgttccggggatcccatcgggtccaggtaccgctccagacactctgtacgaaagcacccagcgaagaggattccctgagctctgtgcccatcagcccttataaggacgaaccttggaaatacctagaatccgaggagtaccaagaacgctatggctcacgtcctgtgtgggccgattaccgccggaaccacaaagggggcgttcccccccaacgtacccgcaagacctgtatcaggcgcaacaaagtggtggggaacccgtgcccaatttgcagggatcacaagctacacgtcgactttagggagtcagtgtag

SEQ ID NO: 268959 - DNA, 366 bp, Artificial Sequence
  derived and/or modified sequence
atggctgcttccgtgctgaacaccgtactgagaagactgcctatgctgtccctgttccgcgggtcacaccgagtgcaggtacccctccagaccttgtgtacaaaggcccccagcgaagaggattcactttcttcagtgcccatctcaccttacaaggatgaaccttggaagtatctcgagagcgaggagtatcaggagcgatacgggtcacgacccgtgtgggccgactacaggaggaaccacaaagggggtgtgccaccacagcggacaagaaaaacatgtatcaggagaaacaaggttgtgggcaacccgtgtcctatttgcagggatcacaagctccatgtagatttcagggagtcggtgtag

SEQ ID NO: 268960 - DNA, 366 bp, Artificial Sequence
  derived and/or modified sequence
atggcggcgtcagtcctgaacaccgtcttgcgccggcttcctatgttaagtctgttcagaggaagccacagggttcaggtaccgttgcaaacactttgtactaaggctccttctgaggaagacagcctgtcatctgtccccatatcaccttataaagatgagccctggaaatacctcgaatccgaagagtatcaggaacgatacggaagtcgccccgtgtgggccgactataggcggaaccataaaggcggagtccccccacagcgaactagaaagacctgtatacggcgcaacaaagtggttggtaatccctgtcctatttgccgagaccataaacttcatgtcgacttccgcgagagtgtgtag

SEQ ID NO: 268961 - DNA, 366 bp, Artificial Sequence
  derived and/or modified sequence
atggccgcctccgtgctgaatactgttctgagacggctaccaatgctgagcctgtttcgtggtagtcaccgggtgcaggtgccactccagactctgtgtacaaaagcaccatcagaggaggactccttgtcatcagtgccaatcagtccttataaggatgaaccatggaagtatcttgaatctgaagagtaccaggagagatacggctcgagacctgtgtgggcggactacaggcgcaatcataaaggaggcgtgcccccacagcgaacaagaaagacatgcatcaggagaaacaaggttgtcggtaacccatgcccgatctgtcgggaccacaagctgcatgtggacttccgcgaatctgtatag

SEQ ID NO: 268962 - DNA, 366 bp, Artificial Sequence
  derived and/or modified sequence
atggcggcaagcgttcttaacacggttctacgacggctccctatgctgtctctgtttagggggagccatagagtacaggtgccgttacagacactgtgcactaaagcaccttctgaagaggattccttaagtagcgtgccaatctccccctataaggacgagccctggaaatacttagaatccgaggaataccaggaacgttatgggtcgcgaccggtgtgggcagattacaggcgcaaccataagggcggagtgccacctcaaagaacccgcaagacatgcattcgcagaaacaaagttgtcggcaacccttgtcccatctgccgggatcacaaactgcacgttgattttcgggaatcagtgtag

SEQ ID NO: 268963 - DNA, 366 bp, Artificial Sequence
  derived and/or modified sequence
atggctgcatcagttctcaacacagtgttacgcagactgccaatgctgtcattgttccgagggtctcaccgggtacaagtgcctctccagacactgtgtacaaaggcaccttctgaggaagattccctgagctccgtgcctatcagtccttacaaagatgaaccatggaaatacctcgagtctgaggagtaccaggaacgatacggctccagaccggtgtgggccgactatcgacgcaaccacaaggggggcgtgcccccacagaggactaggaagacctgtatccggagaaacaaagtcgttggcaacccctgcccaatctgccgagaccataaactacacgtcgattttcgcgagagtgtgtag

SEQ ID NO: 268964 - DNA, 366 bp, Artificial Sequence
  derived and/or modified sequence
atggccgcctctgtgctgaacacagtgctgcggcggctgcccatgctgagcctcttccggggcagccaccgggtgcaggtgcccctgcagaccctgtgcaccaaggcccccagcgaggaggacagcctgagctctgtgcccatcagcccctacaaggatgagccctggaagtacctggagagcgaggagtaccaggagagatatggcagcaggcctgtgtgggccgactacagaagaaaccacaagggcggcgtgcccccccagaggaccaggaagacctgcatcagaagaaacaaggtggtgggcaacccctgccccatctgccgggaccacaagctgcacgtggacttccgggagagcgtgtag

SEQ ID NO: 268965 - DNA, 366 bp, Artificial Sequence
  derived and/or modified sequence
atggccgccagcgtgctgaacaccgtgctgcggcggctgcccatgctgtccctgtttcgggggtcccatagggtccaggtcccattgcagaccttgtgcaccaaggccccctccgaggaagactccctttcaagtgtaccaatttctccctacaaggacgaaccatggaaatatttggaatctgaggaataccaggaaaggtatggctctagacccgtctgggcagactataggaggaatcataaaggaggggtccctccacagcggacccgaaaaacatgtatcaggcgcaataaagtggtaggcaatccctgcccgatatgtcgcgatcacaagctccatgtggactttagggagagcgtctag

SEQ ID NO: 268966 - DNA, 366 bp, Artificial Sequence
  derived and/or modified sequence
atggccgccagcgtgctgaacaccgtgctgcggcggctgcccatgttgagtctgttccggggtagccatagggtacaggtgccactgcagacactgtgtaccaaggccccatctgaggaagactccctgagcagcgtccctataagcccctataaggacgagccatggaagtatctcgagtccgaggaataccaggagaggtacggaagccgacccgtgtgggcagattatcggcggaaccacaaggggggagtgcctccacagcggacgagaaagacctgcatccggaggaataaagtggtcggcaacccttgtccaatttgccgggaccacaagctgcacgtggatttccgagaatccgtgtag

SEQ ID NO: 268967 - DNA, 366 bp, Artificial Sequence
  derived and/or modified sequence
atggccgccagcgtgctgaacaccgtgctgcggcggctgcccatgctgtccctttttcgcgggagccatagagtgcaggtgcccttgcagacattgtgtaccaaggctccctcagaggaggatagtctatcctctgttcctatcagcccttacaaagatgaaccttggaagtacctggaatctgaggagtatcaggaaaggtacggttcccgcccagtttgggcagattacagaagaaatcacaaggggggggtaccgcctcagcggacccgcaagacatgtatcaggagaaacaaggtggtgggtaatccctgcccgatttgcagagaccacaaactgcatgtcgacttcagggaatccgtgtag

SEQ ID NO: 268968 - DNA, 366 bp, Artificial Sequence
  derived and/or modified sequence
atggccgccagcgtgctgaacaccgtgctgcggcggctgcccatgctgtcactattcagagggagccatagagtgcaggttcccctgcaaacactttgcacaaaggctccatccgaagaagactctctcagttcggttcccataagcccatataaagacgagccatggaagtatttggagtcggaggagtatcaggaaagatacgggtcccgacccgtctgggccgattacaggcggaatcacaaaggtggggttccccctcagagaacaaggaaaacatgcataagacgcaacaaagttgtaggcaacccatgccctatttgtagggatcataagttgcacgtggattttcgtgagtctgtttag

SEQ ID NO: 268969 - DNA, 366 bp, Artificial Sequence
  derived and/or modified sequence
atggccgccagcgtgctgaacaccgtgctgcggcggctgcccatgctctctttgttccgcggtagccacagagtgcaggttccgctgcaaacactatgcacaaaggcaccatcagaagaggattctctgtctagcgttccaatcagcccttacaaggacgaaccttggaagtatcttgaatcagaagaataccaagaacgctacgggtcaagacccgtttgggccgattaccggagaaaccacaagggaggtgtcccccctcagcgtaccaggaaaacctgcatccgacgaaacaaggttgtgggaaatccgtgccccatctgtcgcgaccacaagctccatgttgacttccgtgagagcgtgtag

SEQ ID NO: 268970 - DNA, 366 bp, Artificial Sequence
  derived and/or modified sequence
atggccgccagcgtgctgaacaccgtgctgcggcggctgcccatgctctctctctttcggggatcacaccgcgtgcaggtgccacttcagacactgtgtaccaaggctccttctgaagaagactctcttagttctgtaccaataagtccttataaggacgagccctggaagtatctcgagagtgaggaataccaggaacggtatgggtccagaccggtctgggccgactaccgaagaaaccataaaggaggtgtccccccacagcgtacacgcaaaacttgtatccgacgcaacaaggtggttggaaacccatgtcccatctgccgggaccacaagttgcacgttgacttccgggagtcagtgtag

SEQ ID NO: 268971 - DNA, 366 bp, Artificial Sequence
  derived and/or modified sequence
atggccgccagcgtgctgaacaccgtgctgcggcggctgcccatgttgtctctgtttcgtgggtcacatcgcgtccaagtgcctctccagaccttgtgtaccaaagctcctagcgaggaagattctctgtcttcagtcccaatctctccctataaagacgagccctggaaatacctggaatcagaagaatatcaggaacgatatggttcaaggccagtgtgggcggattaccgccgtaaccataagggaggagtgccgccgcagcgaactaggaagacttgcattcgccggaacaaagtcgtgggcaatccctgccccatctgcagagatcacaagctccatgtagacttcagggagtcagtttag

SEQ ID NO: 268972 - DNA, 366 bp, Artificial Sequence
  derived and/or modified sequence
atggcggctagtgtgttgaataccgtccttagacggctgccgatgttgagcttattccggggttctcacagggtgcaagtacctctccaaaccctgtgtacaaaagcgccaagcgaagaagactcactgagtagtgtgccaatatccccgtacaaagatgaaccctggaagtatctggaatctgaggaataccaggagagatatggctcacgaccagtatgggctgactataggcgcaaccacaaagggggagtgccaccacaaaggacaagaaaaacctgcatcaggcggaacaaagtggttgggaatccatgcccgatttgtagggatcacaaactgcacgtggacttccgcgagtccgtgtag

SEQ ID NO: 268973 - DNA, 366 bp, Artificial Sequence
  derived and/or modified sequence
atggcggcaagcgtgctgaatacggtcttgagaaggcttcccatgctcagcttgtttcggggaagccaccgagtgcaggtccctttgcaaacgctgtgtactaaggcccctagcgaggaggactctctctcaagcgtccctataagcccatataaagacgaaccatggaaatacttggagtctgaagagtaccaggagcggtacgggagtcgccctgtttgggctgattacaggcgaaaccacaaaggaggtgttccaccccaacggactcggaaaacctgtattagacggaacaaggtggtgggcaacccgtgtcctatttgcagggatcacaagttgcacgtggattttcgcgaatccgtatag

SEQ ID NO: 268974 - DNA, 366 bp, Artificial Sequence
  derived and/or modified sequence
atggccgctagcgtcctgaatacggtgctgcgcagactgccaatgctgagcctgttcagggggtctcacagagtacaagtgccactgcagacactatgtaccaaggcccctagcgaggaggacagtctcagctctgtgccaattagtccatacaaagacgaaccatggaaatatcttgagagtgaggagtatcaggagaggtacggttccagacctgtttgggccgattacaggagaaaccacaagggcggagtccctccacagcgaacaagaaagacctgtattcgcaggaataaagttgtaggaaacccctgccccatctgtagagatcacaagctacatgtcgactttcgagagagcgtgtag

SEQ ID NO: 268975 - DNA, 366 bp, Artificial Sequence
  derived and/or modified sequence
atggccgcaagtgtactaaacaccgtactgaggaggctgccaatgctcagcctattccgaggcagtcatagagtgcaggtgcctctccagacactttgtactaaagctcctagcgaggaagacagcctgtcttcagtgcccatttccccatacaaagacgagccatggaagtatctggaaagtgaagagtaccaggagcggtatggcagccggccagtatgggccgactatcgcaggaaccacaaaggaggagtaccccctcagcgcaccagaaagacctgcattaggcgcaacaaggtggtcggcaacccctgtccaatctgtcgtgatcataaactgcacgttgacttccgcgagtctgtctag

SEQ ID NO: 268976 - DNA, 366 bp, Artificial Sequence
  derived and/or modified sequence
atggccgcaagcgtacttaatacggtgctgcggagattgcctatgctgtccttattcagaggcagccacagggtgcaggtgccccttcagaccctgtgcacaaaagcaccgtcagaggaagacagcctgagtagtgtgccaattagcccctataaagatgagccttggaaatatctggaaagtgaggagtatcaggaacgatatggctctcgcccagtatgggctgattatcgtcgaaatcacaaaggtggtgtgccaccccagaggacacgaaagacatgtatccggagaaacaaggtggtcggcaatccgtgtccgatctgtcgggaccacaagctgcacgtagatttccgagaatccgtctag

SEQ ID NO: 268977 - DNA, 366 bp, Artificial Sequence
  derived and/or modified sequence
atggccgcaagtgtcttgaatactgtcctcaggcggctgcctatgctctctttgtttcgtggctcacaccgcgtgcaggtgcctcttcagactttatgcaccaaggccccttctgaggaagactccctgagctcggtgcccatctcaccctacaaagatgaaccctggaagtacctggagagcgaagagtatcaggagcggtacggctctaggcctgtatgggcagattaccggagaaaccataaaggcggtgttcctcctcagcgcacccggaaaacctgcatccggcgtaacaaggttgtcgggaacccctgtcctatttgtcgcgaccataagctgcacgtggacttccgagaaagcgtatag

SEQ ID NO: 268978 - DNA, 366 bp, Artificial Sequence
  derived and/or modified sequence
atggctgcatcagtcctgaatactgtactacgaaggcttccgatgctgtccctgttcagggggtcccatagagttcaggtgcccctccagaccctgtgcaccaaagctccttccgaggaagacagcctttctagcgtgccaatttccccttataaagacgagccatggaagtacctagaatcagaagagtatcaggagcggtatggcagccgacctgtctgggctgattacagacgtaaccacaaggggggtgtcccccctcagaggacacgcaagacctgcatcaggcgaaacaaagttgtgggcaacccctgccccatttgtagggaccacaaactccacgtggattttagagagtccgtgtag

SEQ ID NO: 268979 - DNA, 366 bp, Artificial Sequence
  derived and/or modified sequence
atggccgccagcgtgctgaacaccgtgctgagaagactgcccatgctgagcctgttcagaggcagccacagagtgcaggtgcccctgcagaccctgtgcaccaaggcccccagcgaggaggacagcctgagcagcgtgcccatcagcccctacaaggacgagccctggaagtacctggagagcgaggagtaccaggagagatacggcagcagacccgtgtgggccgactacagaagaaaccacaagggcggcgtgcccccccagagaaccagaaagacctgcatcagaagaaacaaggtggtgggcaacccctgccccatctgcagagaccacaagctgcacgtggacttcagagagagcgtgtag

SEQ ID NO: 268980 - DNA, 795 bp, Artificial Sequence
  derived and/or modified sequence
atggagaactatggaatagagtggcacagcgtgcgtgatagcgagggccaaaaactactaatcggcgtgggaccagaagggatctctatttgcaaggatgacttttctccaatcaatagaattgcgtatcccgttgtgcagatggccacacagagtgggaaaaacgtgtatctcactgttactaaggagtcaggaaattctattgttttgctgttcaaaatgatctcgactcgggccgccagtggactgtaccgggccattaccgagactcatgcgttctatcgatgtgacactgtaacgagcgctgtcatgatgcagtatagcagagatcttaagggccatctggccagtctattccttaacgaaaacattaatctgggcaaaaagtacgtctttgacattaagcgaacctccaaagaagtctacgaccacgcgagaagggccctgtacaatgcaggagtggtggaccttgtgagtaggaacaatcagagtccaagccattccccgctcaagtcctcggaatcctccatgaactgctcctcctgcgaaggcttatcctgccagcagacccgcgttctccaggaaaagctgcgcaagttgaaagaggcaatgttgtgtatggtatgctgtgaggaggaaatcaactctacattctgtccttgcggtcataccgtgtgctgcgagtcttgtgccgcccaactacagtcatgccccgtgtgccgcagtcgggtagagcacgtgcagcacgtgtaccttccgactcatacttccttgcttaatctcacggtgatctag

SEQ ID NO: 268981 - DNA, 795 bp, Artificial Sequence
  derived and/or modified sequence
atggagaactacggcatcgagtggcacagcgtgcgggacagcgagggccagaagctgctgattggagtgggccctgagggcatcagcatctgcaaggatgacttcagccccatcaacagaattgcctaccctgtggtgcagatggccacccagagcggcaagaatgtgtacctgactgtgaccaaggagagcggcaacagcatcgtgctgctcttcaagatgatcagcaccagggctgccagcggcctgtaccgggccatcacagagacccacgccttctaccgctgtgacacagtgaccagcgctgtgatgatgcagtacagccgggacctgaagggccacctggccagcctcttcctgaatgaaaacatcaacctgggcaagaagtatgtgtttgacatcaagaggaccagcaaggaggtgtatgaccacgcccggcgggccctgtacaatgctggggtggtggacctggtgtccaggaacaaccagagccccagccacagccccctgaagagcagcgagagctccatgaactgcagcagctgtgagggcctgagctgccagcagaccagggtgctgcaggagaagctgaggaagctgaaggaggccatgctgtgcatggtgtgctgtgaggaggagatcaacagcaccttctgcccctgtggccacacagtgtgctgtgagagctgtgccgcccagctgcagagctgccctgtgtgccgcagccgggtggagcacgtgcagcacgtgtacctgcccacccacaccagcctgctgaacctgaccgtcatctag

SEQ ID NO: 268982 - DNA, 795 bp, Artificial Sequence
  derived and/or modified sequence
atggagaactacggcatcgagtggcacagcgtgcgggacagcgagggtcagaagcttttaattggtgtcgggccggagggcatctcaatctgcaaggacgacttcagccctattaatcgaatagcataccccgtggtgcagatggctacacagtccggcaaaaacgtgtacctcaccgttacaaaggaatccggtaactctatagttcttctattcaagatgatctcgactcgggctgcaagtggactgtatagagctatcacggaaacgcatgccttctaccgctgtgacacagtcacaagtgctgtgatgatgcagtattcccgcgatttgaaagggcacttggccagccttttcttaaatgagaatatcaatttgggtaaaaagtacgttttcgacatcaaaagaactagtaaagaggtctatgatcacgccagaagggccctttataacgccggagtggtcgaccttgtcagcaggaacaatcaatcccccagccattcccctctgaaatcatcggaatcttccatgaactgcagttcctgtgaagggctgtcttgccagcagaccagagtcctgcaggagaagcttcggaagcttaaggaggccatgctgtgtatggtgtgttgcgaggaagagatcaattccactttttgcccgtgcggccacacagtctgttgtgagtcatgtgcagcccagcttcagagctgccctgtctgtaggtctcgcgtggagcatgtccagcacgtttatctccccacacacacctcattgctgaacctcaccgtcatttag

SEQ ID NO: 268983 - DNA, 795 bp, Artificial Sequence
  derived and/or modified sequence
atggagaactacgggatagagtggcattccgtccgggattcagagggacaaaaactcttgataggtgtcggcccagaaggtatcagcatctgtaaagatgacttctctcccattaatcgtattgcctatccagtggtgcagatggcaactcaaagcggtaagaacgtctacttgaccgtgacaaaggaatccggcaactccattgtgctgctgttcaagatgatttctaccagggcggcatctggcctctatcgagccatcacagaaacccatgccttctataggtgtgacacagtaacctctgccgtaatgatgcagtactcccgagatctcaaaggacacctggcctccctttttttgaacgaaaatataaacctcggcaagaagtacgtctttgatatcaaaagaacctccaaagaagtatacgaccatgctcgcagggccctgtataatgccggagtggttgacctggtgagtcgaaacaatcagtcccccagccactcacctctaaagagcagcgaatcctccatgaactgctcatcatgcgaaggtttgtcttgccagcagaccagagtgctgcaggaaaaactgaggaagctcaaggaagccatgctgtgtatggtgtgctgtgaggaggaaataaacagtactttttgtccatgtggtcatacggtgtgttgtgaatcatgcgcagcccagcttcagagctgtccagtctgtcgaagcagagtcgaacacgtccagcacgtgtaccttcccactcacacatctttacttaatctcacggttatctag

SEQ ID NO: 268984 - DNA, 795 bp, Artificial Sequence
  derived and/or modified sequence
atggagaactacggcatcgagtggcacagcgtgagagacagcgagggccagaagctgctgatcggcgtgggccccgagggcatcagcatctgcaaggacgacttcagccccatcaacagaatcgcctaccccgtggtgcagatggccacccagagcggcaagaacgtgtacctgaccgtgaccaaggagagcggcaacagcatcgtgctgctgttcaagatgatcagcaccagagccgccagcggcctgtacagagccatcaccgagacccacgccttctacagatgcgacaccgtgaccagcgccgtgatgatgcagtacagcagagacctgaagggccacctggccagcctgttcctgaacgagaacatcaacctgggcaagaagtacgtgttcgacatcaagagaaccagcaaggaggtgtacgaccacgccagaagagccctgtacaacgccggcgtggtggacctggtgagcagaaacaaccagagccccagccacagccccctgaagagcagcgagagcagcatgaactgcagcagctgcgagggcctgagctgccagcagaccagagtgctgcaggagaagctgagaaagctgaaggaggccatgctgtgcatggtgtgctgcgaggaggagatcaacagcaccttctgcccctgcggccacaccgtgtgctgcgagagctgcgccgcccagctgcagagctgccccgtgtgcagaagcagagtggagcacgtgcagcacgtgtacctgcccacccacaccagcctgctgaacctgaccgtgatctag

SEQ ID NO: 268985 - protein, 222 aa, Artificial Sequence
  derived and/or modified sequence
MAARPKLHYPNGRGRMESVRWVLAAAGVEFDEEFLETKEQLYKLQDGNHLLFQQVPMVEIDGMKLVQTRSILHYIADKHNLFGKNLKERTLIDMYVEGTLDLLELLIMHPFLKPDDQQKEVVNMAQKAIIRYFPVFEKILRGHGQSFLVGNQLSLADVILLQTILALEEKIPNILSAFPFLQEYTVKLSNIPTIKRFLEPGSKKKPPPDEIYVRTVYNIFRP

SEQ ID NO: 268986 - protein, 129 aa, Artificial Sequence
  derived and/or modified sequence
MYVEGTLDLLELLIMHPFLKPDDQQKEVVNMAQKAIIRYFPVFEKILRGHGQSFLVGNQLSLADVILLQTILALEEKIPNILSAFPFLQEYTVKLSNIPTIKRFLEPGSKKKPPPDEIYVRTVYNIFRP

SEQ ID NO: 268987 - protein, 89 aa, Artificial Sequence
  derived and/or modified sequence
MYVEGTLDLLELLIMHPFLKPDDQQKEVVNMAQKAIIRYFPVFEKILRGHGQSFLVGNQLSLADVILLQTILALEEKIPNILSAFPFLQ

SEQ ID NO: 268988 - DNA, 669 bp, Artificial Sequence
  derived and/or modified sequence
atggccgccaggcccaagttgcattacccaaacggacggggccgcatggagtcggtgcgatgggtgctggccgctgcgggagtcgaatttgacgaagagttcctcgaaacaaaagaacaactgtataagcttcaggacggaaaccacctactgttccaacaggttccaatggtcgagattgacggtatgaaactggtgcagacacggtccatcctgcattatatagccgataagcacaacttgtttggcaagaatctgaaggagaggaccctcattgacatgtacgtggaaggaaccctggacttgttggagctcttgatcatgcacccattccttaaaccggacgaccagcagaaggaagtagtgaacatggcccaaaaggccatcattagatacttcccagtcttcgaaaaaatactgaggggccacgggcagagttttctggtgggcaatcaactgagcctcgccgatgtaatcctcctccagaccatcctggcactcgaagagaagattcccaacattttgtctgcatttcctttcttacaagagtatactgtgaagctatccaacatacccacgatcaaacgtttcctggagcccgggagcaaaaaaaaacctccacctgatgagatatatgtgaggactgtgtacaatatcttccgcccttag

SEQ ID NO: 268989 - DNA, 669 bp, Artificial Sequence
  derived and/or modified sequence
atggctgcgcgtccaaaactgcattatcccaacggtcgtggccgcatggaatcggttaggtgggtcctggcggccgctggcgtcgagttcgacgaggaattcctggagacaaaagagcagctttacaaactccaggacgggaaccatctcctgttccagcaagtaccaatggtggagattgatggtatgaagctagttcaaacgaggagtatactgcattatattgcagataaacacaacctgttcggaaaaaacctgaaagagagaacgctgattgatatgtatgtggaaggcacattggatttactggagctgctgattatgcatcctttcctgaaacccgatgatcaacagaaggaagtggtgaacatggctcagaaggctatcatccgttacttccctgtcttcgagaagatactcagagggcacggccagtcatttctggtggggaatcaactttccttagctgatgttatcttactccaaaccatattagcattggaagagaagatccctaacattctcagcgcctttcccttcttgcaggagtacactgtaaagctcagcaacatccccaccataaagaggtttctggaaccgggatccaaaaagaaacctccaccggacgaaatctacgtgcgcaccgtgtacaacatctttaggccttag

SEQ ID NO: 268990 - DNA, 793 bp, Artificial Sequence
  derived and/or modified sequence
ctcactctcgcattcttccctcactcccccagttcagtccttctcttgtcttttcttcctcttgtcctttgtcctcctgctccatccagtctgggcagagaaagcctgaaaagctatcatggcagcaaggcccaagctccactatcccaacggaagaggccggatggagtccgtgagatgggttttagctgccgccggagtcgagtttgatgaagaatttctggaaacaaaagaacagttgtacaagttgcaggatggtaaccacctgctgttccaacaagtgcccatggttgaaattgacgggatgaagttggtacagacccgaagcattctccactacatagcagacaagcacaatctctttggcaagaacctcaaggagagaaccctgattgacatgtacgtggaggggacactggatctgctggaactgcttatcatgcatcctttcttaaaaccagatgatcagcaaaaggaagtggttaacatggcccagaaggctataattagatactttcctgtgtttgaaaagattttaaggggtcacggacaaagctttcttgttggtaatcagctgagccttgcagatgtgattttactccaaaccattttagctctagaagagaaaattcctaatatcctgtctgcatttcctttcctccaggaatacacagtgaaactaagtaatatccctacaattaagagattccttgaacctggcagcaagaagaagcctccccctgatgaaatttatgtgagaaccgtctacaacatctttaggccataaaacaac

SEQ ID NO: 268991 - DNA, 1334 bp, Artificial Sequence
  derived and/or modified sequence
agtctccattggtgaggtcgtcccggagcctcgcccagctcccgcgcgctagagccgcctgctggtctcacccagccgggaccgctgacctggcgctttgtgcggctccaggcctccgagtggactccagaaagcctgaaaagctatcatggcagcaaggcccaagctccactatcccaacggaagaggccggatggagtccgtgagatgggttttagctgccgccggagtcgagtttgatgaagaatttctggaaacaaaagaacagttgtacaagttgcaggatggtaaccacctgctgttccaacaagtgcccatggttgaaattgacgggatgaagttggtacagacccgaagcattctccactacatagcagacaagcacaatctctttggcaagaacctcaaggagagaaccctgattgacatgtacgtggaggggacactggatctgctggaactgcttatcatgcatcctttcttaaaaccagatgatcagcaaaaggaagtggttaacatggcccagaaggctataattagatactttcctgtgtttgaaaagattttaaggggtcacggacaaagctttcttgttggtaatcagctgagccttgcagatgtgattttactccaaaccattttagctctagaagagaaaattcctaatatcctgtctgcatttcctttcctccaggaatacacagtgaaactaagtaatatccctacaattaagagattccttgaacctggcagcaagaagaagcctccccctgatgaaatttatgtgagaaccgtctacaacatctttaggccataaaacaacacatccatgtgtgagtgacagtgtgttcctagagatggtattgtctacagtcatgtcttaatggatcccagctctgtcatggtgctatctatgtattaagttgggtcctaagttgggtcttttgtgtcaacgagatcatctcttctagaaatatcaaccttttttgtccagtaaataattgttaggggatctttattggaaaacttttttggagaggctggtatttaagttagatctgattgggctactcatgtcctgtagccagttcatcctcataataagaatgggcaggatctcttgttctctcctgagtgtctttctactctcctgagcgtctttctgctctccttatcctgttctcttatccttatcccctccagtctctgcctaatttttagtgtttaataacaaccgaatgtctagtaaatgactctcctctgagctgtaataaataaaatggtagtaatgaatgcaatcagtattagccaaaataaagaatttatgagtcatt

SEQ ID NO: 268992 - DNA, 669 bp, Artificial Sequence
  derived and/or modified sequence
atggccgcccggcccaagctgcactacccaaatggccggggccgcatggagagcgtgcgctgggtgctggccgccgccggcgtggagtttgatgaggagttcctggagaccaaggagcagctgtacaagctgcaggacggcaaccacctgctcttccagcaggtgcccatggtggagattgatggcatgaagctggtgcagaccaggagcatcctgcactacatcgctgacaagcacaacctgtttgggaagaacctgaaggagaggaccctgattgacatgtatgtggagggcaccctggacctgctggagctgctgatcatgcaccccttcctgaagccagatgaccagcagaaggaggtggtgaacatggcccagaaggccatcatccgctacttccctgtgtttgagaagatcctgcggggccacggccagagcttcctggtgggcaaccagctgagcctggctgatgtgatcctgctgcagaccatcctggccctggaggagaagatccccaacatcctgagcgccttccccttcctgcaggagtacacagtgaagctgagcaacatccccaccatcaagcgcttcctggagcccggcagcaagaagaagcccccaccagatgagatctacgtgaggacagtgtacaacatcttccggccctag

SEQ ID NO: 268993 - DNA, 669 bp, Artificial Sequence
  derived and/or modified sequence
atggccgcccggcccaagctgcactaccccaacggccggggccggatggaatctgttcggtgggtcctggctgccgcgggcgtggaatttgatgaggaatttctagagacaaaggaacagttgtataagcttcaggacggaaatcatctgttgttccagcaagtgccaatggtggaaattgacggaatgaaactggtgcagaccaggagcatattacactacattgcagataaacacaatttattcgggaagaatctgaaggaacgaactctcatagacatgtacgtggaaggaacactggatctcctggagctgctgataatgcatccctttctgaaacccgatgaccaacaaaaggaagtcgtgaacatggctcagaaggccatcatccgctatttccccgtgttcgagaaaattctcagaggccacggacagagctttctggtggggaatcagctgtccttggccgacgtgatcctgctgcagactatcctggcccttgaagaaaagatcccaaacatcctgtcagcattcccctttctgcaagagtacacagtgaagctcagtaatatacctactattaagcgtttcctggagccaggatccaaaaagaagcctccacccgatgagatctatgtgcgcaccgtttataacattttccggccatag

SEQ ID NO: 268994 - DNA, 669 bp, Artificial Sequence
  derived and/or modified sequence
atggccgcccggcccaagctgcactaccccaacggccggggccggatggagtccgtgagatgggtgctggcggctgccggagtggaattcgatgaggagttcctagaaaccaaagagcagttgtacaaactgcaggacggcaaccacctgctgtttcaacaggtccctatggtcgaaattgatggtatgaagttagtgcagacacgcagcatactgcattacattgctgacaagcacaacttgttcggtaagaacctcaaggagaggaccctcattgatatgtatgtggagggcacacttgacttgttagaactcctcataatgcacccttttcttaagcctgacgaccaacagaaggaggtggtgaatatggcacagaaggctatcataagatattttccagtcttcgagaaaatcctgcggggtcacggacagtctttcctcgtgggtaaccagctttcactcgcagacgtgatcttgctgcaaacaatcctagcactggaagaaaagatcccaaatatcctctctgctttcccctttctgcaagagtacacagttaagctcagcaacattcccactattaagagatttctcgaaccaggctcaaagaaaaagccaccacccgacgagatctatgtcagaacagtgtacaatatctttcggccctag

SEQ ID NO: 268995 - DNA, 669 bp, Artificial Sequence
  derived and/or modified sequence
atggcagccagacccaagttacactacccaaacggaagaggacgtatggaatcagtacgctgggttttggcagctgcaggggtggagtttgacgaagagtttttggaaaccaaagaacagctgtataagcttcaggatggcaatcacctgctgtttcaacaagttcctatggttgaaatagacggaatgaaactggtgcaaacccggtctattctgcattacatagctgacaagcacaacctcttcgggaaaaatctcaaagagagaacactgatcgacatgtatgtcgaagggacgctggatttgctcgaactcctgataatgcatccatttcttaaacctgacgaccaacagaaagaggttgtcaacatggctcagaaagcaattataagatacttccctgttttcgagaagatactgagaggccacgggcagagtttccttgttggaaatcagcttagcctggcagacgtgatcctcctccaaactatccttgccctggaggaaaagattcccaatattctaagtgcctttcccttcctccaagagtacacagtcaaactgagtaacatccccactattaaacggttcctggagcccggatctaaaaagaagccacccccagacgagatctatgtacgcacagtctataacatctttcgcccatag

SEQ ID NO: 268996 - DNA, 669 bp, Artificial Sequence
  derived and/or modified sequence
atggccgcaaggccaaagctgcattaccccaatgggcgaggcagaatggagtccgtgcgttgggtcttggctgcagccggtgtcgaatttgatgaggagttcctcgagacaaaggagcagctgtacaaacttcaggacggaaatcacttactgttccagcaggtgccgatggtggagattgacgggatgaaactcgtgcagactcgctctatcctgcactatatcgccgacaaacacaacctcttcggcaagaacctgaaggagcgcaccctgattgacatgtacgttgaaggcacactggacctgctggaactgctgatcatgcacccctttttgaaaccggacgaccaacagaaggaggtggttaacatggcccagaaagctattatccggtacttcccagttttcgagaaaatacttaggggccatggtcaaagctttcttgttggaaaccagttgtcactggcagatgttattctgctccagacaatcctggcgttggaggagaagatccctaatatcctgtctgccttcccatttctgcaggaatatacggtcaagttgagcaatatccctaccattaagagattcctggaaccgggatccaagaagaaacccccacccgatgaaatttacgtccggacagtgtacaacatcttcaggccttag

SEQ ID NO: 268997 - DNA, 669 bp, Artificial Sequence
  derived and/or modified sequence
atggccgccagacccaagctgcactaccccaacggcagaggcagaatggagagcgtgagatgggtgctggccgccgccggcgtggagttcgacgaggagttcctggagaccaaggagcagctgtacaagctgcaggacggcaaccacctgctgttccagcaggtgcccatggtggagatcgacggcatgaagctggtgcagaccagaagcatcctgcactacatcgccgacaagcacaacctgttcggcaagaacctgaaggagagaaccctgatcgacatgtacgtggagggcaccctggacctgctggagctgctgatcatgcaccccttcctgaagcccgacgaccagcagaaggaggtggtgaacatggcccagaaggccatcatcagatacttccccgtgttcgagaagatcctgagaggccacggccagagcttcctggtgggcaaccagctgagcctggccgacgtgatcctgctgcagaccatcctggccctggaggagaagatccccaacatcctgagcgccttccccttcctgcaggagtacaccgtgaagctgagcaacatccccaccatcaagagattcctggagcccggcagcaagaagaagcccccccccgacgagatctacgtgagaaccgtgtacaacatcttcagaccctag

SEQ ID NO: 268998 - protein, 86 aa, Artificial Sequence
  derived and/or modified sequence
MALRAGLVLGFHTLMTLLSPQEAGATKGRAGRHRRNQSPSGHPGGALQPQQSHQRASTGDRAPQVSGGAGPAQHPHLHRGQHLPPC

SEQ ID NO: 268999 - protein, 204 aa, Artificial Sequence
  derived and/or modified sequence
MGSYGPAFYQSYGASGQFTHEFDEEQLFSVDLKKSEAVWRLPEFGDFARFDPQGGLAGIAAIKAHLDILVERSNRSRAINVPPRVTVLPKSRVELGQPNILICIVDNIFPPVINITWLRNGQTVTEGVAQTSFYSQPDHLFRKFHYLPFVPSAEDVYDCQVEHWGLDAPLLRHWGNDPSERNDLWETPCRSSWVCDSPCVLSAL

SEQ ID NO: 269000 - DNA, 615 bp, Artificial Sequence
  derived and/or modified sequence
atgggcagctacggccccgccttctaccagagctacggcgccagcggccagttcacccacgagttcgacgaggagcagctgttcagcgtggacctgaagaagagcgaggccgtgtggagactgcccgagttcggcgacttcgccagattcgacccccagggcggcctggccggcatcgccgccatcaaggcccacctggacatcctggtggagagaagcaacagaagcagagccatcaacgtgccccccagagtgaccgtgctgcccaagagcagagtggagctgggccagcccaacatcctgatctgcatcgtggacaacatcttcccccccgtgatcaacatcacctggctgagaaacggccagaccgtgaccgagggcgtggcccagaccagcttctacagccagcccgaccacctgttcagaaagttccactacctgcccttcgtgcccagcgccgaggacgtgtacgactgccaggtggagcactggggcctggacgcccccctgctgagacactggggcaacgaccccagcgagagaaacgacctgtgggagaccccctgcagaagcagctgggtgtgcgacagcccctgcgtgctgagcgccctgtag

SEQ ID NO: 269001 - DNA, 615 bp, Artificial Sequence
  derived and/or modified sequence
atgggcagctacggccctgccttctatcagagttacggagcatctggacaattcacccacgagtttgacgaggaacagctcttttccgtcgatctcaagaaaagcgaggccgtctggcggttacccgaatttggggacttcgctaggttcgacccacagggcggccttgctgggatagcagcaattaaagcccatctggatattctggtcgaaagaagtaaccggtcaagggcaatcaacgtgccacccagagtcacagtgctccctaaatctagagtggagctaggacaaccgaacattctcatttgtatcgtggataatatctttccacctgttataaatatcacttggctgagaaacggacagactgttactgaaggggtggcccaaacttcgttctacagccagcccgaccatctgttccgaaaatttcattacctgccgtttgtgccctcagccgaagatgtgtacgactgtcaggtcgaacactgggggctggatgcacctctgttaaggcactggggaaatgatccttcagaacgcaacgatctttgggaaacaccttgtcgaagttcctgggtttgcgattctccctgcgtcctcagtgctctttag

SEQ ID NO: 269002 - DNA, 615 bp, Artificial Sequence
  derived and/or modified sequence
atgggatcatatggccccgcattttatcagagctacggcgcctctggccagtttactcacgaattcgacgaggaacagctattttctgtggatttgaaaaaaagcgaagccgtgtggagactcccagaatttggggattttgcccgattcgacccacagggcgggttagccggcattgcagccatcaaggctcatctggatattttggtggagcgttccaaccgtagccgggccatcaacgtgccaccgcgcgttacagtgctgcctaagtctagggtcgaattaggacagccgaatattctgatatgtattgtggataacattttcccaccggtgattaacatcacttggctccggaatgggcagaccgtcaccgagggagtcgcccagaccagtttctattcccaacccgaccacctgttccgcaaattccactacttgccgttcgtgccctctgcggaggatgtgtacgattgtcaggtggagcattgggggcttgatgctccactactgaggcactggggcaacgatcccagcgagcgtaatgacctgtgggaaactccatgtaggtccagctgggtctgtgacagcccttgtgtgctgtcagccttatag

SEQ ID NO: 269003 - DNA, 615 bp, Artificial Sequence
  derived and/or modified sequence
atgggaagttatggcccagccttttaccagtcctacggggccagcggccagttcactcatgaattcgacgaggagcagttgttcagcgttgacttgaagaagagtgaagcagtgtggcggctgcctgagttcggggatttcgccaggtttgatccccagggcggtctggcgggtatcgccgcgataaaagctcacctggatattctggttgaaagaagcaataggtcgcgtgccatcaatgtgcccccccgagtgacagttcttccgaagtcaagggtcgagctcgggcagcccaatatcctgatttgtatcgttgataatatctttccacctgtcatcaacatcacctggctccggaatggtcagacggttacagagggagtcgcccaaacttctttttactcccaaccagatcacttgtttcgaaagtttcactacctcccattcgttcccagcgctgaggatgtgtacgattgtcaagtggaacactggggactagatgcacctctcctgagacactggggcaatgacccaagcgaacggaacgatctgtgggaaaccccatgtaggtctagttgggtgtgtgacagtccatgcgtgctttctgccctgtag

SEQ ID NO: 269004 - DNA, 615 bp, Artificial Sequence
  derived and/or modified sequence
atgggcagctacgggccagcattctatcagtcctacggtgctagcggccagtttactcatgaatttgatgaggagcagctgttttcagttgatttgaagaagagcgaggccgtgtggaggcttcctgagttcggggactttgccagattcgatccccagggcggcctggccggcatcgcagcaatcaaggcccacctggacatattggttgaaagatcgaaccggagccgcgcaatcaatgtgcctcctagagtcacagtgcttcccaaaagccgcgtggaattaggccagcctaatattcttatttgtatcgtagataatatctttccacccgtgattaatatcacatggctgcgaaacggacagaccgtgactgagggagtagctcagacctcattctacagtcaaccagaccacttattcagaaaatttcactacctgccttttgttccaagcgccgaagatgtctatgattgtcaggtagagcactggggattagacgcccccctcctgcggcactggggcaacgacccctccgagaggaatgatctgtgggagaccccctgtagatcaagttgggtctgcgactctccatgcgtgctctccgctctgtag

SEQ ID NO: 269005 - DNA, 615 bp, Artificial Sequence
  derived and/or modified sequence
atgggctcatatggccctgccttctaccagagttatggcgcctcaggacagtttacacacgaatttgatgaggagcaactgttcagtgtggacctgaaaaagtccgaggccgtctggcgtttacctgaattcggggactttgctcgctttgacccgcaagggggactggcaggcatcgctgcgatcaaggcgcaccttgacattctggtcgaaaggagtaatcgaagcagggctatcaatgttccacctcgggttacagttttgcccaagagtcgggttgaactcgggcaaccgaacatacttatatgtatagtggacaacatattcccccccgtcattaacattacctggctcagaaatggccagacagttaccgagggtgttgcccaaacttccttctacagccaacccgaccacttgttccggaaattccactatttgccttttgttccctctgctgaggatgtttatgactgtcaagtggaacattgggggcttgatgcaccactcctcaggcactgggggaatgacccctccgagcggaatgatttgtgggagacaccatgtaggagctcgtgggtttgtgactccccctgtgtgctgtcggccctgtag

SEQ ID NO: 269006 - DNA, 615 bp, Artificial Sequence
  derived and/or modified sequence
atgggctcttatggacccgcgttttaccagtcctacggagcttccggccagttcacacacgagtttgatgaagagcagctgttttccgtagatctgaagaagagtgaagcagtttggcgactgccagagttcggtgacttcgctagatttgatccccaaggtggattggcaggaatcgccgccattaaggcccatctagatattttggttgaaagatcaaaccgctcccgtgccataaacgtcccaccacgagttaccgtcttaccaaaaagtcgggtcgaactgggtcagcctaatatcctgatctgcatcgtggataatatttttcctcccgtgattaatatcacctggctgagaaatggccagacagtgacagaaggcgtggcccagacctccttttacagtcagcccgatcacctattccgaaaatttcattatttgccattcgtgccaagcgcagaggatgtttacgattgccaggttgagcattgggggctggatgcaccgctgctgagacactggggcaatgacccctccgaaagaaacgacctctgggaaaccccatgtcggtcttcatgggtctgcgacagcccgtgtgtgctgtccgcactatag

SEQ ID NO: 269007 - DNA, 615 bp, Artificial Sequence
  derived and/or modified sequence
atgggctcttatggccccgccttttatcaaagctacggtgctagcggtcagtttactcacgagtttgacgaagaacagcttttttctgtagacctcaagaagtcagaggccgtgtggcgtctgccggaatttggagatttcgccaggttcgacccccagggaggactcgcaggcatcgcagcaatcaaggcccacctggatatcttggtggagcgtagcaaccgctcccgggccattaacgttcccccgagagtgaccgtacttcccaaatcacgggtggagttggggcagccaaacatcttaatatgcatcgtcgacaatatcttccccccggtgattaatatcacttggctccgcaacggccagacagtcacagagggtgtggctcaaacttcattttactctcagcccgatcatctgtttaggaagtttcactacctgccatttgttccttctgccgaggacgtgtatgactgccaggtggaacattggggccttgatgcccctctgctgcggcactgggggaatgatcctagtgagaggaatgacctgtgggaaacaccctgccgcagttcttgggtttgcgacagcccgtgcgtgctgagcgccctgtag

SEQ ID NO: 269008 - DNA, 615 bp, Artificial Sequence
  derived and/or modified sequence
atgggcagctatggccctgccttctaccagagctatggagccagcggccagttcacccatgaatttgatgaggagcagctgttctctgtggacctgaagaagtctgaggccgtgtggaggctgcctgagtttggagactttgccaggtttgacccccagggcggcctggccggcattgctgccatcaaggcccacctggacatcctggtggagaggagcaacagaagccgggccatcaacgtgcccccccgggtgacagtgctgcccaagagccgggtggagctgggccagcccaacatcctgatctgcatcgtggacaacatcttcccccctgtgatcaacatcacctggctgagaaatggccagacagtgacagaaggagtggcccagaccagcttctacagccagcctgaccacctgttcaggaagttccactacctgccctttgtgcccagcgcagaagatgtgtatgactgccaggtggagcactggggcctggatgcccccctgctgcggcactggggcaatgaccccagcgagagaaatgacctgtgggagaccccctgccgcagctcctgggtgtgtgacagcccctgtgtgctgagcgccctgtag

SEQ ID NO: 269009 - DNA, 1307 bp, Artificial Sequence
  derived and/or modified sequence
cacggactgagactgatttgattaaagcaccagagtgtaatggccctcagagcagggctggtcctggggttccacaccctgatgaccctcctgagcccgcaggaggcaggggccaccaaggggccagcccagtgtcagaacaggactctgtccccacacagaacccaggacggggcccaggctcagggactcaacaatcacatattgtggatgagacagacacatttttttctctctccttgaccctgaactcgccaaacacagctgaccacatgggctcctacggacccgccttctaccagtcttacggcgcctcgggccagttcacccatgaatttgatgaggaacagctgttctctgtggacctgaagaaaagcgaggccgtgtggcgtctgcctgagtttggtgactttgcccgctttgacccgcagggcgggctggccggcatcgccgcaatcaaagcccatctggacatcctggtggagcgctccaaccgcagcagagccatcaacgtgcctccacgggtgaccgtgctccccaagtctcgggtggagctgggccagcccaacatcctcatctgcatcgtggacaacatcttcccccctgtgatcaatatcacctggctgcgcaacggccaaactgtcactgagggagtggcccagaccagcttctattcccagcctgaccatttgttccgcaagttccactacctgcccttcgtgccctcagccgaggacgtctatgactgccaggtggagcactggggcctggatgcgccactcctcaggcattggggtaatgatccttctgagagaaatgacttgtgggagacaccctgcagatcctcatgggtttgtgacagcccctgcgtgctcagtgccctttaagtgcatcccgctgtgctgactttgagtgggatcaacatctgtcctacgggtcccctcttttttggccccagtattcatggcagggtttgttggacacctactagcttcccttcccattcaacacacacacacattcttgctctacccaaagctctggctggcagcactaaatgctttggtggtgtttgcactgtgtcctttccaggccttggccagttcttccaggggtgaggcatgtggtgctggggattggcagccatcctggggcccacacaggtgtgtcttgctccatttggcccattgtgtgttactttgtgaatgagccatttcacatggacttcatgaaatttgcctcctgagttcaggtttaccctgaaagggatgcagattatcctgttcctcacgaccccctcagctaac

SEQ ID NO: 269010 - DNA, 1307 bp, Artificial Sequence
  derived and/or modified sequence
cacggactgagactgatttgattaaagcaccagagtgtaatggccctcagagcagggctggtcctggggttccacaccctgatgaccctcctgagcccgcaggaggcaggggccaccaaggggccagcccagtgtcagaacaggactctgtccccacacagaacccaggacggggcccaggctcagggactcaacaatcacatattgtggatgagacagacacatttttttctctctccttgaccctgaactcgccaaacacagctgaccacatgggctcctacggacccgccttctaccagtcttacggcgcctcgggccagttcacccatgaatttgatgaggaacagctgttctctgtggacctgaagaaaagcgaggccgtgtggcgtctgcctgagtttggtgactttgcccgctttgacccgcagggcgggctggccggcatcgccgcaatcaaagcccatctggacatcctggtggagcgctccaaccgcagcagagccatcaacgtgcctccacgggtgaccgtgctccccaagtctcgggtggagctgggccagcccaacatcctcatctgcatcgtggacaacatcttcccccctgtgatcaatatcacctggctgcgcaacggccaaactgtcactgagggagtggcccagaccagcttctattcccagcctgaccatttgttccgcaagttccactacctgcccttcgtgccctcagccgaggacgtctatgactgccaggtggagcactggggcctggatgcgccactcctcaggcattggggtaatgatccttctgagagaaatgacttgtgggagacaccctgcagatcctcatgggtttgtgacagcccctgcgtgctcagtgccctttaagtgcatcccgctgtgctgactttgagtgggatcaacatctgtcctacgggtcccctcttttttggccccagtattcatggcagggtttgttggacacctactagcttcccttcccattcaacacaaacacacattcttgctctacccaaagctctggctggcagcactaaatgctttggtggtgtttgcactgtgtcctttccaggccttggccagttcttccaggggtgaggcatgtggtgctggggattggcagccatcctggggcccacacaggtgtgtcttgctccatttggcccattgtgtgttactttgtgaatgagccatttcacatggacttcatgaaatttgcctcctgagttcaggtttaccctgaaagggatgcagattatcctgttcctcacgaccccctcagctaac

SEQ ID NO: 269011 - DNA, 1307 bp, Artificial Sequence
  derived and/or modified sequence
cacggactgagactgatttgattaaagcaccagagtgtaatggccctcagagcagggctggtcctggggttccacaccctgatgaccctcctgagcccgcaggaggcaggggccaccaaggggccagcccagtgtcagaacaggactctgtccccacacagaacccaggacggggcccaggctcagggactcaacaatcacatattgtggatgagacagacacatttttttctctctccttgaccctgaactcgccaaacacagctgaccacatgggctcctacggacccgccttctaccagtcttacggcgcctcgggccagttcacccatgaatttgatgaggaacagctgttctctgtggacctgaagaaaagcgaggccgtgtggcgtctgcctgagtttggtgactttgcccgctttgacccgcagggtgggctggccggcatcgccgcaatcaaagcccatctggacatcctggtggagcgctccaaccgcagcagagccatcaacgtgcctccacgggtgaccgtgctccccaagtctcgggtggagctgggccagcccaacatcctcatctgcatcgtggacaacatcttcccccctgtgatcaatatcacctggctacgcaacggccaaactgtcactgagggagtggcccagaccagcttctattcccagcctgaccatttgttccgcaagttccactacctgcccttcgtgccctcagccgaggacgtctatgactgccaggtggagcactggggcctggatgcgccactcctcaggcattggggtaatgatccttctgagagaaatgacttgtgggagacaccctgcagatcctcatgggtttgtgacagcccctgcgtgctcagtgccctttaagtgcatcccgctgtgctgactttgagtgggatcaacatctgtcctacgggtcccctcttttttggccccagtattcatggcagggtttgttggacacctactagcttcccttcccattcaacacaaacacacattcttgctctacccaaagctctggctggcagcactaaatgctttggtggtgtttgcactgtgtcctttccaggccttggccagttcttccaggggtgaggcatgtggtgctggggattggcagccgtcctggggcccacacaggtgtgtcttgctccatttggcccattgtgtgttactttgtgaatgagccatttcacatggacttcatgaaatttgcctcctgagttcaggtttaccctgaaagggatgcagattatcctgttcctcacgaccccctcagctaac

SEQ ID NO: 269012 - DNA, 1307 bp, Artificial Sequence
  derived and/or modified sequence
cacggactgagactgatttgattaaagcaccagagtgtaatggccctcagagcagggctggtcctggggttccacaccctgatgaccctcctgagcccgcaggaggcaggggccaccaaggggccagcccagtgtcagaacaggactctgtccccacacagaacccaggacggggcccaggctcagggactcaacaatcacatattgtggatgagacagacacatttttttctctctccttgaccctgaactcgccaaacacagctgaccacatgggctcctacggacccgccttctaccagtcttacggcgcctcgggccagttcacccatgaatttgatgaggaacagctgttctctgtggacctgaagaaaagcgaggccgtgtggcgtctgcctgagtttggtgactttgcccgctttgacccgcagggcgggctggccggcatcgccgcaatcaaagcccatctggacatcctggtggagcgctccaaccgcagcagagccatcaacgtgcctccacgggtgaccgtgctccccaagtctcgggtggagctgggccagcccaacatcctcatctgcatcgtggacaacatcttcccccctgtgatcaatatcacctggctacgcaacggccaaactgtcactgagggagtggcccagaccagcttctattcccagcctgaccatttgttccgcaagttccactacctgcccttcgtgccctcagccgaggacgtctatgactgccaggtggagcactggggcctggatgcgccactcctcaggcattggggtaatgatccttctgagagaaatgacttgtgggagacaccctgcagatcctcatgggtttgtgacagcccctgcgtgctcagtgccctttaagtgcatcccgctgtgctgactttgagtgggatcaacatctgtcctacgggtcccctcttttttggccccagtattcatggcagggtttgttggacacctactagcttcccttcccattcaacacaaacacacattcttgctctacccaaagctctggctggcagcactaaatgctttggtggtgtttgcactgtgtcctttccaggccttggccagttcttccaggggtgaggcatgtggtgctggggattggcagccgtcctggggcccacacaggtgtgtcttgctccatttggcccattgtgtgttactttgtgaatgagccatttcacatggacttcatgaaatttgcctcctgagttcaggtttaccctgaaagggatgcagattatcctgttcctcacgaccccctcagctaac

SEQ ID NO: 269013 - DNA, 1307 bp, Artificial Sequence
  derived and/or modified sequence
cacggactgagactgatttgattaaagcaccagagtgcaatggccctcagagcagggctggtcctggggttccacaccctgatgaccctcctgagcccgcaggaggcaggggccaccaaggggccagcccagtgtcagaacaggactctgtccccacacagaacccaggacggggcccaggctcagggactcaacaatcacatattgtggatgagacagacacatttttttctctctccttgaccctgaactcgccaaacacagctgaccacatgggctcctacggacccgccttctaccagtcttacggcgcctcgggccagttcacccatgaatttgatgaggaacagctgttctctgtggacctgaagaaaagcgaggccgtgtggcgtctgcctgagtttggcgactttgcccgctttgacccgcagggcgggctggccggcatcgccgcaatcaaagcccatctggacatcctggtggagcgctccaaccgcagcagagccatcaacgtgcctccacgggtgaccgtgctccccaagtctcgggtggagctgggccagcccaacatcctcatctgcatcgtggacaacatcttcccccctgtgatcaatatcacctggctgcgcaacggccaaactgtcactgagggagtggcccagaccagcttctattcccagcctgaccatttgttccgcaagttccactacctgcccttcgtgccctcagccgaggacgtctatgactgccaggtggagcactggggcctggatgcgccactcctcaggcattggggtaatgatccttctgagagaaatgacttgtgggagacaccctgcagatcctcatgggtttgtgacagcccctgcgtgctcagtgccctttaagtgcatcccgctgtgctgactttgagtgggatcaacatctgtcctacgggtcccctcttttttggccccagtattcatggcagggtttgttggacacctactagcttcccttcccattcaacacacacacacattcttgctctacccaaagctctggctggcagcactaaatgctttggtggtatttgcactgtgtcctttccaggccttggccagttcttccaggggtgaggcatgtggtgctggggattggcagccatcctggggcccacacaggtgtgtcttgctccatttggcccattgtgtgttactttgtgaatgagccatttcacatggacttcatgaaatttgcctcctgagttcaggtttaccctgaaagggatgcagattatcctgttcctcacgaccccctcagctaac

SEQ ID NO: 269014 - DNA, 615 bp, Artificial Sequence
  derived and/or modified sequence
atgggcagctacggccccgccttctaccagagctacggcgccagcgggcagtttacccacgaattcgatgaggagcaactgttcagcgtcgatttaaaaaaaagcgaggccgtttggcgacttccagagttcggcgactttgctcgttttgaccctcagggggggctcgcagggatcgcagcgattaaggctcatctggatatcttggttgagaggtccaatcgctcccgcgctattaacgtaccccccagggtgactgtgcttccaaaaagcagggtcgagctagggcagcctaacattctgatatgcatcgtcgataacatatttccccccgtgattaatatcacctggctgaggaatggtcagaccgtcacagaaggcgtggcccaaacttctttctatagtcagcccgatcacttgtttaggaagtttcactacctccctttcgtgccctccgcggaggatgtctacgactgccaggtcgaacattggggcctggatgcgcccttgctgcgccactggggaaacgacccttcagaaagaaacgatctgtgggaaaccccgtgccgttcctcctgggtctgcgactccccctgtgtcctttctgctctgtag

SEQ ID NO: 269015 - DNA, 615 bp, Artificial Sequence
  derived and/or modified sequence
atgggcagctacggccccgccttctaccagagctacggcgccagcggacaattcacacacgagtttgacgaggaacagttgttttctgtagacctgaagaaatccgaagctgtatggaggctacctgagttcggtgactttgctagatttgatccacaaggtggattagccggaatagccgctattaaggcgcatctggacattttggttgaacggagcaacaggagcagagctatcaatgttccccccagagtgacagtgcttccaaagtccagagtggagctggggcagccgaatattctcatctgcatcgtagacaacatattcccacctgttatcaatattacttggttgaggaacggacagacagtgaccgagggggttgctcagaccagcttttattcccagccggatcaccttttcaggaagttccattatttaccattcgtccctagcgccgaggacgtgtatgactgccaggttgaacattggggtctcgatgcgccattacttcgccattggggaaacgacccttccgaacgcaacgatttatgggagaccccgtgccggtctagttgggtatgcgacagcccatgcgtgttgagtgccctttag

SEQ ID NO: 269016 - DNA, 615 bp, Artificial Sequence
  derived and/or modified sequence
atgggcagctacggccccgccttctaccagagctacggcgccagcggccaattcacccacgaattcgacgaagagcagctgtttagcgtggaccttaaaaaaagtgaggctgtgtggcggctgcccgaattcggcgactttgcccgctttgacccccaaggaggacttgcaggaatcgctgccattaaagcccatctggacatcctggtagagcgtagcaatcgctctagagccattaatgtgcctccccgtgttaccgttctgcccaaatccagggtggaactgggccagcccaatatcctgatctgcatagtagacaacatttttcctcctgttattaatatcacatggttgcgcaacggccagacagtcacagaaggtgtggctcagacttccttctatagtcagccggaccatttgtttaggaagtttcattatctgccctttgtgccatctgctgaggacgtttatgactgtcaggtcgagcactggggcctcgatgccccgcttctgcgccactggggaaacgaccccagcgagaggaatgacctgtgggagactccttgccgctccagttgggtgtgtgacagcccctgcgtcctgtccgctctatag

SEQ ID NO: 269017 - DNA, 615 bp, Artificial Sequence
  derived and/or modified sequence
atgggcagctacggccccgccttctaccagagctacggcgccagcggccagttcacccatgagttcgacgaggagcagctgttctccgtcgacttgaaaaagtcagaggccgtctggcgcctgccagagttcggggactttgcccgcttcgacccccaaggtggtctagccggaattgcagcgatcaaggcacacctggacattttagtggagcgctctaaccggtccagagccattaacgtcccaccgagagtcacagtgttgcctaaaagtcgggtagaactggggcaacctaacatcctgatctgtattgtggacaacatctttcctccggtgatcaatataacttggttgaggaatggccaaactgtgacagagggggtggctcaaacctcattctactcccagcccgatcacctgtttaggaaatttcactacctgcccttcgtgccgtcagctgaagatgtctatgactgccaagtggagcactggggcctagacgcccctctcctccgacactgggggaacgatcctagcgaaagaaatgacctctgggagacaccgtgccgtagcagctgggtatgtgattctccttgcgtgttgtcagccctgtag

SEQ ID NO: 269018 - DNA, 615 bp, Artificial Sequence
  derived and/or modified sequence
atgggcagctacggccccgccttctaccagagctacggcgccagcggccagttcacacacgagttcgacgaagagcaactattttctgtggacctgaaaaaatccgaggcagtgtggaggctgcctgagttcggcgatttcgcccgatttgacccccaggggggtctagctggtattgcagcaatcaaggcccatctggatattctggttgaacgcagcaaccggtccagagctataaatgtgccacctagagtaaccgtcttgcccaagtcccgggtggaactaggccagccaaacatcctcatctgtattgtggataatatctttccacccgtgatcaatattacctggctgcggaatggacaaactgttacggaaggagttgcacagacttccttttactcccagccagatcacctttttcgcaagttccactacctgccctttgtaccttccgctgaggacgtgtatgactgccaggtggagcactggggcctggacgcacctttacttagacactggggtaacgacccttctgaacggaatgacctctgggaaactccctgtagaagctcatgggtttgtgattccccgtgcgtcttgtccgctttatag

SEQ ID NO: 269019 - DNA, 615 bp, Artificial Sequence
  derived and/or modified sequence
atgggcagctacggccccgccttctaccagagctacggcgccagcggccagttcacccacgaattcgatgaagagcaactgttcagcgtcgatctgaaaaaatccgaagctgtgtggaggctgcctgaatttggagactttgccaggttcgacccacagggtggactcgccggaatagccgctatcaaggcacaccttgacattctggtagaacggagtaaccgatctcgagctattaatgtccccccgagggtgacagtgttacctaaaagtcgagtggagctaggacagccaaacatactcatttgtatagtagacaatatcttccctccagtaatcaatattacatggcttcgaaacggccagaccgtgacggagggtgtggctcaaacctcattttattcgcagccagaccacctgttcagaaaattccactatcttccttttgttccctctgccgaggacgtgtacgactgccaggtggaacactgggggcttgatgcccctctgctgaggcattggggcaatgatcccagcgagagaaatgacctatgggagactccgtgtaggagttcttgggtgtgtgattccccttgcgtgctctcagccctatag

SEQ ID NO: 269020 - DNA, 615 bp, Artificial Sequence
  derived and/or modified sequence
atgggcagctacggccccgccttctaccagagctacggcgccagcggtcaattcacccatgagttcgacgaggagcagctcttttcagtcgacttgaagaagtccgaagctgtctggcgactgcctgaatttggggactttgccaggttcgacccacaaggaggcttggcggggatcgcggcgatcaaggcccatctcgacatacttgtcgaaaggtccaatagatccagagcaatcaatgtccctcccagggtgaccgtcctacccaaaagtagggttgagctggggcagcccaatatccttatctgcatcgttgacaacatcttccctccggttattaatatcacttggctgcgtaacggccagactgtgacagaaggcgtggcccagacatctttttactcacaaccggaccatctttttcgcaagtttcattaccttcctttcgtgccttcggcagaggatgtctacgattgtcaggtagaacattggggccttgacgctccactgttgaggcattgggggaacgaccctagcgagcggaacgacttgtgggagacaccatgtagatctagttgggtatgtgattccccttgcgtgctgtccgccttgtag

SEQ ID NO: 269021 - DNA, 615 bp, Artificial Sequence
  derived and/or modified sequence
atgggaagctacgggccagctttttaccagagctatggagcttctggacaatttacccatgaatttgatgaggaacagctatttagcgtcgatctgaaaaagtccgaagcagtatggcgtttgcccgaattcggcgatttcgcccgtttcgatccccagggaggcttagcaggaatcgcggcaatcaaggcacaccttgacatcttagtggagcgctccaaccgctctcgagccataaatgtgcctcctcgtgtgactgtgctgcccaagtcccgagtggaattggggcagcctaatatattgatttgtattgtagacaatatctttccgccagtcatcaacatcacatggctgcgcaatgggcagaccgtcaccgagggcgtggcgcagacgtccttttattcccaacctgatcacctgttccgcaaattccactacctacctttcgtcccaagcgccgaagatgtctacgattgtcaggttgagcactgggggcttgatgcccctctgctgaggcattgggggaacgacccgagcgagcgtaacgacctttgggagactccttgcagatctagctgggtgtgtgattcaccttgtgtcctttccgcactgtag

SEQ ID NO: 269022 - DNA, 615 bp, Artificial Sequence
  derived and/or modified sequence
atgggctcgtacggaccggctttctatcagtcttatggggcaagcgggcagttcactcatgagtttgatgaagaacagttgttttcagttgatcttaagaagagtgaggccgtctggagactgcctgagttcggagacttcgctaggttcgacccccagggcggactggcgggaatagctgcaataaaagcccacctcgacattttggtggagcggagcaatcgatcgcgggcaattaacgtgccacctcgcgtgaccgtactgccaaaaagccgggtagaactcgggcaacccaatattctgatttgcattgtggataacatcttccccccagtcataaacatcacctggctccgtaatggacagactgtgacagagggggtggcccagacgtctttttattctcaacccgatcacctgtttcgtaagtttcactaccttccttttgtgccgtcagctgaagatgtttatgactgtcaagttgaacattggggtctcgacgcaccactactaaggcactggggtaatgatccaagcgagaggaatgacctctgggagacaccctgcaggtcatcctgggtatgtgactcgccgtgcgtcctctcagcactgtag

SEQ ID NO: 269023 - DNA, 615 bp, Artificial Sequence
  derived and/or modified sequence
atggggtcatacggaccggcattctatcagtcatacggcgcttccggccagttcacccacgaatttgacgaggaacagctgttctctgtggatctgaaaaagagcgaagcagtgtggaggcttccagaattcggggatttcgcaaggtttgacccccaggggggtttggccggaattgcggctatcaaagctcacctggatatccttgtggaaaggtctaatagatcacgggctattaacgtacccccacgagtaacagtgttgcccaaaagccgggtggaactcggtcaaccaaacatactgatctgcatcgtggataacattttccctcccgtcatcaatattacgtggctgcgcaatgggcagaccgttacggaaggagttgcccaaacatcattttactcacaaccggaccaccttttccggaaatttcattatctgccattcgttccctccgcggaggatgtttacgactgccaggtcgagcattggggcctggatgcccctcttttacgtcactggggcaacgacccaagcgagcgtaacgatctctgggaaaccccctgccgctctagctgggtatgtgacagcccttgtgtgctcagtgctttatag

SEQ ID NO: 269024 - DNA, 615 bp, Artificial Sequence
  derived and/or modified sequence
atgggaagctacgggccagcattctaccagtcctatggagctagtggacagtttacacacgagtttgacgaagagcagctcttctcagtggatcttaagaaatccgaggcggtgtggaggcttcccgagttcggtgatttcgcacgcttcgaccctcaggggggactcgcgggaatcgctgccataaaggcccacttagacattctcgtcgagcgcagcaatcggagtagagccatcaacgtacccccaagggtgacagtgctacctaaatcccgagtcgaattaggccagccaaacattttaatttgcatagttgacaacatcttccccccagttattaacatcacctggcttcgtaacgggcaaacggtgacagagggggttgctcagacatccttctatagtcagccggatcatttgtttcgtaaatttcactaccttcccttcgttcctagtgccgaggatgtctatgactgccaggtcgaacactggggtctggatgcaccactgctgcgtcactggggcaacgatccttcggaacgaaatgacctctgggagacaccctgtcgtagctcatgggtctgcgacagtccctgtgttctttcagccttatag

SEQ ID NO: 269025 - DNA, 615 bp, Artificial Sequence
  derived and/or modified sequence
atggggtcctacggtcccgctttctaccagtcctatggggcaagtggccagttcacccacgagttcgacgaagaacagctattttcagtggatctcaaaaaatctgaagccgtctggcgcctgccagagtttggcgattttgcacgtttcgaccctcaggggggactggccggaattgccgctatcaaggcccatctcgacatcctcgtggaaaggagcaaccgtagtagggcaattaatgtgccaccacgcgttactgtgctccccaagtctagggtggagttgggccagccgaacatactgatctgtatagttgataacatctttcctccagtgatcaacatcacctggcttcgcaacgggcagaccgtgactgagggggtagcacaaacttctttctatagccagccagatcatttgttccggaaattccactacttacccttcgtccccagtgccgaggatgtttacgattgtcaagtggagcattggggattggatgccccattattaagacactggggtaatgacccaagcgaaaggaatgacctttgggaaacaccatgtaggtcttcgtgggtgtgtgactctccctgtgtgctttcagctctgtag

SEQ ID NO: 269026 - DNA, 615 bp, Artificial Sequence
  derived and/or modified sequence
atggggtcctacggccctgccttttatcagtcttatggggcatcaggacagttcacccatgagttcgatgaggaacagctgttctcagtggatctgaagaagtctgaagccgtgtggcggctccctgagtttggggattttgcaagatttgaccctcagggtggactcgctggcatcgccgctataaaggcacatttggacatcctggttgaacgcagcaaccgtagccgcgctatcaacgtaccgcctagagtgactgtcctacctaaatcaagggtcgagctggggcaaccaaacatactgatatgtatcgtggacaatatcttcccacctgtcatcaacattacctggctgaggaacggacagacggttacagagggagtggcccagaccagcttttattcccagccagatcatctgttcagaaagtttcactaccttccctttgtcccctcggctgaggacgtatatgattgtcaggtagagcactggggcctggacgcacccctgcttaggcattgggggaacgatccctctgagcggaatgatctctgggaaaccccctgtcgatcttcttgggtgtgcgattctccgtgcgtgctctccgcgctgtag

SEQ ID NO: 269027 - DNA, 615 bp, Artificial Sequence
  derived and/or modified sequence
atgggttcttacggaccggctttctatcagtcgtatggggcatccggccagtttacacatgagtttgatgaggagcaactcttctccgtcgacctgaaaaagagtgaagccgtttggcggctccctgagttcggtgacttcgcgaggtttgacccacagggcggacttgctgggatcgcagcaatcaaagctcatctagatattctggtggagcggtctaaccgttcacgggctataaacgtcccccctagagtcacagtgctgcctaagtctagagtcgagcttgggcagcccaacattctcatctgcatcgtggacaacattttcccccctgtgatcaatataacctggctccgcaacgggcagacagtcacagaaggagtggcacaaaccagcttttactctcaacctgaccatctgttccgtaagttccactacctgccctttgttcctagcgctgaggatgtgtatgattgtcaggtggagcattggggtttggatgcccctttactgcgccattggggcaatgatccaagcgagagaaatgacctctgggaaacgccatgtcgcagttcatgggtctgcgatagcccatgtgtcctgtccgcactgtag

SEQ ID NO: 269028 - DNA, 255 bp, Artificial Sequence
  derived and/or modified sequence
atgaagcgggagcccaagaacctgagcagcgagcaggtgctgaagccaacatatagccagtctaagcccaatagaattagactgtactattggggccttggactgaatctgagagcagcagcgtctgaagccaaccgcatggaaagcaaaaaggtcggtaagcgcttgggcgccggaaagcagcagatgggggccgagctgactgaacagcatatggcccgcatttctcttcccgcgaagatcttgggatattag

SEQ ID NO: 269029 - protein, 275 aa, Artificial Sequence
  derived and/or modified sequence
MALQIPGGFWAAAVTVMLVMLSTPVAEARDFPKDFLVQFKGMCYFTNGTERVRGVARYIYNREEYGRFDSDVGEFQAVTELGRSIEDWNNYKDFLEQERAAVDKVCRHNYEAELRTTLQRQVEPTVTISPSRTEALNHHNLLVCSVTDFYPAQIKVRWFRNDQEETAGVVSTSLIRNGDWTFQILVMLEITPQRGDIYTCQVEHPSLQSPITVEWRAQSESAQSKMLSGIGGFVLGLIFLGLGLIIRHRGQKGPRGPPPAGNISAMIQSGERAQA

SEQ ID NO: 269030 - DNA, 828 bp, Artificial Sequence
  derived and/or modified sequence
atggccctgcagatccccggcggcttctgggccgccgccgtgaccgtgatgctggtgatgctgagcacccccgtggccgaggccagagacttccccaaggacttcctggtgcagttcaagggcatgtgctacttcaccaacggcaccgagagagtgagaggcgtggccagatacatctacaacagagaggagtacggcagattcgacagcgacgtgggcgagttccaggccgtgaccgagctgggcagaagcatcgaggactggaacaactacaaggacttcctggagcaggagagagccgccgtggacaaggtgtgcagacacaactacgaggccgagctgagaaccaccctgcagagacaggtggagcccaccgtgaccatcagccccagcagaaccgaggccctgaaccaccacaacctgctggtgtgcagcgtgaccgacttctaccccgcccagatcaaggtgagatggttcagaaacgaccaggaggagaccgccggcgtggtgagcaccagcctgatcagaaacggcgactggaccttccagatcctggtgatgctggagatcaccccccagagaggcgacatctacacctgccaggtggagcaccccagcctgcagagccccatcaccgtggagtggagagcccagagcgagagcgcccagagcaagatgctgagcggcatcggcggcttcgtgctgggcctgatcttcctgggcctgggcctgatcatcagacacagaggccagaagggccccagaggccccccccccgccggcaacatcagcgccatgatccagagcggcgagagagcccaggcctag

SEQ ID NO: 269031 - DNA, 828 bp, Artificial Sequence
  derived and/or modified sequence
atggcactgcaaattcccggaggattttgggctgccgcagtaacagtcatgctcgtgatgctgtcgacccctgttgcagaggcccgcgattttcctaaggacttcctggttcagttcaaaggaatgtgttacttcaccaacggtacagagcgtgtgcgcggcgttgcccgctacatctataaccgggaagagtacggtagattcgactctgatgtaggtgaattccaggccgttacagagctcggacgctctattgaagattggaataattacaaagattttcttgagcaggaacgggcagccgtggacaaggtctgcagacacaactacgaggccgagctgagaacaacactgcagcgccaggtcgaaccgactgtgacaatctctcccagccgcactgaggctcttaaccatcacaacctcctggtctgctctgtgacagacttttatcccgctcagattaaggtacgttggtttaggaacgaccaggaggaaaccgcaggagtggtgagcacctccctcattcgcaatggtgattggacgttccagatcttggtcatgctggaaatcaccccccaaaggggtgacatctatacgtgtcaagtcgaacatccctccctacagagcccaattaccgttgaatggagagcacagagcgaatcagcgcagtcaaaaatgctttcaggaataggcggtttcgtgcttggcctgatatttctgggactgggcctgattataagacatcgtggtcagaagggtccgaggggcccacccccagcgggaaatattagtgccatgattcagagcggggaacgtgcccaagcatag

SEQ ID NO: 269032 - DNA, 828 bp, Artificial Sequence
  derived and/or modified sequence
atggctttacagatccccggcgggttctgggccgccgcagtaacagtgatgctcgtaatgctaagtactcctgttgccgaggctcgcgatttccccaaggattttcttgttcagtttaaagggatgtgctatttcacaaatggaacagagcgggtaagaggcgtcgctcgttacatttataatagggaggagtacgggaggtttgacagcgacgttggcgagtttcaagccgtcaccgagttgggacgtagcatcgaggattggaataattacaaggactttctcgaacaggaaagagccgcggtcgataaagtgtgccgtcacaattacgaggcggaactgagaacaacactgcagcgtcaggttgaaccaacagtcacaatatccccttctagaaccgaagccctcaatcatcataacctgctcgtgtgctccgtgactgacttttatccggcacagattaaagtgaggtggtttaggaacgatcaggaggaaaccgccggcgtggtgtcaacctctctgatcaggaacggcgattggaccttccagatattagtgatgctggagatcactccacagcgcggggatatttacacctgtcaggtggaacatccttctcttcagtccccgatcaccgtcgaatggagggcacagtctgagagcgcacagtcaaagatgctgtctggcattggagggttcgttctgggcctgatttttcttgggctgggtctgattatcaggcaccgaggccagaaaggacctagggggcccccccctgcgggtaacatctccgccatgattcagtcgggggagagggcccaggcatag

SEQ ID NO: 269033 - DNA, 828 bp, Artificial Sequence
  derived and/or modified sequence
atggctctccaaatccccggaggcttctgggccgccgccgtgactgtgatgctggtcatgttgtccacccccgtggctgaagctcgggactttccaaaagacttcttggttcagttcaagggcatgtgctacttcactaacgggaccgagagagttaggggcgtcgccaggtacatctacaatcgggaggaatacggccgattcgattctgacgttggcgaatttcaggcagtaacagagcttgggagaagcattgaagactggaacaattacaaagactttctggagcaagagcgagcagctgtcgacaaggtgtgtcggcacaactatgaggccgagctgagaacaacattacagagacaggtcgaaccgactgtgaccataagccccagtagaaccgaggcactgaaccaccacaatctgctggtgtgctcagtcaccgacttctaccctgcccagattaaggtgagatggtttcgtaacgaccaggaagagactgctggggtcgtttcaacttcgttgatccgaaatggggattggacattccagatccttgtgatgctcgaaattacgcctcagagaggggatatctacacatgccaggttgaacatccgagtctgcagagtcctatcacagtcgagtggcgggcacagtccgaaagtgcacaatctaaaatgctctctggaataggggggttcgtactggggttgatcttcctgggtctaggcttaatcatccgccatcgtggacagaagggcccccgcggaccccctcctgccggcaacatcagtgctatgatacagagcggtgagcgggctcaggcatag

SEQ ID NO: 269034 - DNA, 828 bp, Artificial Sequence
  derived and/or modified sequence
atggcccttcagatacccggcgggttctgggctgcagccgttaccgtgatgctagtaatgctgagcactcccgtggcagaagctcgagacttccccaaagatttcctcgtccagtttaagggaatgtgttactttacaaacggcacagagagggtgagaggcgttgcacgctatatatacaatagggaggaatatggtcgcttcgactccgatgtgggcgagtttcaggcggttacggaactcggcaggtccatagaggattggaataactacaaagacttcctggaacaggaaagagcagcagtggacaaggtttgcagacacaactatgaggctgagctgaggaccactctgcagcgacaggttgagcccactgtaaccatttctccttcacgaaccgaagcactcaaccatcacaaccttctggtgtgctcagtgacggatttctaccccgcccagatcaaggtaaggtggttccggaatgaccaggaggagacagcgggagtagtgtcaacctccctcatccgcaatggagattggacattccagatcttggtaatgctagagattactcctcagaggggggacatctatacttgccaagtggagcaccccagcctccagtctcccatcaccgttgaatggcgagctcagagtgaatccgcccagagcaagatgctgtccggaatcggtggctttgtgcttgggctgatcttcctgggcctcggcctgattattcgacacaggggccaaaaggggccacgggggcctccccctgccggcaatatatccgctatgatccaaagcggggaacgagcacaagcctag

SEQ ID NO: 269035 - DNA, 828 bp, Artificial Sequence
  derived and/or modified sequence
atggccctgcagatccctgggggcttctgggccgctgctgtgacagtgatgctggtgatgctgagcacccctgtggccgaggcccgggacttccccaaggacttcctggtgcagttcaagggcatgtgctacttcaccaatggaacagagcgggtgcggggcgtggcccgctacatctacaaccgggaggagtatggccgctttgacagtgatgtgggggagttccaggccgtgacagagctgggccgcagcattgaggactggaacaactacaaggacttcctggagcaggagagagctgctgtggacaaggtgtgccgccacaactatgaggccgagctgcggaccaccctgcagaggcaggtggagcccaccgtgaccatcagccccagcaggacagaggccctgaaccaccacaacctgctggtgtgcagcgtgacagacttctacccagcccagatcaaggtgcgctggttcagaaatgaccaggaggagacagctggggtggtgtccaccagcctcatcagaaatggagactggaccttccagatcctggtgatgctggagatcaccccccagagaggagacatctacacctgccaggtggagcaccccagcctgcagagccccatcaccgtggagtggagggcccagagcgagagcgcccagagcaagatgctgagcggcatcggcggctttgtgctgggcctcatcttcctgggcctgggcctcatcatccgccaccggggccagaagggcccccggggccccccacctgctggcaacatcagcgccatgatccagagcggggagcgggcccaggcctag

SEQ ID NO: 269036 - DNA, 828 bp, Artificial Sequence
  derived and/or modified sequence
atggccctgcagatccccggcggcttctgggccgccgccgtgaccgttatgttagttatgctgtccacacctgttgcagaagccagggacttcccgaaagacttcctcgttcagttcaaaggcatgtgctacttcaccaatggcaccgagcgagtccgaggagtagcgcgatacatctacaatcgtgaggagtatggccggtttgattccgatgtgggggagtttcaggcagtgaccgagttggggcgatcaatcgaagactggaataactacaaggactttctggagcaggaacgggctgccgtggacaaggtgtgtcgacacaactatgaggcggagctgagaacaaccctgcagaggcaagtggaaccaacagttacgattagcccatcaagaactgaagcgctgaatcatcataatctgctcgtctgctccgtgacagatttttatcccgctcagataaaagttcggtggttccgaaacgaccaggaggagacagccggtgtggttagcacaagtctaatcaggaatggagactggactttccagatactcgtcatgttagaaattaccccccagcggggcgatatctacacgtgccaggttgagcatccctcgctgcagtctccgattacggtcgaatggagggcacaatccgaatccgcccagagcaagatgctgagtggaatcggtggcttcgtgctgggcttgatattcctgggactcggtctgattattagacatagaggtcagaagggtccgcgagggcccccaccagcagggaacattagcgcgatgattcagtctggagaaagggctcaagcctag

SEQ ID NO: 269037 - DNA, 828 bp, Artificial Sequence
  derived and/or modified sequence
atggccctgcagatccccggcggcttctgggccgccgccgtgaccgtcatgttggtaatgctttcaacccccgtggccgaggcaagagacttcccgaaggactttctggtgcagtttaagggcatgtgttactttaccaacggcaccgagcgcgtgcggggcgtagcaaggtacatttacaatcgcgaagagtatgggcggttcgattccgatgttggagaattccaagccgtcacagagctgggccgtagcatagaagactggaacaactataaggactttcttgagcaagaacgagccgcggtggataaggtgtgtcgacataattacgaagctgaacttaggacaaccttgcagagacaggttgagcctaccgtgaccatcagtcctagcaggacagaggccctaaatcatcacaatttattagtgtgctccgttacagatttctatccggctcagatcaaggtcaggtggttccgcaatgaccaggaagagacagcaggcgtggtgtccacaagtctgatcaggaacggggactggaccttccagatcctcgtgatgctagaaatcacccctcagcgcggtgatatatatacatgccaggtggagcacccaagtttacagtctcccattactgtcgaatggagggcacagagtgaaagcgctcagtccaagatgcttagtggtattggggggttcgtcttaggcctcatttttttaggcctcggcctgatcataaggcaccgcgggcaaaaaggccctagagggcccccccctgcgggcaacatttccgcaatgattcagtctggagaacgcgctcaggcttag

SEQ ID NO: 269038 - DNA, 828 bp, Artificial Sequence
  derived and/or modified sequence
atggccctgcagatccccggcggcttctgggccgccgccgtgaccgtgatgctggtgatgctgagcacgcctgtagccgaggccagggattttccgaaagactttcttgtgcagtttaagggaatgtgctattttaccaacgggacagagcgggttagaggagtggcgcgctatatttacaaccgcgaagaatacggcaggttcgattctgatgtgggagagtttcaggccgtgactgagctaggccggtcgatcgaagactggaataattataaagatttcctcgaacaggaacgggctgccgtggacaaagtatgcagacacaactacgaggccgagctcagaaccaccttacagagacaggtggaacccacggttacgattagtccatccagaactgaggctctcaaccaccataatctgttagtatgtagcgtgaccgatttctatcctgcccagatcaaagtgagatggttcaggaatgatcaagaggaaactgccggcgttgtgtcaacatcattgattaggaatggagactggactttccagatactcgtgatgctcgagatcaccccccagcgcggcgatatttacacttgccaggtagagcaccctagcctgcagagcccgattactgtggaatggagggcccaaagcgagagcgcccagtccaagatgttgtcaggtattggcggatttgtgctgggcttgatctttctgggattgggcttaatcattcgccacaggggacaaaaaggtcctcgcgggccacccccagctggcaatattagcgccatgatccaaagcggagagcgggctcaggcatag

SEQ ID NO: 269039 - DNA, 828 bp, Artificial Sequence
  derived and/or modified sequence
atggccctgcagatccccggcggcttctgggccgccgccgtgaccgtgatgctggtcatgcttagcacccctgtggccgaagccagggattttcctaaagactttctagttcaatttaagggcatgtgttactttacgaacgggacagaacgagtgagaggcgtcgctagatatatctataaccgcgaggagtacggtcgttttgacagcgacgtaggcgagttccaggcagttacagaactcgggcgcagtatcgaagactggaataactataaggattttctggaacaagaaagggccgctgtggataaggtgtgccgccataattacgaagccgaattacgcacaaccctccaacggcaagtcgagcccacagtcaccatcagcccctctcgaaccgaggccctaaatcatcataacctgttggtgtgctccgtgactgatttctatcctgcacagattaaggttagatggttccgtaacgaccaagaagaaacagccggcgtggtctccacttctttaatccgcaatggtgactggacattccagattttagtaatgctagaaatcacccctcagcgcggagacatctatacatgccaggtggagcacccaagccttcagagccccattacagttgagtggagagcccagtcagaatccgcccagtctaaaatgctttccgggatcggcggatttgtactcggcctaatctttttgggccttgggctgatcatcagacacaggggacaaaaaggcccacgaggcccaccccccgctggcaacatcagtgcgatgatacagtctggtgagcgggcacaggcatag

SEQ ID NO: 269040 - DNA, 828 bp, Artificial Sequence
  derived and/or modified sequence
atggcgctccagataccagggggattttgggctgctgccgtcaccgtcatgctcgtcatgttgagcacgcctgtcgctgaggcgcgagactttcccaaagatttcctggtccagttcaaaggaatgtgctactttaccaatgggacggagcgagtcaggggcgtggctcgctacatctataaccgggaggagtatggcaggttcgattccgatgtgggcgagtttcaagccgtcactgagctgggacgctcaatagaagattggaataattataaagattttctcgagcaggagcgagcagctgttgacaaggtgtgtcgacacaactacgaggccgaactgcgcacaacactacaacggcaagtggagcctacagttaccattagcccttctaggacagaggccctgaatcaccacaaccttctagtgtgtagcgtgaccgacttttacccagcacagattaaagtaagatggttccgaaacgaccaggaggagactgccggtgtggtttccacttccctcattagaaatggcgattggacttttcagattcttgtgatgctcgagattactccgcagcgaggagatatctatacatgccaggttgagcatccgagcctccagagtccaataaccgtggaatggcgggctcaatcggaatccgcccagagcaaaatgttgtctggcatcggaggcttcgtactcggcctgatatttctaggtctcggcctaatcatacggcatcggggacagaagggtccacgtggtcctcctcccgctggcaatatctctgccatgatccaaagcggtgagagggcccaggcttag

SEQ ID NO: 269041 - DNA, 828 bp, Artificial Sequence
  derived and/or modified sequence
atggctctgcagattcccggaggcttctgggcagcggctgtgaccgttatgcttgtgatgttgtccacacccgtggcagaagccagggatttccccaaagactttctggtgcaattcaagggcatgtgctattttactaacggcacagagagggtgcggggtgtggccaggtacatttacaatcgtgaagaatacggcagatttgacagcgacgtcggcgaatttcaggccgtgacagagttaggcaggtctatagaagactggaacaactataaggactttctggagcaggagcgcgcagccgtggacaaggtttgccggcacaattatgaggctgagttgcgcactactttacagcgacaggtggagccaacagtgacaatttcaccgtctcggaccgaagccttaaatcatcataatctcctggtttgttctgttactgacttctatcctgcgcagattaaggtccgctggtttcgtaacgaccaggaagagaccgctggcgtggtaagcacctcactgatccggaatggagactggacatttcagatcctggtaatgctggagattaccccgcagcgcggtgacatctacacttgtcaagtcgagcacccatcgctccaaagccctatcacagtcgagtggcgggcacagtctgagtctgcccagagtaaaatgttatctggcatcggtggcttcgtattgggcctgatattcctcggccttgggctgatcatccggcaccgaggccagaagggtcctcgaggacctcccccagccggaaatatctcggctatgatccagtctggagagcgggcacaggcatag

SEQ ID NO: 269042 - DNA, 828 bp, Artificial Sequence
  derived and/or modified sequence
atggctctgcagatcccagggggattctgggctgccgcagtgactgtgatgctggtgatgctctcaacaccagtcgcagaagcaagagactttcctaaagatttcctggtgcagtttaaaggcatgtgctatttcaccaacgggaccgagcgggtgagaggagtggctcgatatatatataacagggaagagtacggaaggttcgattccgacgtcggcgaatttcaagcagttactgagctgggcagatccatcgaagattggaataactacaaggacttcctagaacaggagcgggctgctgtggataaggtatgcagacacaactacgaggccgaacttcggacaacgcttcaaagacaggtcgaacccactgttacaatcagtccctcgcgcaccgaagcactgaaccatcacaatctgctagtatgtagtgtcacagacttctaccctgcacagatcaaggtgagatggtttagaaatgaccaagaggagacagcgggagtggtcagtacttcattgatcagaaacggcgactggacctttcagatcttagtgatgctggagatcactccacagaggggagacatctacacctgccaagtggaacacccgtctctccaatccccgattaccgtggagtggagagcccagagcgagtctgcacagagtaaaatgcttagcggaataggagggtttgtgctgggtttgattttcctgggactggggcttatcataaggcacaggggacagaagggccctagagggccaccgcctgctggtaatatctctgctatgattcagtcaggggagagggcccaggcttag

SEQ ID NO: 269043 - DNA, 828 bp, Artificial Sequence
  derived and/or modified sequence
atggccctgcagatccctggcggattttgggccgctgcagtgactgtcatgctagtcatgctgtctaccccggttgctgaggcacgcgactttccgaaagattttctcgttcaattcaagggaatgtgttatttcaccaacggtaccgaaagggtgagaggagtggccagatacatctacaatagggaggagtacggtcggttcgactcggatgtgggtgagttccaggccgtcacagaactgggccgaagtatcgaggattggaacaactataaagattttcttgagcaagaaagagcagccgtggacaaagtctgtcgtcacaattacgaagcggagctgcgcactacattgcagaggcaggttgagcctaccgtgacaatcagcccctcgaggaccgaagcactgaatcaccataacctcttggtgtgtagcgtcacggacttctaccccgcacagataaaagtacgctggtttagaaatgatcaggaggaaaccgcaggggtggtaagtacgtcgcttattaggaatggtgactggacctttcagatcctggtgatgcttgagatcactccccaacgtggtgacatctatacatgtcaggtggagcacccaagcttgcaatcacccataacagtggaatggagagctcagtccgagagcgcacagtcaaagatgttatcaggcatcggcggatttgtgctggggctgatcttccttggtctcggcctgatcatccgacacagaggacaaaagggcccacgaggccctcctcctgccggaaacataagcgccatgatccagagtggagagagggctcaggcctag

SEQ ID NO: 269044 - protein, 232 aa, Artificial Sequence
  derived and/or modified sequence
AKGIAIGIDLGTTYSCVGVFQHGKVEIIANDQGNRTTPSYVAFTDTERLIGDAGVIAGLNVLRIINEPTAAAIAYGLDKGGQGERHVLIFDLGGGTFDVSILTIDDGIFEVKATAGDTHLGGEDFDNRLVSHFVEEFKRKHKKDISQNKRAVRRLRTACERAKRTLSSSTQANLEIDSLYEGIDFYTSITRARFEELCADLFRGTLEPVEKGAPPASPRCSGCFRTTSMDVI

SEQ ID NO: 269045 - DNA, 2102 bp, Artificial Sequence
  derived and/or modified sequence
ggcttttaattgtgggggcttgctgggcctgcgcagttgtgggcagggggctggtgcggggagcgggttacgcgcgtccaggggagggtgggggcgtttgtgttgacaccgcccggccacgttacaatggagatactgtctctgacctcatgggccagtttggaaaaagattactgagttggagccgtctcaaatttgcagggagggacggggtggggggtggggggaccccggttgtgcagtttgatattgagggagcccccacctactcgctggggctgcgtaatctggacgtttccaaactgaagcgaaggcgtcgggagactaggcctcagagaaccatggctactgccaagggaatcgccataggcatcgacctgggcaccacctactcctgtgtgggggtgttccagcacggcaaggtggagatcatcgccaacgaccagggcaaccgcaccacccccagctacgtggccttcacagacaccgagcggctcattggggatgcggccaagaaccaggtagcaatgaatccccagaacactgtttttgatgctaaacgtctgatcggcaggaaatttaatgatcctgttgtacaagcagatatgaaactttggccttttcaagtgattaatgactctcaacgtcaggctactaaggatgcaggtgtgattgctggacttaatgtgctaagaatcatcaatgagcccacggctgctgccattgcctatggtttagataaaggaggtcaaggagaacgacatgtcctgatttttgatctgggtggaggcacatttgatgtgtcaattctgaccatagatgatgggatttttgaggtaaaggccactgctggggacactcacctgggtggggaggactttgacaacaggcttgtgagccacttcgtggaggagttcaagaggaaacacaaaaaggacatcagccagaacaagcgagccgtgaggcggctgcgcaccgcctgcgagagggccaagaggaccctgtcgtccagcacccaggccaacctagaaattgattcactttatgaaggcattgacttctatacatccatcaccagagctcgatttgaagagttgtgtgcagacctgtttaggggtaccctggagcctgtagaaaaagcgcttcgggatgccaagatggataaggctaaaatccatgacattgttttagtagggggctccacccgcatccccaaggtgcagcggctgcttcaggactacttcaatggacgtgatctcaacaagagcatcaaccctgatgaggccgtagcatatggggctgcggtacaagcagccatcctgatgggggacaagtctgagaaggtacaggacctgctgctgctggacgtggctcccctgtccctggggctggagacggctgggggcgtgatgactgccctgataaagcgcaactccaccatccccaccaagcagacacagattttcaccacctactctgacaaccaacccggggtgctgatccaggtgtatgagggcgagagggccatgacaaaggacaacaacctgctggggcggtttgacctgactggaatccctccagcacccaggggagttcctcagatcgaggtgacgtttgacattgatgccaatggtattctcaatgtcacagccacggacaagagcaccggcaaggtgaacaagatcaccatcaccaatgacaagggccgcctgagcaaggaggagattgagcgcatggttctggatgctgagaaatataaagctgaagatgaggtccagagggagaaaattgctgcaaagaatgccttagaatcctatgcttttaacatgaagagtgttgtgagtgatgaaggtttgaagggcaagattagtgagtctgataaaaataaaatattggataaatgcaacgagctcctttcgtggctggaggtcaatcaactggcagagaaagatgagtttgatcataagagaaaggaattggagcagatgtgtaaccctatcatcacaaaactctaccaaggaggatgcactgggcctgcctgcggaacagggtatgtgcctggaaggcctgccacaggccccacaattgaagaagtagattaa

SEQ ID NO: 269046 - DNA, 2544 bp, Artificial Sequence
  derived and/or modified sequence
gggccagtttggaaaaagattactgagttggagccgtctcaaatttgcagggagggacggggtggggggtggggggaccccggttgtgcagtttgatattgagggagcccccacctactcgctggggctgcgtaatctggacgtttccaaactgaagcgaaggcgtcgggagactaggcctcagagaaccatggctactgccaagggaatcgccataggcatcgacctgggcaccacctactcctgtgtgggggtgttccagcacggcaaggtggagatcatcgccaacgaccagggcaaccgcaccacccccagctacgtggccttcacagacaccgagcggctcattggggatgcggccaagaaccaggtagcaatgaatccccagaacactgtttttgatgctaaacgtctgatcggcaggaaatttaatgatcctgttgtacaagcagatatgaaactttggccttttcaagtgattaatgaaggaggcaagcccaaagtccttgtgtcctacaaaggggagaataaagctttctaccctgaggaaatctcttcgatggtattgactaagttgaaggagactgctgaggcctttttgggccaccctgtcaccaatgcagtgattaccgtgccagcctatttcaatgactctcaacgtcaggctactaaggatgcaggtgtgattgctggacttaatgtgctaagaatcatcaatgagcccacggctgctgccattgcctatggtttagataaaggaggtcaaggagaacgacatgtcctgatttttgatctgggtggaggcacatttgatgtgtcaattctgaccatagatgatgggatttttgaggtaaaggccactgctggggacactcacctgggtggggaggactttgacaacaggcttgtgagccacttcgtggaggagttcaagaggaaacacaaaaaggacatcagccagaacaagcgagccgtgaggcggctgcgcaccgcctgcgagagggccaagaggaccctgtcgtccagcacccaggccaacctagaaattgattcactttatgaaggcattgacttctatacatccatcaccagagctcgatttgaagagttgtgtgcagacctgtttaggggtaccctggagcctgtagaaaaagcgcttcgggatgccaagatggataaggctaaaatccatgacattgttttagtagggggctccacccgcatccccaaggtgcagcggctgcttcaggactacttcaatggacgtgatctcaacaagagcatcaaccctgatgaggccgtagcatatggggctgcggtacaagcagccatcctgatgggggacaagtctgagaaggtacaggacctgctgctgctggacgtggctcccctgtccctggggctggagacggctgggggcgtgatgactgccctgataaagcgcaactccaccatccccaccaagcagacacagattttcaccacctactctgacaaccaacccggggtgctgatccaggtgtatgagggcgagagggccatgacaaaggacaacaacctgctggggcggtttgacctgactggaatccctccagcacccaggggagttcctcagatcgaggtgacgtttgacattgatgccaatggtattctcaatgtcacagccacggacaagagcaccggcaaggtgaacaagatcaccatcaccaatgacaagggccgcctgagcaaggaggagattgagcgcatggttctggatgctgagaaatataaagctgaagatgaggtccagagggagaaaattgctgcaaagaatgccttagaatcctatgcttttaacatgaagagtgttgtgagtgatgaaggtttgaagggcaagattagtgagtctgataaaaataaaatattggataaatgcaacgagctcctttcgtggctggaggtcaatcaactggcagagaaagatgagtttgatcataagagaaaggaattggagcagatgtgtaaccctatcatcacaaaactctaccaaggaggatgcactgggcctgcctgcggaacagggtatgtgcctggaaggcctgccacaggccccacaattgaagaagtagattaattctttttagaactgaagcatcctaggatgcctctacatgtatttcattcccctcatcttcaaacatcattattattcttgaccagacctgaatctaagttaccatcccttggaaattctggagaaggagtctcatgcaccacctatcacactccctcacatcctgtttctgactttggaatggactcaggaaaactaggcccctctttaaaccgtgtgatgtatttgaatgtctgttatttccagccaccctaacattcttcttcctgtgtggatgcttatttgtcaatcagtaaatttgttcgtaaagaaaattacttctggtatttaggctgtgaatgtaccttgaaggggagagttcatggagagagcatgtgttctctgattgtgaggtcactgtgaatgattaaattggtaagggtaaagta

SEQ ID NO: 269047 - DNA, 2019 bp, Artificial Sequence
  derived and/or modified sequence
aaactcgacgcgccggtgcctgcagccgcacaggttcgctctgggaagccttgggacaacgggagtcactctcgaaaaaggcctcagagaaccatggctactgccaagggaatcgccataggcatcgacctgggcaccacctactcctgtgtgggggtgttccagcacggcaaggtggagatcatcgccaacgaccagggcaaccgcaccacccccagctacgtggccttcacagacaccgagcggctcattggggatgcggccaagaaccaggtagcaatgaatccccagaacactgtttttgatgctaaacgtctgatcggcaggaaatttaatgatcctgttgtacaagcagatatgaaactttggccttttcaagtgattaatgaaggaggcaagcccaaagtccttgtgtcctacaaaggggagaataaagctttctaccctgaggaaatctcttcgatggtattgactaagttgaaggagactgctgaggcctttttgggccaccctgtcaccaatgcagtgattaccgtgccagcctatttcaatgactctcaacgtcaggctactaaggatgcaggtgtgattgctggacttaatgtgctaagaatcatcaatgagcccacggctgctgccattgcctatggtttagataaaggaggtcaaggagaacgacatgtcctgatttttgatctgggtggaggcacatttgatgtgtcaattctgaccatagatgatgggatttttgaggtaaaggccactgctggggacactcacctgggtggggaggactttgacaacaggcttgtgagccacttcgtggaggagttcaagaggaaacacaaaaaggacatcagccagaacaagcgagccgtgaggcggctgcgcaccgcctgcgagagggccaagaggaccctgtcgtccagcacccaggccaacctagaaattgattcactttatgaaggcattgacttctatacatccatcaccagagctcgatttgaagagttgtgtgcagacctgtttaggggtaccctggagcctgtagaaaaagcgcttcgggatgccaagatggataaggctaaaatccatgacattgttttagtagggggctccacccgcatccccaaggtgcagcggctgcttcaggactacttcaatggacgtgatctcaacaagagcatcaaccctgatgaggccgtagcatatggggctgcggtacaagcagccatcctgatgggggacaagtctgagaaggtacaggacctgctgctgctggacgtggctcccctgtccctggggctggagacggctgggggcgtgatgactgccctgataaagcgcaactccaccatccccaccaagcagacacagattttcaccacctactctgacaaccaacccggggtgctgatccaggtgtatgagggcgagagggccatgacaaaggacaacaacctgctggggcggtttgacctgactggaatccctccagcacccaggggagttcctcagatcgaggtgacgtttgacattgatgccaatggtattctcaatgtcacagccacggacaagagcaccggcaaggtgaacaagatcaccatcaccaatgacaagggccgcctgagcaaggaggagattgagcgcatggttctggatgctgagaaatataaagctgaagatgaggtccagagggagaaaattgctgcaaagaatgccttagaatcctatgcttttaacatgaagagtgttgtgagtgatgaaggtttgaagggcaagattagtgagtctgataaaaataaaatattggataaatgcaacgagctcctttcgtggctggaggtcaatcaactggcagagaaagatgagtttgatcataagagaaaggaattggagcagatgtgtaaccctatcatcacaaaactctaccaaggaggatgcactgggcctgcctgcggaacagggtatgtgcctggaaggcctgccacaggccccacaattgaagaagtagattaa

SEQ ID NO: 269048 - DNA, 1984 bp, Artificial Sequence
  derived and/or modified sequence
aaatttgcagggagggacggggtggggggtggggggaccccggttgtgcagtttgatattgagggagcccccacctactcgctggggctgcgtaatctggacgtttccaaactgaagcgaaggcgtcgggagactaggcctcagagaaccatggctactgccaagggaatcgccataggcatcgacctgggcaccacctactcctgtgtgggggtgttccagcacggcaaggtggagatcatcgccaacgaccagggcaaccgcaccacccccagctacgtggccttcacagacaccgagcggctcattggggatgcggccaagaaccaggtagcaatgaatccccagaacactgtttttgatgctaaacgtctgatcggcaggaaatttaatgatcctgttgtacaagcagatatgaaactttggccttttcaagtgattaatgaaggaggcaagcccaaagtccttgtgtcctacaaaggggagaataaagctttctaccctgaggaaatctcttcgatggtattgactaagttgaaggagactgctgaggcctttttgggccaccctgtcaccaatgcagtgattaccgtgccagcctatttcaatgactctcaacgtcaggctactaaggatgcaggtgtgattgctggacttaatgtgctaagaatcatcaatgagcccacggctgctgccattgcctatggtttagataaaggaggtcaaggagaacgacatgtcctgatttttgatctgggtggaggcacatttgatgtgtcaattctgaccatagatgatgggatttttgaggtaaaggccactgctggggacactcacctgggtggggaggactttgacaacaggcttgtgagccacttcgtggaggagttcaagaggaaacacaaaaaggacatcagccagaacaagcgagccgtgaggcggctgcgcaccgcctgcgagagggccaagaggaccctgtcgtccagcacccaggccaacctagaaattgattcactttatgaaggcattgacttctatacatccatcaccagagctcgatttgaagagttgtgtgcagacctgtttaggggtaccctggagcctgtagaaaaagcgcttcgggatgccaagatggataaggctaaaatccatgacattgttttagtagggggctccacccgcatccccaaggtgcagcggctgcttcaggactacttcaatggacgtgatctcaacaagagcatcaaccctgatgaggccgtagcatatggggctgcggtacaagcagccatcctgatgggggacaagtctgagaaggtacaggacctgctgctgctggacgtggctcccctgtccctggggctggagacggctgggggcgtgatgactgccctgataaagcgcaactccaccatccccaccaagcagacacagattttcaccacctactctgacaaccaacccggggtgctgatccaggtgtatgagggcgagagggccatgacaaaggacaacaacctgctggggcggtttgacctgactggaatccctccagcacccaggggagttcctcagatcgaggtgacgtttgacattgatgccaatggtattctcaatgtcacagccacggacaagagcaccggcaaggtgaacaagatcaccatcaccaatgacaagggccgcctgagcaaggaggagattgagcgcatggttctggatgctgagaaatataaagctgaagatgtgtaaccctatcatcacaaaactctaccaaggaggatgcactgggcctgcctgcggaacagggtatgtgcctggaaggcctgccacaggccccacaattgaagaagtagattaattctttttagaactgaagcatcctaggatgcctctacatgtatttcattcccctcatcttcaaacatcattattattcttgaccagacctgaatctaagttaccatcccttggaaattctggagaa

SEQ ID NO: 269049 - protein, 217 aa, Artificial Sequence
  derived and/or modified sequence
MSWTCPRCQQPVFFAEKVSSLGKNWHRFCLKCERCHSILSPGGHAEHNGRPYCHKPCYGALFGPRGVNIGGVGSYLYNPPTPSPGCTTPLSPSSFSPPRPRTGLPQGKKSPPHMKTFTGETSLCPGCGEPVYFAEKVMSLGRNWHRPCLRCQRCHKTLTAGSHAEHDGVPYCHVPCYGYLFGPKGGQPHPRHWDGMYMPEVWHVHGLWVCVDNFPCG

SEQ ID NO: 269050 - DNA, 654 bp, Artificial Sequence
  derived and/or modified sequence
atgagttggacctgtcctcgctgtcagcagcctgtattctttgctgaaaaggtcagttcacttgggaaaaactggcacaggttttgcctgaagtgcgaaagatgccattccattttatctcctggaggccatgcggaacataacggtcggccttattgtcacaagccttgctacggggctctttttgggcctaggggggtgaacatcggcggggtaggtagctacctgtataatccacccacacctagccccggctgtacaacccctctcagtcccagtagtttctcccctccgagacctcgcaccggcctcccacaagggaagaagtctcctccacatatgaaaacttttacaggagagacctcactgtgccctgggtgcggggagcccgtatactttgccgagaaagtcatgtcccttggaaggaactggcacagaccttgcctcaggtgtcagcgttgccataagacgctaactgcaggatctcatgccgagcacgatggtgttccatattgtcacgtcccatgttacggatatctgttcggcccgaagggtggacagcctcatccccggcattgggatggaatgtacatgccggaagtgtggcacgtgcatgggctgtgggtgtgcgtggataattttccctgtggatag

SEQ ID NO: 269051 - DNA, 654 bp, Artificial Sequence
  derived and/or modified sequence
atgtcctggacctgcccccgctgccagcagcctgtgttctttgctgagaaggtgagcagcctgggcaagaactggcaccgcttctgcctgaagtgtgagcgctgccacagcatcctgagccctgggggccatgctgagcacaacggccggccctactgccacaagccctgctacggggccctgtttggcccccggggcgtgaacattggaggagtgggcagctacctgtacaacccccccacccccagccctggctgcaccacccccctgagccccagcagcttcagccccccccggcccaggacaggcctgccccagggcaagaagagccccccccacatgaagaccttcaccggggagaccagcctgtgccccggctgtggggagcctgtgtactttgctgagaaggtgatgagcctgggcaggaactggcaccggccctgcctgcgctgccagcgctgccacaagaccctgacagctggcagccacgccgagcatgatggagtgccctactgccacgtgccctgctacggctacctgtttggccccaagggcggccagccccaccccaggcactgggatggcatgtacatgcctgaggtgtggcacgtgcacggcctgtgggtgtgtgtggacaacttcccctgtggctag

SEQ ID NO: 269052 - DNA, 654 bp, Artificial Sequence
  derived and/or modified sequence
atgagctggacctgcccccggtgccagcagcccgtgttcttcgccgagaaagtttcatcattgggaaaaaattggcacagattttgtcttaagtgtgagagatgtcattcaattttgagtccgggcgggcacgcagaacataatgggaggccttactgccataagccatgctacggggcactcttcggtccccggggcgttaacatcgggggggtaggatcttacctctacaatcccccgaccccctcacctggctgtaccacgcccctttcaccctcctctttctctcctccgaggcctcggacagggctccctcagggaaagaagagcccacctcatatgaaaacttttaccggcgaaacgagtctctgccctggatgcggtgaacccgtctatttcgcagagaaggtgatgagcctcgggaggaattggcatcggccctgtctaagatgccagcggtgtcataaaacattaacagcagggagtcatgccgagcacgatggggttccatattgccatgttccgtgctatggctatcttttcggcccaaaaggaggacaaccccatcctaggcactgggacgggatgtacatgcctgaggtgtggcatgtgcacggcctatgggtgtgtgtggacaatttcccatgcgggtag

SEQ ID NO: 269053 - DNA, 654 bp, Artificial Sequence
  derived and/or modified sequence
atgtcttggacctgcccgcgatgtcagcaacctgtgttttttgccgagaaagtgtcatccttaggcaagaactggcacagattttgtttgaagtgcgagaggtgtcatagcattttaagccctgggggacacgcggaacataacggtcgcccttactgtcacaagccgtgctacggagccctcttcggccctagaggcgtgaacattggtggcgtcggatcttacctgtataatcccccaacccccagtcccggatgtacaacgcccctgagcccctcatcctttagcccaccacggcctaggacaggcttaccacagggaaaaaagtcaccgccacatatgaagaccttcaccggagaaacaagtctatgccctgggtgcggcgaacctgtgtatttcgccgaaaaggtgatgagcctgggccgtaactggcatcggccatgtcttaggtgtcagagatgtcataaaacgctgactgcagggagtcatgcagagcacgatggagtcccgtactgtcacgtgccctgctacggctatttattcggccctaaaggaggtcagccacacccacgccattgggacggaatgtacatgcccgaagtgtggcacgtgcacgggttatgggtttgcgtggacaatttcccatgtggctag

SEQ ID NO: 269054 - DNA, 800 bp, Artificial Sequence
  derived and/or modified sequence
gagctatgagctggacctgtccgcgttgccagcaacctgttttcttcgctgagaaggtgagctccctgggcaagaactggcaccgcttctgcctgaaatgtgagcgctgccacagcatcctgtcccctggcgggcatgcagagcacaatgggaggccatactgccacaagccatgctatggggctctctttggacccaggggggtgaacattggtggtgtaggctcctacttgtacaatccccccactcccagccctggctgcaccactcctctcagccccagcagcttcagccctcccaggccaaggactggcctcccccaaggcaagaaaagccctccccatatgaagacattcactggggagacctcgctgtgccctggctgtggggagcccgtctattttgctgagaaggtgatgtcattaggcagaaattggcaccgaccgtgtctgaggtgccagcgttgccacaagaccctgactgctgggagtcatgctgagcatgatggagtcccctactgccacgtcccctgctacggctacctgtttggccccaaaggtgggcagccccatcccagacactgggatggcatgtacatgcctgaagtatggcatgtacatggtctgtgggtatgtgtggacaacttcccctgtggttaagcataccctggcccccccaccaagttccctctaggcctgaaccctgcaccacagacccagggcctttggtgatagggctctctctctcaggtgtgaacattggcgatgtgggctgctacatctatgacccagtgaagataa

SEQ ID NO: 269055 - DNA, 654 bp, Artificial Sequence
  derived and/or modified sequence
atgagctggacctgccccagatgccagcagcccgtgttcttcgccgagaaggtgagcagcctgggcaagaactggcacagattctgcctgaagtgcgagagatgccacagcatcctgagccccggcggccacgccgagcacaacggcagaccctactgccacaagccctgctacggcgccctgttcggccccagaggcgtgaacatcggcggcgtgggcagctacctgtacaacccccccacccccagccccggctgcaccacccccctgagccccagcagcttcagcccccccagacccagaaccggcctgccccagggcaagaagagccccccccacatgaagaccttcaccggcgagaccagcctgtgccccggctgcggcgagcccgtgtacttcgccgagaaggtgatgagcctgggcagaaactggcacagaccctgcctgagatgccagagatgccacaagaccctgaccgccggcagccacgccgagcacgacggcgtgccctactgccacgtgccctgctacggctacctgttcggccccaagggcggccagccccaccccagacactgggacggcatgtacatgcccgaggtgtggcacgtgcacggcctgtgggtgtgcgtggacaacttcccctgcggctag

SEQ ID NO: 269056 - DNA, 888 bp, Artificial Sequence
  derived and/or modified sequence
atggcttctctgtctaggccttcccttccttcgtgcctctgctcttttctgctgctgctcttattgcaggtttcatcctcgtacgcaggccagttcagagtgatcgggcctcgtcacccaatcagggctctcgtgggagacgaagtagagctcccttgccgaataagtcctggcaaaaacgcaacagggatggaggtgggctggtatcgaccccccttctctcgagtcgtgcacttgtacagaaacgggaaggatcaggacggggaccaggcacctgaataccgcggccgtaccgaactcctgaaggatgcaattggagaagggaaggtcacactcaggatccggaacgtccgattcagcgacgaaggtgggttcacatgcttctttagagatcactcctaccaagaggaggccgctatggagctcaaggtcgaggaccctttctattgggttagccccggggtcctggtgctgctggccgtgctccccgtgcttctgctgcagattaccctcggactcgtcttcctgtgcttgcaatatcggctgcgagggaagcttagggccgaaatagaaaatctgcaccgcacatttgatccccattttctacgggttccttgttggaaaatcactctgttcgtgatcgtacccgtcctaggccccctggtggccctgattatttgttacaactggctccaccggcggcttgcaggccagtttctagaggagcttaggaagttttctagtctatgctacaaacagaggataaagagccaagagagggaaaccgaggcaacgcgggggcgaggaggactccttagggatcacatccctcgaggcaaagaagaactggaatctctggggggcgggaaaactcctcccggtcggtag

SEQ ID NO: 269057 - DNA, 888 bp, Artificial Sequence
  derived and/or modified sequence
atggccagcctgagccggcccagcctgcccagctgcctgtgcagcttcctgctgctgctgctgctgcaggtgagcagcagctatgccggccagttccgggtgattggccccaggcaccccatccgggccctggtgggagatgaggtggagctgccctgccgcatcagccctgggaagaatgccaccggcatggaggtgggctggtacagaccacccttcagccgggtggtgcacctgtacagaaatggcaaggaccaggatggagaccaggcccctgagtaccggggccgcacagagctgctgaaggatgccatcggggagggcaaggtgaccctgcgcatcagaaatgtgcgcttcagtgatgaaggaggcttcacctgcttcttccgggaccacagctaccaggaggaggccgccatggagctgaaggtggaggaccccttctactgggtgtccccaggagtgctggtgctgctggccgtgctgcctgtgctgctgctgcagatcaccctgggcctggtgttcctgtgcctgcagtaccgcctgcggggcaagctgcgggcagaaattgagaacctgcacaggacctttgacccccacttcctgcgggtgccctgctggaagatcaccctcttcgtcatcgtgcctgtgctgggccccctggtggccctgatcatctgctacaactggctgcaccggcggctggccggccagttcctggaggagctgaggaagttcagcagcctgtgctacaagcagaggatcaagagccaggagcgggagacagaggccacccggggccggggcggcctgctgcgggaccacatcccccggggcaaggaggagctggagagcctgggcggcggcaagaccccacctggaagatag

SEQ ID NO: 269058 - DNA, 2495 bp, Artificial Sequence
  derived and/or modified sequence
agcactgccctccaagatcttcccttgggcttttcagcagtaaggggacatgcaccccaagggcctccacttggcctgaccttgctgcgggggctctctgtccccaggaacagtagagatggcaagcttatcgagaccctctctgcccagctgcctctgctccttcctcctcctcctcctcctccaagtgtcttccagctatgcagggcagttcagagtgataggaccaagacaccctatccgggctctggtcggggatgaagtggaattgccatgtcgcatatctcctgggaagaacgctacaggcatggaggtggggtggtaccgcccccccttctctagggtggttcatctctacagaaatggcaaggaccaagatggagaccaggcacctgaatatcggggccggacagagctgctgaaagatgctattggtgagggaaaggtgactctcaggatccggaatgtaaggttctcagatgaaggaggtttcacctgcttcttccgagatcattcttaccaagaggaggcagcaatggaattgaaagtagaagatcctttctactgggtgagccctggagtgctggttctcctcgcggtgctgcctgtgctcctcctgcagatcactcttggcctcgtcttcctctgcctgcagtacagactgagaggaaaacttcgagcagagatagagaatctccaccggacttttgatccccactttctgagggtgccctgctggaagataaccctgtttgtaattgtgccggttcttggacccttggttgccttgatcatctgctacaactggctacatcgaagactagcagggcaattccttgaagagctacgtaagttctcttctctctgttataagcagagaataaaaagccaggaaagggagacagaagcaacaagaggaagaggcgggctattgagggatcacattcccagaggaaaggaggagctggagagcctgggtggagggaagactcctcctgggaggtagagggcaaagaagccagctgttagagacacatttacaggtggcagagaagctggaggcactcctatctgccacctgatccattcctccttcactgcccctaagcaggaatccaaccctagctggtctcattgcccattccacagcaactgcccagtgcctcacctctcagatcaaccattgaggcaggaatggagacaagatgaccccaagggcttttcttctccctagttcaatggttttatgatacaaactactgacatacgtttttcaagttattttctccttcttctaggaaatcccttctgagtgatgtcacatcttggcaggggtggaggagagcctggttgcccagggatttgtccttggggacatctcatccatcaagttgcacactcactggcatctttgctatggggacattccaatttgcactttcaggaacactctgaattccaagtagaattgatttcccttcttctgtcatctaccttttctcttcattttcccatttttattacccttctttccatttctctctccagtcttccacctggaagccctctctggctaaggacaggcaggtgcccctctctccatcagaggacacctgtactggagagcaacacaggatggtctctgccatgaactggaggccaggaatctcctcactgaaaattacagtatggtaactttgcaaatggtggttgtttcttccaagactccagccctgattgcgcaaaactgaaaggcatgtgaagggaaggaagaggaagagtgcaaaacattgaagagagagctgagtgagctgaagagtgaggatatgagtagccccaacccaaacctggagatggggagaaacctacagaatactagccagagctcctccttgtcttggcagcctactagggacctggggaagcaaaaacgaaagctgggcaacatgcctgctttagaatgttttccttctacttacacatcttccacaggtctcagaatctttccttcctctcatccttttctcctatcttcatatctatcagagtatccactgtttattcaacaactactacttgatggtcagacacaaacaaacaagctaggtgctaattaataaagatacgagttttggccgggtgcggtggctcacgcctgtaatcccagcactttgggaggccgaggcgggcgaatcacgaggtcaggagttcaagaccagcctggccaacatggtgaaaccccatctctactaaaaatacaaacaattaactgagcatagtggtgggcacctataataccagctactccggaggctgaggcaggagaatcgcttgaacccaggaggcagaggttgcagtgagctgagatcgcgccactgcactctagccggagtgacagagtaagactctgtctcaaaaataaataaataaataaataaataaataaataaataaataaaaaataataatacaagttttcataagcacacttctaa

SEQ ID NO: 269059 - DNA, 888 bp, Artificial Sequence
  derived and/or modified sequence
atggccagcctgagccggcccagcctgcccagctgcctgtgcagcttcttactcttattattgcttcaggtgagctcaagctatgccggacaatttcgcgtcatcggaccgcgtcatccgatcagagctttagtgggagatgaggtggaactgccgtgtcgaattagccccggcaaaaatgccaccggcatggaggtggggtggtataggccacctttcagcagggttgtccacctttacaggaacggaaaggatcaggacggggatcaagcacccgagtaccgaggccgaaccgaactgcttaaggatgcgatcggcgagggaaaggtgacactccgcatccgcaatgtgcgtttctcagatgagggcggctttacgtgtttcttccgcgatcatagctatcaagaggaggctgccatggaacttaaagtagaggatccgttctattgggtctcccccggcgtgctagtgctgctggcggtgcttccagttctgctcctccagatcactttgggtctggtatttctctgcctgcagtatcgtctgcgcggcaagctgagggccgaaattgagaacctacaccggactttcgatcctcactttcttcgggtgccctgctggaagattacgttgtttgtgatcgtccctgtgctggggccactcgtagctctgatcatctgttacaattggctgcatcgcaggctggctggccagttcctggaggagttgcgtaaattttctagtctctgttataaacaaaggattaaatctcaggagcgggaaacagaggcaactcgaggccggggagggttgctgcgcgatcatatccctagagggaaagaggagctcgagagtctggggggagggaagactccacctggaagatag

SEQ ID NO: 269060 - DNA, 888 bp, Artificial Sequence
  derived and/or modified sequence
atggcttcacttagtaggccaagtctgcccagctgcctgtgctcatttttgctgttactgctcctgcaggtttcaagtagttacgccggtcagtttcgggtgatcggaccgaggcaccctattcgtgctcttgtcggagacgaggtggagctcccgtgcagaatctctccaggaaagaatgcaacaggcatggaggtggggtggtacaggccaccctttagccgtgttgtccatctgtacagaaacggcaaggaccaggacggtgaccaggccccagagtacagaggacgtacagaattgttaaaggacgccataggcgaggggaaagtgactctgcgtataagaaacgtgcgattttctgacgaaggcggttttacttgctttttccgcgaccatagctaccaggaggaggctgctatggagctgaaagtggaggacccattctactgggtgtcaccaggcgtgctcgtgctcctggccgtgctcccagttctgctgctccagatcaccctgggcctggtcttcctttgtctgcagtaccggctacgaggcaaactgagagctgaaatagagaacctgcaccgcaccttcgacccccacttcctgagagtcccttgttggaagataacgctctttgtgatagttccagtgctcggtccgctagttgccctgattatctgctacaattggctgcacagaagacttgccggtcaattcctagaagagttgaggaaattttcaagcctctgctacaagcaacgcattaagagccaggagcgagagactgaggctacccggggaaggggaggcttgcttagagatcacattccacgtggcaaggaggagcttgagtccctgggaggcggaaaaacacccccaggacggtag

SEQ ID NO: 269061 - DNA, 888 bp, Artificial Sequence
  derived and/or modified sequence
atggccagcctgagcagacccagcctgcccagctgcctgtgcagcttcctgctgctgctgctgctgcaggtgagcagcagctacgccggccagttcagagtgatcggccccagacaccccatcagagccctggtgggcgacgaggtggagctgccctgcagaatcagccccggcaagaacgccaccggcatggaggtgggctggtacagaccccccttcagcagagtggtgcacctgtacagaaacggcaaggaccaggacggcgaccaggcccccgagtacagaggcagaaccgagctgctgaaggacgccatcggcgagggcaaggtgaccctgagaatcagaaacgtgagattcagcgacgagggcggcttcacctgcttcttcagagaccacagctaccaggaggaggccgccatggagctgaaggtggaggaccccttctactgggtgagccccggcgtgctggtgctgctggccgtgctgcccgtgctgctgctgcagatcaccctgggcctggtgttcctgtgcctgcagtacagactgagaggcaagctgagagccgagatcgagaacctgcacagaaccttcgacccccacttcctgagagtgccctgctggaagatcaccctgttcgtgatcgtgcccgtgctgggccccctggtggccctgatcatctgctacaactggctgcacagaagactggccggccagttcctggaggagctgagaaagttcagcagcctgtgctacaagcagagaatcaagagccaggagagagagaccgaggccaccagaggcagaggcggcctgctgagagaccacatccccagaggcaaggaggagctggagagcctgggcggcggcaagaccccccccggcagatag

SEQ ID NO: 269062 - protein, 171 aa, Artificial Sequence
  derived and/or modified sequence
MASLSRPSLPSCLCSFLLLLLLQVSSSYAGQFRVIGPRHPIRALVGDEVELPCRISPGKNATGMEVGWYRPPFSRVVHLYRNGKDQDGDQAPEYRGRTELLKDAIGEGKVTLRIRNVRFSDEGGFTCFFRDHSYQEEAAMELKVEVSHSVTQDWLQWHDHGSLQPPPPRLK

SEQ ID NO: 269063 - DNA, 516 bp, Artificial Sequence
  derived and/or modified sequence
atggccagtttatcccgaccgagtctgccaagctgcctatgttcgttcctgttgctattgctgctgcaggtctcaagttcctacgccggacagttccgcgtaatcggccccaggcatcccatccgcgccctcgtcggggacgaggtcgaactcccttgcagaatctccccaggcaaaaatgccaccggcatggaggtcggctggtatagaccccccttctcccgggtagtgcatctataccgcaatgggaaggatcaggacggggaccaggctcccgagtatcgcggacgaacggagttattgaaggatgctatcggagaggggaaagtcactcttcgcatcaggaatgtgcgtttctccgatgaagggggctttacctgcttttttcgtgaccatagttaccaggaggaggctgcaatggaactaaaggttgaggtgagccactctgtaactcaggactggctccagtggcacgaccatgggagcctgcagccccctccgccaagactgaagtag

SEQ ID NO: 269064 - DNA, 516 bp, Artificial Sequence
  derived and/or modified sequence
atggcttcactcagcaggccttcactgccctcatgtctttgcagcttcctgctgttgctgctgctacaggtgtcatcgagctacgctggtcagttccgcgtcatcggaccccgccaccctatccgcgccctcgtcggtgacgaggtcgagctgccttgccgcatttctcctggaaaaaacgccacgggcatggaggttgggtggtacaggcccccgttttcaagagtggtgcatctttaccgtaacggtaaagaccaggacggtgatcaggcacccgagtacaggggtcgcacggagcttcttaaggacgcaatcggagaagggaaggtcactctgcggattaggaatgtaaggttcagcgatgagggcggctttacttgtttcttccgcgaccactcatatcaggaagaagcggctatggaactcaaagtggaagtctcccatagtgtaacccaggattggcttcagtggcacgatcacggatctctgcaacctcctcctccacgcctcaagtag

SEQ ID NO: 269065 - DNA, 516 bp, Artificial Sequence
  derived and/or modified sequence
atggcatcactgtcgaggccgtccttgccgagctgtctgtgctcattcctcctcctgttgctgctgcaggtgagtagtagttacgctggccaattcagggtgatcggtccccggcatcccattagggctttggtgggcgacgaagtggaactgccctgtcgcatcagtccgggaaagaatgccacagggatggaagtgggttggtatcggccaccatttagtcgggtggtccacctttaccgcaatggaaaagaccaagacggcgatcaggccccagagtatagaggcaggacagaactcctgaaggacgcgattggagagggcaaggtgaccctacgcatcaggaatgtgcggtttagtgatgaaggcggcttcacctgcttcttcagagaccactcctatcaggaggaggcggctatggagctgaaggtggaggtatctcacagcgtgacccaggattggctgcagtggcacgatcacggctcgttgcagccgccccccccccggctgaaatag

SEQ ID NO: 269066 - DNA, 516 bp, Artificial Sequence
  derived and/or modified sequence
atggctagcctatcccgcccaagtctgccgagttgtctctgcagtttcctcttactgctgctgctccaggtaagctcctcttatgccgggcagtttagagttattgggccacgccaccccattcgggccctagtgggggacgaggtggaactgccgtgtcggatatctcccggaaagaatgcaacaggcatggaagtagggtggtaccgccctccgttcagcagggtcgtccacttataccggaatggcaaagatcaagatggggaccaggctccagagtacagagggcgcaccgagctgctcaaggatgcaattggtgaaggcaaggtgacccttaggatccgcaatgttcgattttctgacgaaggaggtttcacttgctttttcagagatcattcctatcaggaagaggctgctatggagctgaaagttgaggtgagccatagtgtcactcaggactggctccagtggcacgaccatggttcactgcagcctccacccccacgcctgaaatag

SEQ ID NO: 269067 - DNA, 516 bp, Artificial Sequence
  derived and/or modified sequence
atggctagcttgtcccggccgtccctcccgtcctgcctgtgcagctttcttcttttactactgctgcaggtttccagttcgtacgctggccagttccgcgttattggcccgcggcacccaatccgagcactggtgggcgacgaggtagagctcccatgtaggatcagtcccggcaaaaacgccactgggatggaagtcggctggtatcggccacccttttcacgggtggtgcatttatataggaatggcaaagaccaggacggtgatcaggctcccgagtacaggggccggacagagcttcttaaggacgcaattggagagggcaaagttacactgaggataagaaacgtgcgcttttccgatgagggcgggtttacctgtttttttagagaccactcctaccaggaggaagcagctatggagctcaaggtggaggtgtcacactccgtcacacaagactggctgcagtggcacgatcacgggtctctgcagccaccccctcctcgtctgaaatag

SEQ ID NO: 269068 - DNA, 516 bp, Artificial Sequence
  derived and/or modified sequence
atggcttccctttcccggccttcattaccctcttgcctgtgttcctttttgctcctacttctactgcaggtgagctcctcctatgccggccagttccgcgttatcgggcctcgacacccaattagagccctagttggcgacgaggtggaactgccgtgtcggattagtccaggcaaaaatgccacgggaatggaggtgggctggtacaggccgcccttttctcgggtggtgcatctgtaccgcaacggtaaggaccaggacggggaccaggccccagaatacagaggtcggaccgagctgttgaaagatgcaatcggtgagggaaaggtgacactgcgaatcagaaatgtccgcttctctgatgagggcggatttacttgtttttttcgagatcattcgtaccaggaagaggcggcaatggagcttaaagtggaggtgagtcacagtgtgactcaggattggttgcagtggcacgaccacggatccctgcaaccacctccgccacgccttaaatag

SEQ ID NO: 269069 - DNA, 516 bp, Artificial Sequence
  derived and/or modified sequence
atggccagccttagtaggccttcccttcctagttgcctgtgttccttcctgctgctactgctgctgcaggtcagtagctcatatgcgggccagtttcgtgtgataggcccaagacaccccatccgggcgctcgtgggagatgaagtggagctgccctgtagaatttcacccggcaaaaatgccacgggaatggaggtgggctggtaccggcccccattcagccgtgtggtgcacttgtataggaatgggaaggatcaggatggggatcaggcccccgagtatcgcgggagaacagagcttctcaaggacgcgattggtgagggtaaagtgactctcagaatacgtaacgtcagattctctgatgagggcggcttcacatgtttctttagggaccactcttaccaagaggaggccgcgatggagcttaaggtagaggtttctcatagcgtgacccaggattggctccagtggcacgatcacggtagcctgcagcctccaccaccgcgtctgaagtag

SEQ ID NO: 269070 - DNA, 516 bp, Artificial Sequence
  derived and/or modified sequence
atggcaagtctctcacgcccatccctgcctagctgcttatgtagttttctgttactgctgcttcttcaggtctcgtccagttatgctggacagtttagagtgatcggcccaaggcatcccatccgcgccctggtgggcgacgaggtggagctgccctgccgtatttctccaggcaagaatgcgacaggcatggaggtgggatggtatcgaccgcccttttccagagtggttcacttatacagaaatggtaaggatcaggacggagatcaggcacccgagtaccgaggccggactgaactgttgaaggacgccatcggtgaggggaaggtcaccttgaggattcggaatgtccggttcagtgatgaggggggtttcacgtgtttctttagggaccacagctatcaggaagaagccgccatggagctcaaagtcgaggtcagtcattctgtgacccaggattggttgcagtggcatgatcatggctctctccaaccgccgccccccagactcaagtag

SEQ ID NO: 269071 - DNA, 516 bp, Artificial Sequence
  derived and/or modified sequence
atggcaagcctgagccgcccgagtctgccgtcttgcctttgctccttcctactactgctgcttctgcaggtgtctagctcttatgccggtcagttcagagtgattggacctaggcaccccattcgtgccctggtgggggatgaggttgagctgccctgtcgcatttctcccgggaagaacgccacaggaatggaggtgggttggtacagaccccctttctctagagttgtgcacctgtaccggaatggcaaggaccaagacggcgaccaggcccctgagtacagaggcaggacggagctgctcaaagacgctatcggcgagggaaaagtgacactgcggatccgaaacgtccggttttccgatgagggcggctttacctgtttctttagggaccacagctatcaagaagaggcagcgatggaactaaaagtcgaggtgagccacagtgttacacaagattggctgcagtggcacgatcacggatcccttcaaccgccgcctcccaggttgaagtag

SEQ ID NO: 269072 - DNA, 516 bp, Artificial Sequence
  derived and/or modified sequence
atggccagcctgagccggcccagcctgcccagctgcctgtgcagcttcctgctgctgctgctgctgcaggtgagcagcagctatgccggccagttccgggtgattggccccaggcaccccatccgggccctggtgggagatgaggtggagctgccctgccgcatcagccctgggaagaatgccaccggcatggaggtgggctggtacagaccacccttcagccgggtggtgcacctgtacagaaatggcaaggaccaggatggagaccaggcccctgagtaccggggccgcacagagctgctgaaggatgccatcggggagggcaaggtgaccctgcgcatcagaaatgtgcgcttcagtgatgaaggaggcttcacctgcttcttccgggaccacagctaccaggaggaggccgccatggagctgaaggtggaggtgagccacagcgtgacccaggactggctgcagtggcatgaccacggcagcctgcagcccccaccaccccggctgaagtag

SEQ ID NO: 269073 - DNA, 664 bp, Artificial Sequence
  derived and/or modified sequence
caattaccggagtggaggcagggcccaggcagcactgccctccaagatcttcccttgggcttttcagcagtaaggggacatgcaccccaagggcctccacttggcctgaccttgctgcgggggctctctgtccccaggaacagtagagatggcaagcttatcgagaccctctctgcccagctgcctctgctccttcctcctcctcctcctcctccaagtgtcttccagctatgcagggcagttcagagtgataggaccaagacaccctatccgggctctggtcggggatgaagtggaattgccatgtcgcatatctcctgggaagaacgctacaggcatggaggtggggtggtaccgcccccccttctctagggtggttcatctctacagaaatggcaaggaccaagatggagaccaggcacctgaatatcggggccggacagagctgctgaaagatgctattggtgagggaaaggtgactctcaggatccggaatgtaaggttctcagatgaaggaggtttcacctgcttcttccgagatcattcttaccaagaggaggcagcaatggaattgaaagtagaagtgtctcactctgtcacccaggattggttgcagtggcacgatcatggctcattgcagcctccacctcccaggctcaagtga

SEQ ID NO: 269074 - DNA, 516 bp, Artificial Sequence
  derived and/or modified sequence
atggccagcctgagccggcccagcctgcccagctgcctgtgcagcttccttctgttgctcctcctgcaagtgagcagcagttacgccggtcaattcagagtcatcggacccagacaccccattagggccctggtaggggacgaggtagaattaccgtgcagaatttctcccggtaagaacgctacaggcatggaggttggctggtaccggcccccctttagccgggtcgtgcatttgtatcgtaacgggaaggaccaggatggcgaccaggcaccggagtaccggggcagaacagaactgctgaaggatgcaataggagaaggaaaggttacactccggatccgcaacgtgagattctccgatgaaggaggtttcacgtgtttcttccgcgaccactcttaccaagaggaagctgccatggagttaaaggtagaagtgagtcactctgtgacacaagactggctgcagtggcacgaccatggatcactgcaacctccccctccccgactgaaatag

SEQ ID NO: 269075 - DNA, 516 bp, Artificial Sequence
  derived and/or modified sequence
atggccagcctgagccggcccagcctgcccagctgcctgtgcagctttcttctccttctgcttctgcaagtgtctagtagctacgccggccagttcagggtaatcgggcctcggcaccctatccgagccctagtcggggacgaggtagaactcccatgccgcatttctcccgggaagaatgccactggtatggaggtggggtggtacaggcctcccttctctagagtagtgcacttgtacaggaacggaaaggatcaagacggagatcaggctcccgaatatcgtgggcgaacagagttgctgaaggatgccattggcgagggtaaggttacactgcgaataagaaacgtgcgtttctctgatgagggagggttcacctgctttttccgtgaccactcatatcaggaagaggccgctatggagctcaaggtcgaggtttcccattccgttacacaggattggttacaatggcacgatcacggttcccttcagcctccgcccccaagattgaagtag

SEQ ID NO: 269076 - DNA, 516 bp, Artificial Sequence
  derived and/or modified sequence
atggccagcctgagccggcccagcctgcccagctgcctgtgcagcttcctccttctgctgctgttgcaagtcagcagttcctacgctggacagtttcgtgttataggtcccagacatccaataagagctctggtgggggatgaagtcgaactgccatgtaggatttcacctgggaagaacgctacgggcatggaagttggatggtaccggccacccttctcgcgggtggtgcacctgtatcgcaacggcaaagaccaagatggggatcaagccccagaatacaggggccggaccgaactgctgaaagacgcaatcggcgaaggtaaggtgaccttaaggatccgaaacgtgcggtttagcgacgaaggcggctttacatgctttttccgcgatcactcataccaagaagaggccgctatggagctcaaggtcgaggtcagtcattccgtcacccaggactggcttcagtggcacgatcatgggagtctacagccccctcccccaaggctcaagtag

SEQ ID NO: 269077 - DNA, 516 bp, Artificial Sequence
  derived and/or modified sequence
atggccagcctgagccggcccagcctgcccagctgcctgtgcagctttctactcctcctgctgctgcaggtcagttcgtcatacgctggccagtttagggtgataggccctcgacaccccattcgcgcactggtgggcgacgaggtggaattaccatgcaggatctcccccgggaagaacgctacggggatggaagtggggtggtacagaccccctttttctagggtcgtgcatctgtatcgaaatggcaaagatcaggatggagatcaggcgcccgaatacagagggagaactgagctcctgaaagatgcaatcggcgaaggaaaggtgaccctccgtattaggaacgttcggttttccgatgagggggggtttacatgttttttcagagaccattcgtaccaagaagaggccgccatggaactaaaggtagaggtcagccattccgtcacacaggactggctgcagtggcatgatcatggttctctccagcctccccctcctcgcctcaagtag

SEQ ID NO: 269078 - DNA, 516 bp, Artificial Sequence
  derived and/or modified sequence
atggccagcctgagccggcccagcctgcccagctgcctgtgcagcttcttgctgctgcttctgcttcaggtgtcttccagttacgccggccagtttagagttattggacctagacacccaatcagggcacttgtgggggatgaagttgaactaccgtgtcggatttctccaggaaaaaacgcaacaggcatggaggttgggtggtaccgacccccattctccagagtcgtgcatctgtaccggaacggaaaggatcaggatggggatcaggctccagagtatcgaggcaggaccgaactacttaaagatgcgatcggagagggaaaagttaccctcagaattagaaatgttcgctttagtgacgagggtggcttcacctgtttttttcgggaccattcctatcaagaagaggcggcaatggagctaaaggtggaagtgtcacattctgtgacccaagactggttgcaatggcacgaccacgggtctctccagcctccccctccccggctgaaatag

SEQ ID NO: 269079 - DNA, 516 bp, Artificial Sequence
  derived and/or modified sequence
atggccagcctgagccggcccagcctgcccagctgcctgtgcagctttctcctgctgctactccttcaggtgtcgagtagctacgcgggtcaattcagggtcatcggccctcggcatcctatccgtgccctagtcggagatgaagtcgagctgccctgtcgcatctctccaggcaaaaacgccaccgggatggaagttggatggtacagacctccgttctctcgggttgtacacctatatcgcaatggcaaggatcaggacggcgaccaagcaccggagtaccggggaagaactgagctgttaaaggatgctattggagagggaaaagtcactctgaggattcggaatgtgaggttttccgatgaggggggattcacttgttttttcagggaccactcataccaggaggaggcagccatggagctgaaggtggaggtatcccactccgtgacgcaggattggcttcagtggcatgatcatgggtcactccaacctccaccaccaagattgaaatag

SEQ ID NO: 269080 - DNA, 516 bp, Artificial Sequence
  derived and/or modified sequence
atggccagcctgagccggcccagcctgcccagctgcctgtgcagctttctccttctgttattgctgcaagtctcatctagctatgcaggccagtttcgagtgatcgggccgcgccatcccatccgggccctcgttggtgacgaagtggagctgccgtgccgcattagccctggaaaaaatgctaccggcatggaggtcggttggtaccgtcctccgtttagcagagtagttcacctatatcggaatggcaaagatcaggacggggatcaggctccagaatataggggaagaaccgagttgcttaaggatgccatcggtgaaggcaaggtgacgcttaggatccgaaatgtacggttcagtgacgaaggagggtttacctgcttcttcagggaccactcataccaagaagaagccgcgatggaactgaaggtcgaagtctcccactctgtgacacaggactggctacagtggcatgatcatggcagcttacagcccccgcctccccggctgaagtag

SEQ ID NO: 269081 - DNA, 516 bp, Artificial Sequence
  derived and/or modified sequence
atggccagcctgagccggcccagcctgcccagctgcctgtgcagcttcctgctgctgctgttgctgcaagtctcttcgtcgtacgccggacaatttcgggttatcggaccccgccaccccattcgggccctggtgggagacgaggtcgagctcccctgcaggatttccccagggaagaacgctactggcatggaggtgggatggtatagaccaccatttagccgggtggtgcatttatatcgcaatggcaaagatcaggacggtgaccaagccccagagtacagaggtcgaacagaacttctgaaggatgccatcggcgagggcaaggttactctgcgtataagaaatgttcggttctctgatgaaggcggcttcacttgcttttttcgagaccattcctatcaagaagaagcagctatggaattgaaggtggaggtgtcccactctgtgacccaggactggctgcagtggcatgatcacgggagtctgcaaccacccccccctaggctcaagtag

SEQ ID NO: 269082 - DNA, 516 bp, Artificial Sequence
  derived and/or modified sequence
atggccagcctgagccggcccagcctgcccagctgcctgtgcagcttccttcttttgctccttttacaagtttcttcaagctacgctggacaattcagagttattgggccccggcacccaattcgggcactagtcggggacgaggtagagctcccttgccgtatttctcctggcaagaacgcaacaggcatggaagttggatggtatcggccaccgttctccagggtcgtacacttgtacagaaatggcaaggaccaggacggcgaccaggccccagaatatcggggccgaacggaactcctaaaagacgctattggcgaggggaaagtcactctacgtatcaggaacgttcgcttcagcgatgaaggagggttcacgtgctttttcagggatcactcataccaggaggaggcagccatggagctcaaggtggaagtgagccatagcgtgactcaggattggctgcagtggcatgaccatgggagcctacagccgccccccccaaggttgaagtag

SEQ ID NO: 269083 - DNA, 516 bp, Artificial Sequence
  derived and/or modified sequence
atggcatctttgagcagacccagtctgcctagctgtctgtgtagctttctgctgctgttgcttctacaggtgtcctcttcttatgcgggacagttcagagtgataggacccaggcaccccataagggcgctggtgggcgatgaagtagagctgccctgcaggatctcccccggaaagaatgctaccgggatggaagtaggctggtatcgccctcccttctccagagtggtccacctgtaccggaacggcaaggatcaggacggtgatcaagcgcctgagtaccgcggtaggacggaattgttgaaggacgctattggcgaggggaaagtgaccctgcggattcggaatgttagattctcagatgaaggcggattcacatgttttttcagagatcactcttaccaagaagaggcggctatggaactaaaagtggaggtcagccacagcgtgacccaggattggctgcagtggcacgatcacggtagcctgcaaccaccccctccacgcctcaagtag

SEQ ID NO: 269084 - DNA, 516 bp, Artificial Sequence
  derived and/or modified sequence
atggcctctctttcccgcccttcattaccatcctgcctgtgcagctttctgctgcttttgctcctgcaggttagtagtagctatgccggacagtttagagtcatcggaccacgccaccctatacgagccctggtgggcgatgaagttgaacttccttgtcgcatcagcccaggcaaaaacgccacggggatggaggttggctggtaccgccctccctttagtagggtggtgcatctgtatagaaatggcaaggaccaagacggagaccaagcgcctgaatatagaggacgcaccgaactcctgaaagatgccattggggaggggaaagtgactctgaggattaggaacgtccgtttctctgatgaggggggatttacctgtttttttagagaccactcttaccaggaggaggccgctatggagttgaaggtagaggtgagccattccgtcactcaagattggcttcagtggcacgatcatggctccctacagccacccccacccagactgaaatag

SEQ ID NO: 269085 - DNA, 516 bp, Artificial Sequence
  derived and/or modified sequence
atggccagcctcagccggcctagcctgccctcttgcctgtgctcttttctgttgttgctactgctccaagtttcttctagttatgccggacagttccgcgtcataggccctcggcatccaatccgggcactggtgggggatgaagtcgagctgccctgcagaataagccccggtaaaaacgcaactgggatggaggtcggctggtaccgccctcccttcagtcgcgtcgtacacttgtacaggaacggtaaggaccaggatggcgatcaggccccagagtataggggcaggaccgagctcctcaaagatgctatcggcgaaggcaaggtgacgcttaggatccggaacgttcgattctccgacgaaggtggctttacatgctttttccgggaccactcatatcaggaagaagcggctatggaactgaaagtggaagtctctcatagtgtgacccaagactggcttcaatggcatgatcatggcagcctccagcctcccccaccaaggttgaagtag

SEQ ID NO: 269086 - DNA, 516 bp, Artificial Sequence
  derived and/or modified sequence
atggctagtttatcaagaccttctctgccttcttgcttatgtagcttccttctcctgcttttactacaagtttcaagttcctacgctggtcagttccgtgtgataggccctaggcaccctatccgggcactagtcggcgacgaggtcgagttgccttgtcggatttcccctgggaagaatgctactgggatggaagtgggctggtatcgcccacctttttctcgcgtggtgcacctctaccgcaatggcaaggatcaggatggtgatcaggcgccagaatatcggggacgaacggagctgctcaaggacgctataggcgagggcaaggttacactgagaattcgtaatgtccggttctctgacgaagggggattcacctgcttttttagagaccactcttaccaagaagaggccgctatggaattgaaggtggaagtatcccactctgtgacacaagactggcttcagtggcatgatcatggctctctgcagccgcctccacccagactgaagtag

SEQ ID NO: 269087 - DNA, 516 bp, Artificial Sequence
  derived and/or modified sequence
atggcgtccctgtcccggcctagcttgccaagttgtctttgcagttttcttttattgttactcttacaggtttccagcagttatgccggacagtttcgcgtgattggacccagacacccgatacgggctttagtcggagatgaagtggagctgccttgtagaatttcccctggcaagaatgccaccgggatggaggtgggctggtacagaccaccctttagtagggttgtgcatctgtaccgaaatgggaaggaccaagatggcgatcaggcacccgaatacagagggaggacagagcttttgaaagatgccatcggtgaaggtaaggtgaccctccgcatccgcaatgtcaggttcagtgacgagggagggtttacttgcttcttccgcgatcacagctaccaggaggaagcagccatggagctcaaggtggaggtatctcatagcgtcacccaggactggttgcagtggcacgaccatggatctctgcagcctcctcctcccagactgaaatag

SEQ ID NO: 269088 - DNA, 516 bp, Artificial Sequence
  derived and/or modified sequence
atggcatcactgtcgcggccttctctgcccagctgcctctgctctttcttgctactgttgttactccaggtgtcctcctcttacgcgggacagtttagagttattgggcctcggcacccaattagagcgctggtgggcgacgaggtcgagttgccctgtcgcatctccccgggtaagaatgcgacaggcatggaagtcgggtggtacaggcccccatttagtcgggttgtgcatctttacagaaacggcaaggaccaggatggggatcaggcgcctgaataccggggacggactgaactgttaaaggatgccattggtgagggcaaagtgactctgcgtattaggaacgtgcgcttttcagacgagggcggatttacatgcttttttcgcgatcactcctaccaggaagaggccgctatggaattaaaggtcgaggtgagccattcggtgacacaggactggcttcagtggcatgaccacggttcacttcaaccccctccacccaggctgaagtag

SEQ ID NO: 269089 - DNA, 516 bp, Artificial Sequence
  derived and/or modified sequence
atggcctcgctgagccggccatcattgccctcttgcctttgctcttttcttctccttcttcttctgcaggtgagcagttcatacgccggtcagttccgcgtgataggccctcgccacccaatacgtgccctggtgggagacgaggttgaactgccatgtaggatctctccgggaaaaaacgccacgggcatggaagttgggtggtaccgccctcccttttctagagttgttcacttgtaccggaatggcaaagatcaggatggtgaccaagcccctgagtacaggggacggaccgagctgctcaaagatgctattggggaggggaaagttactttgcgaattcgcaacgtgcgcttcagcgatgagggtggatttacgtgtttctttcgagatcactcctatcaggaggaggcagccatggagctcaaggtcgaagtgtcccactctgtgacccaggattggctgcagtggcatgaccacggcagcctgcaaccaccaccacctcggctgaagtag

SEQ ID NO: 269090 - DNA, 516 bp, Artificial Sequence
  derived and/or modified sequence
atggctagtctcagtagaccaagcctgccatcttgcctgtgcagcttccttctcctccttctgttacaagtgtcgtcgtcgtatgccggacagttccgtgtcatcggacctcgccaccccattagggctcttgtaggagacgaagtcgagctcccttgtcggatttcccctggcaaaaatgctacaggtatggaagtgggctggtacaggcctccgttttctagagtcgtgcatctgtacagaaatggcaaggatcaggacggggatcaggccccagagtatagaggacgcactgaactcttgaaggatgccatcggtgaaggcaaggtcactttgcggatccggaacgtccgcttcagcgatgaaggcggttttacctgctttttcagggaccactcttatcaagaggaagcagccatggaactcaaggtagaggtgtcacactccgtgactcaggactggctacagtggcatgaccatggcagccttcagccccctccccctcgcctgaaatag

SEQ ID NO: 269091 - DNA, 516 bp, Artificial Sequence
  derived and/or modified sequence
atggccagtctgtctcggccttccctaccttcttgcttgtgctctttcttgcttctgcttcttttacaagtgtcttcttcttacgccggacagttcagagtcattgggcctcgccatcccatcagggcacttgttggagatgaagtggagcttccctgtcgaatttcccccggaaagaatgcaaccgggatggaggtcggttggtaccgtcctcctttttctcgcgtagtgcacctataccgcaacggtaaggaccaggacggagaccaggccccagagtaccgcggacggaccgaattgctgaaagacgctatcggcgaaggcaaggtcaccttaagaatcaggaacgtgagattcagcgatgagggcggatttacgtgtttcttccgcgatcactcttatcaggaagaagctgccatggagctcaaagtagaggtgagccattccgtcactcaagattggttgcagtggcacgatcatggcagcctacagccccctccgcctcggctcaaatag

SEQ ID NO: 269092 - DNA, 516 bp, Artificial Sequence
  derived and/or modified sequence
atggccagcctgagcagacccagcctgcccagctgcctgtgcagcttcctgctgctgctgctgctgcaggtgagcagcagctacgccggccagttcagagtgatcggccccagacaccccatcagagccctggtgggcgacgaggtggagctgccctgcagaatcagccccggcaagaacgccaccggcatggaggtgggctggtacagaccccccttcagcagagtggtgcacctgtacagaaacggcaaggaccaggacggcgaccaggcccccgagtacagaggcagaaccgagctgctgaaggacgccatcggcgagggcaaggtgaccctgagaatcagaaacgtgagattcagcgacgagggcggcttcacctgcttcttcagagaccacagctaccaggaggaggccgccatggagctgaaggtggaggtgagccacagcgtgacccaggactggctgcagtggcacgaccacggcagcctgcagccccccccccccagactgaagtag

SEQ ID NO: 269093 - protein, 231 aa, Artificial Sequence
  derived and/or modified sequence
MAGKKVLIVYAHQEPKSFNGSLKNVAVDELSRQGCTVTVSDLYAMNLEPRATDKDITGTLSNPEVFNYGVETHEAYKQRSLASDITDEQKKVREADLVIFQFPLYWFSVPAILKGWMDRVLCQGFAFDIPGFYDSGLLQGKLALLSVTTGGTAEMYTKTGVNGDSRYFLWPLQHGTLHFCGFKVLAPQISFAPEIASEEERKGMVAAWSQRLQTIWKEEPIPCTAHWHFGQ

SEQ ID NO: 269094 - protein, 63 aa, Artificial Sequence
  derived and/or modified sequence
MAGKKVLIVYAHQEPKSFNGSLKNVAVDELSRQGCTVTVSDLYAMNLEPRATDKDITGTLSNP

SEQ ID NO: 269095 - DNA, 696 bp, Artificial Sequence
  derived and/or modified sequence
atggctgggaaaaaagtgctgatcgtatacgcccaccaggaacccaagagctttaacggcagcctaaaaaacgtcgcggtggacgagctcagcaggcagggatgcactgtgacagtgtcagacttatacgcgatgaacctagagcccagggccactgataaggacatcacgggtaccttaagcaaccctgaagtgtttaattacggtgtagagacccacgaggcctacaagcagaggtccctggcgtcagacatcacagacgaacaaaagaaagtcagggaagccgacctagtgatatttcagttccccctgtactggttttctgtgccagccatattgaagggctggatggatcgggtgttgtgtcagggctttgcctttgacataccaggcttctacgactcgggcctccttcagggcaagctcgcactccttagtgttacaactggcggaacagcggagatgtacacgaaaacaggagtcaatggcgatagcagatactttttgtggccgctgcagcacggaacactgcatttctgtgggttcaaggtccttgcccctcagatctcgttcgccccagaaatcgccagtgaggaggagagaaagggcatggttgccgcatggtctcagcgtctgcagaccatatggaaagaggagcccattccttgtacagcgcactggcactttggtcagtag

SEQ ID NO: 269096 - DNA, 696 bp, Artificial Sequence
  derived and/or modified sequence
atggccgggaaaaaagtacttatcgtatacgctcaccaggagcctaaatccttcaatgggagcctgaagaacgtagctgtcgacgagctctccagacagggctgtacagtgacagtgtcggacctatacgctatgaacttggaacccagggctacagacaaggatatcacaggaaccctatcgaatcctgaggtgttcaattacggagtggaaacgcacgaggcctacaagcagaggtctctggcctctgatattacagatgaacagaaaaaggtcagagaggccgatttggttatctttcagtttcccctgtattggtttagcgtgcccgccatacttaaggggtggatggaccgtgtgctttgtcaaggattcgcctttgacatccctggcttctacgattccggtctcttacaggggaagctcgctcttctgagtgtcaccaccggaggaacagctgagatgtacaccaagactggagtcaatggcgattctcgatatttcctttggcctctgcagcacggcactcttcacttctgcggcttcaaggtgctcgcgccacagatcagctttgcccccgaaatcgccagtgaggaagagcgcaaaggtatggtggccgcttggtcacagcgtttacaaacaatatggaaagaagaacccatcccgtgtactgcccattggcactttggtcagtag

SEQ ID NO: 269097 - DNA, 696 bp, Artificial Sequence
  derived and/or modified sequence
atggctgggaagaaggttctcatcgtgtacgcgcaccaggagccaaagtcttttaacgggagtttaaagaacgttgcggtggatgagctatctcgccaaggctgtacagtgactgtctctgacttatatgcgatgaaccttgaaccacgggccactgacaaagatatcaccgggacattgtcaaaccccgaggttttcaactatggcgtggagacccatgaagcatataagcagaggagtctggcttctgacatcaccgacgaacagaagaaggtgagagaggccgatctggtcatcttccagttccctttgtattggtttagcgtccctgctatcttgaaggggtggatggatcgggtcctgtgtcaaggatttgcatttgatattcctggtttctacgacagcggcctattacaggggaaattggctttgctgtcggtcactaccgggggaacagcagaaatgtacactaaaaccggcgtcaacggagacagccgatacttcctttggccactgcagcacgggaccctgcatttttgtggatttaaagtgctcgcgccacagataagctttgcgccagagatcgcctctgaggaggaaaggaaaggaatggtggcagcttggagtcaaagactgcagactatttggaaggaggagcctataccatgcacagcccattggcattttggtcagtag

SEQ ID NO: 269098 - DNA, 696 bp, Artificial Sequence
  derived and/or modified sequence
atggccggcaagaaggtgctgattgtgtatgcccaccaggagcccaagagcttcaacggcagcctgaagaatgtggccgtggatgagctgagccggcagggctgcaccgtgacagtgtctgacctgtatgccatgaacctggagccccgggccacagacaaggacatcaccggcaccctgagcaaccctgaggtgttcaactacggcgtggagacccatgaggcctacaagcagaggagcctggccagtgacatcacagatgagcagaagaaggtgcgggaggccgacctggtgatcttccagttccccctgtactggttctctgtgcctgccatcctgaagggctggatggacagagtgctgtgccagggctttgcctttgacatccctggcttctatgattctggcctgctgcagggcaagctggccctgctgtctgtgaccactggaggaacagctgagatgtacaccaagacaggagtgaatggagacagccgctacttcctgtggcccctgcagcacggcaccctgcacttctgtggcttcaaggtgctggccccccagatcagctttgcccctgagatcgccagcgaggaggagaggaagggcatggtggccgcctggagccagaggctgcagaccatctggaaggaggagcccatcccctgcacagcccactggcacttcggccagtag

SEQ ID NO: 269099 - DNA, 1515 bp, Artificial Sequence
  derived and/or modified sequence
agcgagtgcgcggtccagtgcggccggaacctggcgcaactcctagagcggtccttggggagacgcgggtcccagtcctgcggctcctactggggagtgcgctggtcggaagggggatggagacagaagtcacaaactcacatgccaccagccatatgatgtaaacatgtaaactgggccaaggaatacaaaagggagtggtgagctggggacactgaagaatggatgccctgtctagaggagtgaaaatgaagcatttcatacaaacaacatgatttcgggcaatcactttgggaatcaggataaggtgttcccccagtctgcagaaacactggcaacatttacaaagctttaggttcattcttgtaagtgttgctggtgtcagaataggaacctccctgcgctttgaagggatgaatgtgacctctcccacattctccggtgctgtgatgtaccttaaacacagcaagggcacctggcctgggtggagcccactcctcagcacccacctcacttcttgcagtattctgcagaccccagccctgtgcctgtgctcctggacagctggagataaggagtgggccctggaagatgctcattcaggccctgctcaagattccagtcctgattgctggactcgctgaagagagactacgcaggaaagccccagccacccatcaaatcagagagaaggaatccaccttcttacgctatggcaggtaagaaagtactcattgtctatgcacaccaggaacccaagtctttcaacggatccttgaagaatgtggctgtagatgaactgagcaggcagggctgcaccgtcacagtgtctgatttgtatgccatgaaccttgagccgagggccacagacaaagatatcactggtactctttctaatcctgaggttttcaattatggagtggaaacccacgaagcctacaagcaaaggtctctggctagcgacatcactgatgagcagaaaaaggttcgggaggctgacctagtgatatttcagttcccgctgtactggttcagcgtgccagccatcctgaagggctggatggatagggtgctgtgccagggctttgcctttgacatcccaggattctacgattccggtttgctccagggtaaactagcgctcctttccgtaaccacgggaggcacggccgagatgtacacgaagacaggagtcaatggagattctcgatacttcctgtggccactccagcatggcacattacacttctgtggatttaaagtccttgcccctcagatcagctttgctcctgaaattgcatccgaagaagaaagaaaggggatggtggctgcgtggtcccagaggctgcagaccatctggaaggaagagcccatcccctgcacagcccactggcacttcgggcaataactctgtggcacgtgggcatcacgtaagcagcacactaggaggcccaggcgcaggcaaagagaagatggtgctgtcatgaaataaaattacaacatagctacctgggg

SEQ ID NO: 269100 - DNA, 1098 bp, Artificial Sequence
  derived and/or modified sequence
cagggatttcagctggccggccatatggccctgtgggtcgtcgcgcccgggccagggaccattctgtacataggatcgtgcttggctctcacggaacgcgcccacacgcagggtcccggtgtcgaatcgtctggtggaatctgccctcaaccctatggagcgggtgctggtatcatagtcatattacaagtaggaatcagcgggcccaagattgctggactcgctgaagagagactacgcaggaaagccccagccacccatcaaatcagagagaaggaatccaccttcttacgctatggcaggtaagaaagtactcattgtctatgcacaccaggaacccaagtctttcaacggatccttgaagaatgtggctgtagatgaactgagcaggcagggctgcaccgtcacagtgtctgatttgtatgccatgaaccttgagccgagggccacagacaaagatatcactggtactctttctaatcctgaggttttcaattatggagtggaaacccacgaagcctacaagcaaaggtctctggctagcgacatcactgatgagcagaaaaaggttcgggaggctgacctagtgatatttcagttcccgctgtactggttcagcgtgccagccatcctgaagggctggatggatagggtgctgtgccagggctttgcctttgacatcccaggattctacgattccggtttgctccagggtaaactagcgctcctttccgtaaccacgggaggcacggccgagatgtacacgaagacaggagtcaatggagattctcgatacttcctgtggccactccagcatggcacattacacttctgtggatttaaagtccttgcccctcagatcagctttgctcctgaaattgcatccgaagaagaaagaaaggggatggtggctgcgtggtcccagaggctgcagaccatctggaaggaagagcccatcccctgcacagcccactggcacttcgggcaataactctgtggcacgtgggcatcacgtaagcagcacactaggaggcccaggcgcaggcaaagagaagatggtgctgtcatgaaataaaattacaacatagctacctgggg

SEQ ID NO: 269101 - DNA, 977 bp, Artificial Sequence
  derived and/or modified sequence
ccggaacctggcgcaactcctagagcggtccttggggagacgcgggtcccagtcctgcggctcctactggggagtgcgctggtcggaagattgctggactcgctgaagagagactacgcaggaaagccccagccacccatcaaatcagagagaaggaatccaccttcttacgctatggcaggtaagaaagtactcattgtctatgcacaccaggaacccaagtctttcaacggatccttgaagaatgtggctgtagatgaactgagcaggcagggctgcaccgtcacagtgtctgatttgtatgccatgaaccttgagccgagggccacagacaaagatatcactggtactctttctaatcctgaggttttcaattatggagtggaaacccacgaagcctacaagcaaaggtctctggctagcgacatcactgatgagcagaaaaaggttcgggaggctgacctagtgatatttcagttcccgctgtactggttcagcgtgccagccatcctgaagggctggatggatagggtgctgtgccagggctttgcctttgacatcccaggattctacgattccggtttgctccagggtaaactagcgctcctttccgtaaccacgggaggcacggccgagatgtacacgaagacaggagtcaatggagattctcgatacttcctgtggccactccagcatggcacattacacttctgtggatttaaagtccttgcccctcagatcagctttgctcctgaaattgcatccgaagaagaaagaaaggggatggtggctgcgtggtcccagaggctgcagaccatctggaaggaagagcccatcccctgcacagcccactggcacttcgggcaataactctgtggcacgtgggcatcacgtaagcagcacactaggaggcccaggcgcaggcaaagagaagatggtgctgtcatgaaataaaattacaacatagctacctgggg

SEQ ID NO: 269102 - DNA, 696 bp, Artificial Sequence
  derived and/or modified sequence
atggccggcaagaaggtgctgatcgtgtacgcccaccaggagcccaaaagtttcaacggctctttgaagaatgttgctgtggacgaactctcacgacagggctgcactgttactgttagtgatttgtacgccatgaatctcgagccacgtgctaccgacaaggatatcaccgggaccctgtccaatcctgaggtctttaactacggtgtggagactcacgaggcttacaagcagcggagccttgctagtgatattacagacgaacagaaaaaggtacgcgaggccgaccttgtgatttttcagtttcccctttactggttctccgtccctgcaattctaaaaggctggatggaccgtgtcctctgtcagggcttcgcattcgatatccccggcttctatgattctgggttactccagggcaaacttgctcttctctccgttaccacaggggggaccgccgagatgtataccaagacaggagtgaacggagactcgaggtattttttgtggccccttcaacacggcaccttgcacttttgtgggtttaaagtgctggctcctcagatcagctttgccccagagatcgccagcgaggaggagcgaaaaggaatggtggctgcatggtcgcagagactgcagacaatttggaaggaagagccaatcccttgtacagcccactggcatttcggtcagtag

SEQ ID NO: 269103 - DNA, 696 bp, Artificial Sequence
  derived and/or modified sequence
atggccggcaagaaggtgctgatcgtgtacgcccaccaggagcccaagagctttaacggaagccttaaaaacgttgctgtggatgagctgtcccgacagggatgcacagtcaccgtgagcgatctgtacgccatgaatctggagccacgggctacagacaaagacataactggcacactgtctaatcccgaggtctttaactatggagtggagacccacgaagcttacaaacagaggagcttggcttccgacataacagacgagcaaaagaaggtccgggaagctgacctggtaatctttcagtttcctctctactggttctccgtgcccgcgatcttaaaaggatggatggatagggtgctatgccaggggttcgcttttgacatcccaggattctacgatagcggattacttcagggtaagctggcactgttgtcagtcaccaccgggggaacagctgagatgtatacgaaaactggtgtcaacggtgattcccgctactttctgtggccccttcagcatgggacactccatttctgtgggttcaaagtgctggcccctcaaattagtttcgcccccgagatcgccagcgaggaggaacgcaagggtatggtagccgcctggagccagcggctgcagacaatctggaaggaggagcctatcccatgcactgcgcattggcacttcgggcaatag

SEQ ID NO: 269104 - DNA, 696 bp, Artificial Sequence
  derived and/or modified sequence
atggccggcaagaaggtgctgatcgtgtacgcccaccaggagcccaaatctttcaacgggagtctaaaaaatgtcgcagtggatgagctcagccgccaagggtgtactgtgactgtatccgacctgtatgcaatgaacctcgagccccgggccactgacaaggatattactggcaccctgtcaaacccggaggtgtttaattatggcgttgagacacacgaagcatacaaacagcgctcacttgcgtctgatatcacggacgagcaaaagaaagttcgtgaggccgacctggttattttccagtttccgctctattggttcagtgtccctgctattctgaaaggatggatggaccgcgtcctttgtcagggatttgccttcgatatccccggattctacgactcaggacttctgcagggaaagctagctctgcttagcgtgacgacaggcggaaccgcggagatgtacaccaagactggagttaacggagacagtcggtactttttgtggccgcttcagcacgggactctccacttttgcggtttcaaagttcttgccccccagatctctttcgcccctgaaattgcgtccgaagaggagcgcaaagggatggtagccgcctggtctcagcgcctgcaaaccatatggaaagaagagcctattccttgcacggcacactggcacttcgggcagtag

SEQ ID NO: 269105 - DNA, 696 bp, Artificial Sequence
  derived and/or modified sequence
atggccggaaaaaaagtgctgatcgtttacgcccatcaagagcctaaatcttttaatggatcactgaaaaacgtcgcggttgacgaattgagtcgacaggggtgcactgtgacagtatctgacctgtatgccatgaatctcgagcccagagccacagataaagatattactggaaccctatcaaatcccgaggtgtttaattatggcgttgagacacacgaggcttacaagcagcgatctctagcttcagacataacggacgagcagaaaaaggtgagagaagctgacttagttattttccagttccctctatattggttttcggtccccgctatcctcaaaggatggatggaccgagttctttgccagggattcgcttttgatattcccggattttacgattctgggctcttgcagggcaaactggccctactgtctgtgaccaccggaggcaccgccgagatgtacacaaaaaccggagtgaacggcgattcacgctattttctttggcccctgcagcatggcactctgcatttttgcggctttaaagtgttagcaccgcaaatctcttttgccccagaaatcgcctcagaagaagagagaaagggcatggtggccgcatggagtcaaaggcttcaaacgatttggaaggaggaacctattccctgtactgcacactggcacttcggccagtag

SEQ ID NO: 269106 - DNA, 696 bp, Artificial Sequence
  derived and/or modified sequence
atggccggaaaaaaggtcctcatcgtctacgctcatcaggaacccaagtctttcaacggatccctgaaaaatgttgcagtcgacgagctgagcaggcaggggtgcaccgtaacagtctccgatctatatgcgatgaatctcgagccacgggcaactgacaaagacattaccggcactctctccaaccctgaggtctttaattacggggttgagactcacgaggcatataaacaaagatctcttgctagcgacatcacggacgaacagaaaaaggttagggaggctgacttagtcatctttcaattcccactatattggtttagtgttcccgcaattctcaagggatggatggatcgagttctatgccagggctttgcatttgacatacctggattttatgactcaggcctgttgcaaggtaagctcgcactgttaagcgtgacaactggaggaacagctgaaatgtatacaaaaaccggtgtgaacggggatagccgctactttctgtggccattacagcatggcactctgcacttttgtggcttcaaggtgcttgctccccaaatttctttcgccccagagattgcttccgaagaagagcggaagggcatggtggcagcttggtctcagcggctgcagaccatctggaaagaggaacctatcccttgtaccgctcactggcacttcggacagtag

SEQ ID NO: 269107 - DNA, 696 bp, Artificial Sequence
  derived and/or modified sequence
atggcaggcaaaaaggttctgattgtatacgcacaccaggagcccaagtcttttaatggctccttgaagaatgttgccgttgacgagctttcccggcagggctgcaccgtgactgtttcggatctgtacgctatgaaccttgaaccaagggctaccgataaggatataacaggaaccttgagcaacccagaggtgttcaactacggagtcgagacacacgaagcttataagcagagaagcctggcctccgacataactgacgaacagaaaaaggttcgtgaagcagatttggtgatctttcagtttcccttgtactggttctccgtgcccgctatcttgaaggggtggatggaccgggtgctctgccagggattcgctttcgacattcccggattctacgattcaggtctgctgcagggcaaattggccctcctgtccgttactactggtggcacggccgagatgtatactaaaaccggagtcaacggcgacagccgctacttcctgtggccccttcaacatggcacactgcacttctgcggatttaaagtgctcgcaccacagatctctttcgcccctgagatcgccagcgaagaggaacgtaaaggaatggtggcggcttggagccaacggctccagactatttggaaagaagagcctatcccttgtacggcccattggcatttcggccagtag

SEQ ID NO: 269108 - DNA, 696 bp, Artificial Sequence
  derived and/or modified sequence
atggccggcaagaaggtgctgatcgtgtacgcccaccaggagcccaagagcttcaacggcagcctgaagaacgtggccgtggacgagctgagcagacagggctgcaccgtgaccgtgagcgacctgtacgccatgaacctggagcccagagccaccgacaaggacatcaccggcaccctgagcaaccccgaggtgttcaactacggcgtggagacccacgaggcctacaagcagagaagcctggccagcgacatcaccgacgagcagaagaaggtgagagaggccgacctggtgatcttccagttccccctgtactggttcagcgtgcccgccatcctgaagggctggatggacagagtgctgtgccagggcttcgccttcgacatccccggcttctacgacagcggcctgctgcagggcaagctggccctgctgagcgtgaccaccggcggcaccgccgagatgtacaccaagaccggcgtgaacggcgacagcagatacttcctgtggcccctgcagcacggcaccctgcacttctgcggcttcaaggtgctggccccccagatcagcttcgcccccgagatcgccagcgaggaggagagaaagggcatggtggccgcctggagccagagactgcagaccatctggaaggaggagcccatcccctgcaccgcccactggcacttcggccagtag

SEQ ID NO: 269109 - protein, 209 aa, Artificial Sequence
  derived and/or modified sequence
MNPSMKQKQEEIKENIKNSSVPRRTLKMIQPSASGSLVGRENELSAGLSKRKHRNDHLTSTTSSPGVIVPESSENKNLGGVTQESFDLMIKENPSSQYWKEVAEKRRKALYEALKENEKLHKEIEQKDNEIARLKKENKELAEVAEHVQYMAELIERLNGEPLDNFESLDNQEFDSEEETVEDSLVEDSEIGTCAEGTVSSSTDAKPCI

SEQ ID NO: 269110 - protein, 179 aa, Artificial Sequence
  derived and/or modified sequence
MNPSMKQKQEEIKENIKNSSVPRRTLKMIQPSASGSLVGRENELSAGLSKRKHRNDHLTSTTSSPGVIVPESSENKNLGGVTQESFDLMIKENPSSQYWKEVAEKRRKALYEALKENEKLHKEIEQKDNEIARLKKENKELAEVAEHVQYMAELIERLNGEPLDNFESLDNQEFDSEEE

SEQ ID NO: 269111 - protein, 102 aa, Artificial Sequence
  derived and/or modified sequence
MNPSMKQKQEEIKENIKNSSVPRRTLKMIQPSASGSLVGRENELSAGLSKRKHRNDHLTSTTSSPGVIVPESSENKNLGGVTQESFDLMIKENPSSQYWKEV

SEQ ID NO: 269112 - protein, 66 aa, Artificial Sequence
  derived and/or modified sequence
MNPSMKQKQEEIKENIKNSSVPRRTLKMIQPSASGSLVGRENELSAGLSKRKHRNDHLTSTTSSPG

SEQ ID NO: 269113 - DNA, 630 bp, Artificial Sequence
  derived and/or modified sequence
atgaaccccagcatgaagcagaagcaggaggagatcaaggagaacatcaagaacagcagcgtgcccagaagaaccctgaagatgatccagcccagcgccagcggcagcctggtgggcagagagaacgagctgagcgccggcctgagcaagagaaagcacagaaacgaccacctgaccagcaccaccagcagccccggcgtgatcgtgcccgagagcagcgagaacaagaacctgggcggcgtgacccaggagagcttcgacctgatgatcaaggagaaccccagcagccagtactggaaggaggtggccgagaagagaagaaaggccctgtacgaggccctgaaggagaacgagaagctgcacaaggagatcgagcagaaggacaacgagatcgccagactgaagaaggagaacaaggagctggccgaggtggccgagcacgtgcagtacatggccgagctgatcgagagactgaacggcgagcccctggacaacttcgagagcctggacaaccaggagttcgacagcgaggaggagaccgtggaggacagcctggtggaggacagcgagatcggcacctgcgccgagggcaccgtgagcagcagcaccgacgccaagccctgcatctag

SEQ ID NO: 269114 - DNA, 540 bp, Artificial Sequence
  derived and/or modified sequence
atgaaccccagcatgaagcagaagcaggaggagatcaaggagaacatcaagaacagcagcgtgcccagaagaaccctgaagatgatccagcccagcgccagcggcagcctggtgggcagagagaacgagctgagcgccggcctgagcaagagaaagcacagaaacgaccacctgaccagcaccaccagcagccccggcgtgatcgtgcccgagagcagcgagaacaagaacctgggcggcgtgacccaggagagcttcgacctgatgatcaaggagaaccccagcagccagtactggaaggaggtggccgagaagagaagaaaggccctgtacgaggccctgaaggagaacgagaagctgcacaaggagatcgagcagaaggacaacgagatcgccagactgaagaaggagaacaaggagctggccgaggtggccgagcacgtgcagtacatggccgagctgatcgagagactgaacggcgagcccctggacaacttcgagagcctggacaaccaggagttcgacagcgaggaggagtag

SEQ ID NO: 269115 - DNA, 309 bp, Artificial Sequence
  derived and/or modified sequence
atgaaccccagcatgaagcagaagcaggaggagatcaaggagaacatcaagaacagcagcgtgcccagaagaaccctgaagatgatccagcccagcgccagcggcagcctggtgggcagagagaacgagctgagcgccggcctgagcaagagaaagcacagaaacgaccacctgaccagcaccaccagcagccccggcgtgatcgtgcccgagagcagcgagaacaagaacctgggcggcgtgacccaggagagcttcgacctgatgatcaaggagaaccccagcagccagtactggaaggaggtgtag

SEQ ID NO: 269116 - DNA, 201 bp, Artificial Sequence
  derived and/or modified sequence
atgaaccccagcatgaagcagaagcaggaggagatcaaggagaacatcaagaacagcagcgtgcccagaagaaccctgaagatgatccagcccagcgccagcggcagcctggtgggcagagagaacgagctgagcgccggcctgagcaagagaaagcacagaaacgaccacctgaccagcaccaccagcagccccggctag

SEQ ID NO: 269117 - DNA, 1133 bp, Artificial Sequence
  derived and/or modified sequence
gtctgcgtcagttggtcacgtggttgttcggagcgggcgagcggagttagcagggctttactgcagagcgcgccgggcactccagcgaccgtggggatcagcgtaggtgagctgtggccttttgcgaggtgctgcagccatagctacgtgcgttcgctacgaggattgagcgtctccacccatcttctgtgcttcaccatctacataatgaatcccagtatgaagcagaaacaagaagaaatcaaagagaatataaagaatagttctgtcccaagaagaactctgaagatgattcagccttctgcatctggatctcttgttggaagagaaaatgagctgtccgcaggcttgtccaaaaggaaacatcggaatgaccacttaacatctacaacttccagccctggggttattgtcccagaatctagtgaaaataaaaatcttggaggagtcacccaggagtcatttgatcttatgattaaagaaaatccatcctctcagtattggaaggaagtggcagaaaaacggagaaaggcgctgtatgaagcacttaaggaaaatgagaaacttcataaagaaattgaacaaaaggacaatgaaattgcccgcctgaaaaaggagaataaagaactggcagaagtagcagaacatgtacagtatatggcagagctaatagagagactgaatggtgaacctctggataattttgaatcactggataatcaggaatttgattctgaagaagaaactgttgaggattctctagtggaagactcagaaattggcacgtgtgctgaaggaactgtatcttcctctacggatgcaaagccatgtatatgaaatgcattaatatttgactgttgagaattttactgccgaagtttacctccactagttctttgtagcagagtacataactacataatgccaactctggaatcaaatttccttgtttgaatcctgggaccctattgcattaaagtacaaatactatgtatttttaatctatgatggtttatgtgaataggattttctcagttgtcagccatgacttatgtttattactaaataaacttcaaactcctgttgaacattgtgtataacttagaataatgaaatataaggagtatgtgtag

SEQ ID NO: 269118 - DNA, 630 bp, Artificial Sequence
  derived and/or modified sequence
atgaacccatctatgaaacagaaacaggaggaaattaaggagaatattaaaaactcttccgtaccccgacgcacactgaaaatgattcagcccagcgcatccggcagcctggttggccgggagaatgagttatctgcaggattgagcaaaagaaagcaccgtaatgaccaccttacgtcaacaactagctcgcctggtgtaatcgtccccgaatccagcgaaaacaagaacctgggaggagtcactcaggaaagcttcgatttgatgattaaggagaacccatcctctcagtattggaaggaggtcgcagagaagcgcagaaaagccttgtacgaggcactaaaggagaacgaaaagctgcacaaggagatcgaacagaaggataacgagatcgcccgtcttaaaaaagagaataaggagctcgcagaggtggctgagcatgtgcagtacatggccgaactgatagagcgactcaacggtgagcccctggataacttcgaatcattggacaaccaggagtttgactctgaagaggagaccgtcgaggacagccttgtggaggatagcgagatcggcacttgtgctgaaggcactgtgagctctagcaccgacgccaaaccttgtatttag

SEQ ID NO: 269119 - DNA, 540 bp, Artificial Sequence
  derived and/or modified sequence
atgaatccgtctatgaagcagaagcaggaagaaattaaggagaacatcaaaaactcttccgtgccacgacgaacattgaagatgattcagccttctgcctcgggctctctcgtgggtcgcgagaatgaactgagcgccgggttgtctaagaggaaacacaggaacgatcatctcacctctaccacgtcttcccccggggtcattgtccccgagagctccgagaacaaaaacctgggtggagtgacacaggagtccttcgacttaatgataaaggagaatccaagtagccagtactggaaggaggtcgccgaaaaacggcggaaagctttgtatgaagccctcaaggaaaatgaaaagctgcataaggaaatcgaacagaaggacaacgaaatcgctagactgaaaaaagaaaataaggagctcgccgaggtcgccgagcacgtccagtacatggccgagctgattgagcgcctcaatggcgagccattggacaatttcgagtccctggataaccaggagttcgattccgaggaggagtag

SEQ ID NO: 269120 - DNA, 309 bp, Artificial Sequence
  derived and/or modified sequence
atgaatccttctatgaaacagaaacaggaggaaatcaaggagaatatcaaaaattcttccgtccccaggcgcactctcaagatgatccagccatccgcgagtggttcactggtagggagagaaaacgagcttagcgccggcctgtcaaagcggaagcacaggaatgatcatttgacatccacaactagcagtcccggcgtcatagtcccggaaagctctgagaacaagaatctggggggcgtgacccaggagagcttcgacttaatgattaaggagaatcccagcagccagtactggaaggaagtgtag

SEQ ID NO: 269121 - DNA, 201 bp, Artificial Sequence
  derived and/or modified sequence
atgaaccctagtatgaagcagaaacaggaggaaataaaagagaacatcaaaaattcctccgtgcctcgccgcactttaaagatgattcagccatcggcgtcaggatccctcgtgggtcgggaaaacgagttgtcagctgggctttctaagaggaagcatcgtaatgatcacctcacctccacgaccagttccccagggtag

SEQ ID NO: 269122 - DNA, 630 bp, Artificial Sequence
  derived and/or modified sequence
atgaaccccagcatgaagcagaagcaggaggagatcaaggagaacatcaagaacagctctgtgcccaggaggaccctgaagatgatccagcccagcgccagcggcagcctggtgggcagagaaaatgagctgtctgctggcctgagcaagaggaagcacagaaatgaccacctgaccagcaccaccagcagccctggggtcatcgtgcctgagagcagcgagaacaagaacctgggcggcgtgacccaggagagctttgacctgatgatcaaggagaaccccagcagccagtactggaaggaggtggccgagaagaggaggaaggccctgtatgaggccctgaaggaaaatgagaagctgcacaaggagattgagcagaaggacaatgaaattgcccggctgaagaaggagaacaaggagctggccgaggtggccgagcacgtgcagtacatggccgagctgattgagcggctgaatggagagcccctggacaactttgagagcctggacaaccaggagtttgacagcgaggaggagaccgtggaggacagcctggtggaggacagcgagatcggcacctgtgccgagggcaccgtgagcagcagcacagatgccaagccctgcatctag

SEQ ID NO: 269123 - DNA, 540 bp, Artificial Sequence
  derived and/or modified sequence
atgaaccccagcatgaagcagaagcaggaggagatcaaggagaacatcaagaacagctctgtgcccaggaggaccctgaagatgatccagcccagcgccagcggcagcctggtgggcagagaaaatgagctgtctgctggcctgagcaagaggaagcacagaaatgaccacctgaccagcaccaccagcagccctggggtcatcgtgcctgagagcagcgagaacaagaacctgggcggcgtgacccaggagagctttgacctgatgatcaaggagaaccccagcagccagtactggaaggaggtggccgagaagaggaggaaggccctgtatgaggccctgaaggaaaatgagaagctgcacaaggagattgagcagaaggacaatgaaattgcccggctgaagaaggagaacaaggagctggccgaggtggccgagcacgtgcagtacatggccgagctgattgagcggctgaatggagagcccctggacaactttgagagcctggacaaccaggagtttgacagcgaggaggagtag

SEQ ID NO: 269124 - DNA, 309 bp, Artificial Sequence
  derived and/or modified sequence
atgaaccccagcatgaagcagaagcaggaggagatcaaggagaacatcaagaacagctctgtgcccaggaggaccctgaagatgatccagcccagcgccagcggcagcctggtgggcagagaaaatgagctgtctgctggcctgagcaagaggaagcacagaaatgaccacctgaccagcaccaccagcagccctggggtcatcgtgcctgagagcagcgagaacaagaacctgggcggcgtgacccaggagagctttgacctgatgatcaaggagaaccccagcagccagtactggaaggaggtgtag

SEQ ID NO: 269125 - DNA, 653 bp, Artificial Sequence
  derived and/or modified sequence
gacgcgcggggccacactgcccgccccctagcctggcgctgggcctccgggacaagttggctgggtccgggcttggggactgcaacgcggtcttctgtgcttcaccatctacataatgaatcccagtatgaagcagaaacaagaagaaatcaaagagaatataaagaatagttctgtcccaagaagaactctgaagatgattcagccttctgcatctggatctcttgttggaagagaaaatgagctgtccgcaggcttgtccaaaaggaaacatcggaatgaccacttaacatctacaacttccagccctggggttattgtcccagaatctagtgaaaataaaaatcttggaggagtcacccaggagtcatttgatcttatgattaaagaaaatccatcctctcagtattggaaggaagtggcagaaaaacggagaaaggcgctgtatgaagcacttaaggaaaatgagaaacttcataaagaaattgaacaaaaggacaatgaaattgcccgcctgaaaaaggagaataaagaactggcagaagtagcagaacatgtacagtatatggcagagctaatagagagactgaatggtgaacctctggataattttgaatcactggataatcaggaatttgattctgaagaagaaa

SEQ ID NO: 269126 - DNA, 688 bp, Artificial Sequence
  derived and/or modified sequence
gatgctgctctttaggatggacctgggcataccctagtatctgtttattttgctttttctggtgactatttaatccaggacaatatgtttagaaattttaaaccagttttagaaattggtttaaaatacattaatttcattttttcagctataattattatgtgtgtatatatgtaaaatatagatatcaagagtcattaactttagtcaccttagtcattgacagggctgagtttggattaagagagaaaaaataatagttctactgtacaatagtataatttttatgattgtaagtattttaaacctagactccaccttcgggggtgcaaaccatattgttttttaattactagtcttctgtgcttcaccatctacataatgaatcccagtatgaagcagaaacaagaagaaatcaaagagaatataaagaatagttctgtcccaagaagaactctgaagatgattcagccttctgcatctggatctcttgttggaagagaaaatgagctgtccgcaggcttgtccaaaaggaaacatcggaatgaccacttaacatctacaacttccagccctggggttattgtcccagaatctagtgaaaataaaaatcttggaggagtcacccaggagtcatttgatcttatgattaaagaaaatccatcctctcagtattggaaggaagtgg

SEQ ID NO: 269127 - DNA, 201 bp, Artificial Sequence
  derived and/or modified sequence
atgaaccccagcatgaagcagaagcaggaggagatcaaggagaacatcaagaacagctctgtgcccaggaggaccctgaagatgatccagcccagcgccagcggcagcctggtgggcagagaaaatgagctgtctgctggcctgagcaagaggaagcacagaaatgaccacctgaccagcaccaccagcagccctggatag

SEQ ID NO: 269128 - DNA, 1262 bp, Artificial Sequence
  derived and/or modified sequence
tcagttggtcacgtggttgttcggagcgggcgagcggagttagcagggctttactgcagagcgcgccgggcactccagcgaccgtggggatcagcgtaggtgagctgtggccttttgcgaggtgctgcagccatagctacgtgcgttcgctacgaggattgagcgtctccacccagtaagtgggcaagaggcggcaggaagtgggtacgcaggggcgcaaggcgcacagcctctagacgactcgctttccctccggccaacctctgaagccgcgtcctactttgacagctgcagggccgcggcctggtcttctgtgcttcaccatctacataatgaatcccagtatgaagcagaaacaagaagaaatcaaagagaatataaagaatagttctgtcccaagaagaactctgaagatgattcagccttctgcatctggatctcttgttggaagagaaaatgagctgtccgcaggcttgtccaaaaggaaacatcggaatgaccacttaacatctacaacttccagccctggggttattgtcccagaatctagtgaaaataaaaatcttggaggagtcacccaggagtcatttgatcttatgattaaagaaaatccatcctctcagtattggaaggaagtggcagaaaaacggagaaaggcgctgtatgaagcacttaaggaaaatgagaaacttcataaagaaattgaacaaaaggacaatgaaattgcccgcctgaaaaaggagaataaagaactggcagaagtagcagaacatgtacagtatatggcagagctaatagagagactgaatggtgaacctctggataattttgaatcactggataatcaggaatttgattctgaagaagaaactgttgaggattctctagtggaagactcagaaattggcacgtgtgctgaaggaactgtatcttcctctacggatgcaaagccatgtatatgaaatgcattaatatttgactgttgagaattttactgccgaagtttacctccactagttctttgtagcagagtacataactacataatgccaactctggaatcaaatttccttgtttgaatcctgggaccctattgcattaaagtacaaatactatgtatttttaatctatgatggtttatgtgaataggattttctcagttgtcagccatgacttatgtttattactaaataaacttcaaactcctgttgaacattgtgtataacttagaataatgaaatataaggagtatgtgtagaaaa

SEQ ID NO: 269129 - DNA, 630 bp, Artificial Sequence
  derived and/or modified sequence
atgaaccccagcatgaagcagaagcaggaggagatcaaggagaacataaagaacagcagcgtgcctagaaggacacttaaaatgattcaacctagcgcctcaggttcactcgtggggcgtgagaatgagttgtcagcaggcctttccaaacggaaacatcgcaatgatcatcttaccagcactacttcgtcccccggtgtgatagtaccagagtcaagcgaaaacaaaaacctagggggagtcacccaagaatcattcgaccttatgattaaagaaaacccttcttcccaatattggaaagaagtggcggagaagcgccggaaggcactgtatgaggctcttaaagaaaacgaaaaacttcacaaggaaatcgaacagaaggacaacgagatcgcacgtctgaaaaaggaaaataaggagctggccgaggtcgcggaacatgtccagtacatggcggaactcattgaaaggctgaatggcgagcccctggataatttcgagtcacttgacaatcaagaattcgactccgaggaagagacagtcgaggatagtttagtcgaagattctgaaattggtacctgcgcggaggggacagtatccagctccacggacgctaagccctgtatttag

SEQ ID NO: 269130 - DNA, 540 bp, Artificial Sequence
  derived and/or modified sequence
atgaaccccagcatgaagcagaagcaggaggagatcaaggagaacatcaagaattcctccgtccctaggcgcacacttaagatgatacaacccagtgccagcggtagcctggtaggccgggaaaacgaattgtccgcagggttgtctaaacggaaacaccgaaacgaccacctcacatccactacttcgagtcccggggtgattgttccagagagttccgaaaataagaatctaggtggagtcacacaggagagctttgatctcatgattaaggagaacccatcttctcaatactggaaagaagtggccgagaagagacgcaaggcgctttacgaggctctcaaagagaatgaaaaattgcataaagaaatcgagcaaaaggataatgagattgcgcgcctcaaaaaggagaacaaggagttggctgaagtcgcagagcatgtgcagtatatggccgaattgattgaaaggctgaacggagaacccctggataatttcgagtctctggataaccaggagttcgactctgaggaagaatag

SEQ ID NO: 269131 - DNA, 309 bp, Artificial Sequence
  derived and/or modified sequence
atgaaccccagcatgaagcagaagcaggaggagatcaaggagaacatcaagaactcatcggttccccgtaggactctgaaaatgattcaacctagcgccagcggcagcctcgtgggccgggaaaacgaactgtcagcagggctgtctaaaagaaagcataggaacgaccacctgacaagcactacttcttctcctggggtcatcgtcccagaatcctctgaaaataaaaatttagggggagtgacccaggagtctttcgacctaatgatcaaagagaaccctagcagccagtactggaaggaggtgtag

SEQ ID NO: 269132 - DNA, 201 bp, Artificial Sequence
  derived and/or modified sequence
atgaaccccagcatgaagcagaagcaggaggagatcaaggagaacattaagaacagcagtgttccccgccgcactctgaaaatgatacaacctagtgccagtgggtctctggttggtcgggagaacgagcttagcgccggcctgtcgaagcggaagcaccggaatgaccaccttactagcaccacgtccagccccggctag

SEQ ID NO: 269133 - DNA, 630 bp, Artificial Sequence
  derived and/or modified sequence
atgaatcccagtatgaaacagaagcaggaggagatcaaggagaatatcaaaaactcttcagtgccaaggcgcaccctgaagatgatccagccgtctgcctctgggtctctggtgggcagagagaatgagctgtcagcgggactttcaaagcggaaacatcggaacgaccacctgacctctacaacatcttcacccggtgttatagtgcccgagtccagcgagaataaaaatctggggggagtgacccaggaatcttttgacctaatgataaaagagaaccccagctcacaatattggaaagaagtggccgagaagaggcgcaaggccctctacgaagccttgaaagagaatgaaaaactccacaaagaaatcgaacagaaggataatgaaattgcaaggctgaagaaggagaataaggaactggcggaggtagcagagcatgtccagtacatggccgagcttatcgaacgactcaatggcgaaccgctcgataattttgaaagtctggacaatcaggagtttgactcagaagaggagaccgtggaggattcattggttgaagacagtgagattgggacctgcgccgagggaaccgtgtcttcaagtactgacgcaaagccctgcatttag

SEQ ID NO: 269134 - DNA, 540 bp, Artificial Sequence
  derived and/or modified sequence
atgaatcccagcatgaagcagaagcaggaagagattaaggaaaacatcaagaatagttccgtacccagacgtacccttaaaatgatccagccatctgcttccggatctctggttgggagggagaacgagttaagtgccggtctgagcaaaagaaagcatagaaacgatcacttgaccagcacaacttcttcccccggagtgatagtgccagagtccagcgaaaacaaaaatctggggggagtgacacaggaatcattcgacctgatgataaaagaaaacccttctagtcagtactggaaggaggtggccgagaagcgcaggaaggcattatatgaagctttgaaggagaatgagaagctccacaaagaaatagaacaaaaagataatgaaattgcaagactcaagaaagaaaacaaggaactggccgaggtggcagaacatgtgcaatacatggccgaactgattgaacgattaaacggtgagccactcgataactttgagtcactggacaaccaggagttcgattccgaagaggagtag

SEQ ID NO: 269135 - DNA, 309 bp, Artificial Sequence
  derived and/or modified sequence
atgaacccctccatgaaacagaagcaggaagaaattaaggaaaacatcaagaactcttcagttcctagacggacactcaaaatgattcaacccagtgcatccggatcactcgtgggtcgggagaacgagttgtcagccggactctctaagcgtaagcacagaaatgaccacctgacttctaccactagctcaccaggcgtcatcgtccctgaatccagcgagaataagaacttgggcggagttactcaggagagtttcgaccttatgatcaaagagaatccttcatcccagtactggaaagaagtatag

SEQ ID NO: 269136 - DNA, 201 bp, Artificial Sequence
  derived and/or modified sequence
atgaatccatcaatgaaacaaaagcaggaagagataaaagaaaacatcaaaaacagtagcgtgccacgcagaaccttaaagatgatccagcctagcgcctccgggtccctggtagggagggaaaatgaactgtcagctgggctcagcaaaagaaagcatagaaacgatcaccttacgtccacgacctcttcccctgggtag

SEQ ID NO: 269137 - DNA, 580 bp, Artificial Sequence
  derived and/or modified sequence
agttggctgggtccgggcttggggactgcaacgcgggtaagggactcagcctgggcttgccagctgtggggatgaggcgaagcatccatcctcttggcagttaagtggctggtcctgatctgagggatctgcaaatttggctcatggaaagaggtggctgaattctgcgtctcccattaaacggatactggcgttgttgatacgggtttcgcatggaccctgtcctgtgccagggtttttaatctagctattaaaggaactggagaataacaagtaagggttgcaaggtcgctgacaggcgtgggaaacttgtgaaggattagaatgctaagtggctttcagcttttttcacactaagtcttctgtgcttcaccatctacataatgaatcccagtatgaagcagaaacaagaagaaatcaaagagaatataaagaatagttctgtcccaagaagaactctgaagatgattcagccttctgcatctggatctcttgttggaagagaaaatgagctgtccgcaggcttgtccaaaaggaaacatcggaatgaccacttaacatctacaacttccagccctgg

SEQ ID NO: 269138 - DNA, 630 bp, Artificial Sequence
  derived and/or modified sequence
atgaacccgtctatgaagcagaagcaagaggagattaaagaaaacatcaagaacagctctgttccacgcagaacactaaaaatgattcagccgtctgcaagcggcagtttggtgggcagagagaatgagctgtcagcgggcctctccaagcgaaagcatagaaatgaccacttaacttccacaacttcttccccaggcgtcattgtgccagagtcatctgagaataagaatctcgggggtgtgacacaggagtcatttgacctcatgatcaaggagaaccccagcagtcagtactggaaagaagttgctgagaagcgcagaaaagccctctatgaggcactaaaggagaacgaaaagctgcataaagaaattgagcagaaggacaatgagattgctcgactgaagaaggagaacaaggagctcgcggaagtggctgaacatgtgcagtatatggcagagttgatagagagactaaacggcgagcccctggataactttgagagtctggataatcaggagtttgatagtgaagaggagactgtggaagattccttggtcgaagactcagaaataggcacctgcgcagagggtaccgttagctcttctactgacgctaaaccttgtatctag

SEQ ID NO: 269139 - DNA, 630 bp, Artificial Sequence
  derived and/or modified sequence
atgaaccccagcatgaagcagaagcaggaggagatcaaggagaacattaagaactcttcagtaccgcggcggacgttgaagatgattcagccaagtgcctccggatccctggtgggcagggaaaatgaactcagtgctgggttgtctaaaaggaaacacagaaacgaccacttgaccagtacgaccagctccccgggagtcattgtgcccgaatcctctgaaaacaagaatctgggcggtgtaacccaggagtcttttgatctgatgattaaggagaacccgtctagccagtactggaaggaggtcgctgaaaagagaagaaaagcgttgtacgaagcactgaaagagaacgagaaattacataaggaaatcgaacagaaggacaacgaaatcgcacggttaaagaaggagaacaaagagcttgctgaagtggcggagcacgtacagtacatggccgagctaatcgaaagactgaatggggagccactggacaattttgagagcctggataatcaagagtttgacagcgaggaagagactgttgaagattctctggtagaagatagcgagatcggaacttgtgccgagggaacggtgtcctctagcacagacgccaagccatgtatctag

SEQ ID NO: 269140 - DNA, 630 bp, Artificial Sequence
  derived and/or modified sequence
atgaatcccagcatgaaacagaaacaggaggagataaaagagaacataaagaattctagtgtgcccaggagaactcttaaaatgattcagcctagcgcatcaggctctctagtgggaagagaaaacgagctgtctgccggtctgtccaagagaaaacatagaaatgatcatctgacaagtaccaccagttctccaggcgtcattgtgcccgagagcagcgaaaacaagaacctcggaggggtgacccaagaatcttttgacttgatgattaaggaaaatccatcgagccagtactggaaagaggtcgcagaaaaaagaagaaaggcactctacgaggctctgaaagaaaacgagaagctgcataaggagattgaacagaaggataatgagatagcaagattgaagaaagagaataaggagctggcggaggtggcggagcatgtgcagtatatggcagagctaattgaacgattgaacggagaacctctcgataatttcgagagcttagataatcaggaatttgactctgaggaagagaccgttgaggactctctcgtggaagattctgagatcgggacttgcgctgaagggacggtgtccagtagcacagacgctaaaccttgcatttag

SEQ ID NO: 269141 - protein, 376 aa, Artificial Sequence
  derived and/or modified sequence
METLSNASGTFAIRLLKILCQDNPSHNVFCSPVSISSALAMVLLGAKGNTATQMAQALSLNTEEDIHRAFQSLLTEVNKAGTQYLLRTANRLFGEKTCQFLSTFKESCLQFYHAELKELSFIRAAEESRKHINTWVSKKTEGKIEELLPGSSIDAETRLVLVNAIYFKGKWNEPFDETYTREMPFKINQEEQRPVQMMYQEATFKLAHVGEVRAQLLELPYARKELSLLVLLPDDGVELSTVEKSLTFEKLTAWTKPDCMKSTEVEVLLPKFKLQEDYDMESVLRHLGIVDAFQQGKADLSAMSAERDLCLSKFVHKSFVEVNEEGTEAAAASSCFVVAECCMESGPRFCADHPFLFFIRHNRANSILFCGRFSSP

SEQ ID NO: 269142 - DNA, 1131 bp, Artificial Sequence
  derived and/or modified sequence
atggagacattatccaatgcctccggaaccttcgcgattaggctgctgaagatcctatgtcaagataaccctagccacaacgtgttctgctctccagtgagcatcagcagcgctcttgccatggtgctgctgggagcaaaaggtaacaccgctacgcagatggctcaagcactttccttgaataccgaggaggatatccatcgggcgtttcagtccctcttgacagaggtgaacaaggccggaacccagtaccttcttagaaccgcaaatcgcttattcggggaaaaaacctgccagtttctcagtacctttaaagaatcttgcttgcagttctaccacgctgagttgaaagaactaagcttcatccgtgcggccgaggaatctcggaagcacatcaatacctgggtcagcaaaaagacagaaggaaagatagaggagctcctccctggttcaagcatcgacgccgaaacccggctggtgctcgtgaacgccatctattttaaggggaaatggaatgaaccctttgatgaaacttacacccgtgagatgcccttcaagatcaaccaggaggagcaacgacccgtccagatgatgtatcaagaagcaacatttaaactggctcacgtcggagaagtgcgagctcagctcttggagctcccctacgcaaggaaagagctgagcttactggtgctcctccctgacgatggcgtagagctgtctaccgtggagaagagcctgaccttcgagaaactgaccgcttggactaagccagactgcatgaaatcaaccgaagttgaagtgctgctccctaagttcaaattacaggaagactatgatatggagtcagtgttgcggcacttggggatcgttgacgctttccagcaagggaaggccgatcttagcgcgatgtccgccgagcgtgacttatgtctctccaaatttgtccataagagctttgttgaagtgaatgaagaagggaccgaggcagctgctgcctcctcatgtttcgtggtggcagagtgttgtatggagagtggccccagattttgcgcagatcaccctttcctcttttttattcggcataatcgggctaactctatcttgttttgtggacgattcagcagtccctag

SEQ ID NO: 269143 - DNA, 1131 bp, Artificial Sequence
  derived and/or modified sequence
atggagaccctgagcaatgccagcggcacctttgccatccggctgctgaagatcctgtgccaggacaaccccagccacaacgtgttctgcagccctgtgtccatcagcagcgccctggccatggtgctgctgggcgccaagggcaacacagccacccagatggcccaggccctgagcctgaacacagaggaggacatccaccgggccttccagagcctgctgacagaggtgaacaaggccggcacccagtacctgctgaggacagccaaccggctgtttggagagaagacctgccagttcctgagcaccttcaaggagagctgcctgcagttctaccacgccgagctgaaggagctgtccttcatccgggctgctgaggagagcaggaagcacatcaacacctgggtgtccaagaagacagagggcaagattgaggagctgctgcccggcagcagcattgatgctgagacccggctggtgctggtgaatgccatctacttcaagggcaagtggaatgagccctttgatgagacctacacccgggagatgcccttcaagatcaaccaggaggagcagaggcctgtgcagatgatgtaccaggaggccaccttcaagctggcccacgtgggggaggtgcgggcccagctgctggagctgccctatgccaggaaggagctgagcctgctggtgctgctgcctgatgatggagtggagctgagcacagtggagaagagcctgacctttgagaagctgacagcctggaccaagccagactgcatgaagagcacagaggtggaggtgctgctgcccaagttcaagctgcaggaggactatgacatggagagcgtgctgcggcacctgggcatcgtggatgccttccagcagggcaaggctgacctgagcgccatgtctgctgagcgggacctgtgcctgagcaagtttgtgcacaagagctttgtggaggtgaatgaggagggcacagaagctgctgctgccagcagctgctttgtggtggccgagtgctgcatggagagcggcccccgcttctgtgccgaccaccccttcctgttcttcatccgccacaacagagccaacagcatcctcttctgtggccgcttcagcagcccctag

SEQ ID NO: 269144 - DNA, 1131 bp, Artificial Sequence
  derived and/or modified sequence
atggagaccctgagcaacgccagcggcaccttcgccatccggctgctcaagatactctgccaggacaacccgagccacaacgtcttctgtagccctgtttcaatcagttccgctctggctatggttcttttaggagcaaagggcaacaccgctacccagatggctcaggccttatccttgaatacagaggaagatatccaccgtgcgttccagtctctactcactgaagtgaataaagccggcacccagtatcttcttaggaccgcaaaccggctgtttggtgaaaagacatgccagttcctttctacctttaaggaaagttgtctgcaattttaccatgccgaactcaaagaactaagttttattcgggctgcagaggaaagtcggaagcatataaatacatgggtgagtaagaaaacagaggggaaaatagaggagttgctgcccggcagtagtatcgacgcagagactcgtctcgtactggtcaatgctatatatttcaaaggcaagtggaatgagcctttcgacgagacgtatactagggaaatgcccttcaaaatcaaccaggaggagcaaagacccgttcagatgatgtaccaggaggccaccttcaagcttgcacatgtgggagaggtccgagcccagctgctggagctgccctatgcacgcaaagagctttccctcctggtcctcttaccggacgacggggtagagctgtccaccgtagagaagagcttaactttcgaaaaactgaccgcatggaccaagccggattgtatgaagagtactgaagtagaggtgcttcttccaaagttcaagctgcaggaggattacgacatggagagtgtgttgcggcacctcggcatagtcgacgctttccagcagggaaaggcagatttatcggccatgtcagcggaacgcgacctctgtcttagcaagttcgtccacaaatcatttgtcgaggtgaacgaggagggcaccgaggcagctgccgcttcgagttgttttgttgtggcagaatgttgtatggaatccggacctagattctgcgctgaccaccccttcctctttttcatccgacataatagagccaactccatcctattctgtggtcgatttagctcaccgtag

SEQ ID NO: 269145 - DNA, 1131 bp, Artificial Sequence
  derived and/or modified sequence
atggaaacactcagcaatgcttccggcacgttcgccataaggctcctgaaaatcctgtgtcaggataatccctcccacaacgtcttctgcagcccagtctccattagtagcgccctcgccatggttttgctgggcgcaaaaggaaatacggccacccaaatggcccaggccctttcccttaacaccgaggaggacattcacagagctttccaatcgctcttgacagaggtgaataaagcagggacacaatacctcctgaggacagcgaatcggctgttcggagaaaagacctgccaatttttaagcacatttaaggaaagctgcttgcagttttaccatgccgaactgaaagaattgagttttatccgcgctgccgaggaatcacggaagcacatcaacacatgggttagcaagaaaactgaggggaagattgaggaattacttcctggctctagtatagacgccgaaacacgcttagtgctggttaacgctatttatttcaagggtaaatggaacgagccgttcgatgagacatacacgcgcgagatgccctttaagataaatcaagaggagcagcgacctgtacagatgatgtaccaagaggccaccttcaaattagcgcatgttggtgaggtccgcgcacagctactggaactcccttacgcgcgtaaggaactgagcctacttgtgctgctccctgatgatggcgttgagctgtccacggtcgagaagtcactgacattcgaaaagctgaccgcctggactaaacctgactgcatgaagtccactgaggtggaagtgctgctacccaagttcaaactccaagaggactacgacatggagtcagtgctaaggcatcttggcattgtggacgcatttcagcaaggaaaagctgatctgagcgcaatgtctgccgaacgggacctttgcctgtccaaattcgtccacaagagctttgtggaggttaacgaagaaggtacagaagcagccgctgcctccagctgttttgtggttgcagagtgctgcatggagtccggccctagattctgtgcagatcatccttttttgttctttattaggcacaacagagccaacagtatcctgttttgtggccgtttctcctccccgtag

SEQ ID NO: 269146 - DNA, 4118 bp, Artificial Sequence
  derived and/or modified sequence
ccgggtcctgcgcctcgggggtcggcgtccaggctcggagcgcggcacggagacggcggcagcgctggactaggtggcaggccctgcatcatggaaactctttctaatgcaagtggtacttttgccatacgccttttaaagatactgtgtcaagataacccttcgcacaacgtgttctgttctcctgtgagcatctcctctgccctggccatggttctcctaggggcaaagggaaacaccgcaacccagatggcccaggcactgtctttaaacacagaggaagacattcatcgggctttccagtcgcttctcactgaagtgaacaaggctggcacacagtacctgctgagaacggccaacaggctctttggagagaaaacttgtcagttcctctcaacgtttaaggaatcctgtcttcaattctaccatgctgagctgaaggagctttcctttatcagagctgcagaagagtccaggaaacacatcaacacctgggtctcaaaaaagaccgaaggtaaaattgaagagttgttgccgggtagctcaattgatgcagaaaccaggctggttcttgtcaatgccatctacttcaaaggaaagtggaatgaaccgtttgacgaaacatacacaagggaaatgccctttaaaataaaccaggaggagcaaaggccagtgcagatgatgtatcaggaggccacgtttaagctcgcccacgtgggcgaggtgcgcgcgcagctgctggagctgccctacgccaggaaggagctgagcctgctggtgctgctgcctgacgacggcgtggagctcagcacggtggaaaaaagtctcacttttgagaaactcacagcctggaccaagccagactgtatgaagagtactgaggttgaagttctccttccaaaatttaaactacaagaggattatgacatggaatctgtgcttcggcatttgggaattgttgatgccttccaacagggcaaggctgacttgtcggcaatgtcagcggagagagacctgtgtctgtccaagttcgtgcacaagagttttgtggaggtgaatgaagaaggcaccgaggcagcggcagcgtcgagctgctttgtagttgcagagtgctgcatggaatctggccccaggttctgtgctgaccaccctttccttttcttcatcaggcacaacagagccaacagcattctgttctgtggcaggttctcatcgccataaagggtgcacttaccgtgcactcggccatttccctcttcctgtgtccccagatccccactacagctccaagaggatgggcctagaaagccaagtgcaaagatgagggcagattctttacctgtctgccctcatgatttgccagcatgaattcatgatgctccacactcgcttatgctacttaatcagaatcttgagaaaatagaccataatgattccctgttgtattaaaattgcagtccaaatcccataggatggcaagcaaagttcttctagaattccacatgcaattcactctggcgaccctgtgctttcctgacactgcgaatacattccttaacccgctgcctcagtggtaataaatggtgctagatattgctactattttatagatttcctggtgcttagccttataaaaaaggttgtaaaatgtacatttatattttatcttttttttttttttttttctgagacgcagtctggctctctgtcgcccaggctggagtgcagtggctcgatctcggctcactgcaagctccgcctcccgggttcacgccattctcctgcctcagcctcccgagtagctgggactacaggcgcccgccaccacgcccggctaattttttgtatttttagtagagacggggtttcaccgtgttagccaggatggtgtcgatctcctgacctcgtgatccacccgcctcggcctcccaaagtgctgggattacaggcttgagccaccgcgcccggctatattttatcttttatctttttctttgacatttaccaatcaccaagcatgcaccaaacactgctttaggcactggggacacaaaggggacagagccatcctcctttgacacctggtcttcagttctgtgcccaacgtatatagttttgacaatgaccaggttggactgtttaatgtctttcaacttaccacgtaatcctcttgtagggatcacatctttctttatgatattgtatttctctacctctaacagtaaaaattccattcaacccttaaagctcacttcaaattcttctttgagaagtttttcctttctccgcaaccagatgtacatatttgaactctctttgtacttggagggcacttctttcgtggtagttcttttatttttattaatctctgtatccttagatagtcctccaacaaccaaaggttgggactctgtcttacatatctgggtgcccctcatagtgcagtaataagtaagttgattatatacgagctatgtaacttatattttttaatggttggatatcactgagtttttttttttaagaatttttttattgaggtaaacttcacataacataaaattaactattttaaagtgagaagttcagtgccacttagtattgttaacaatgttgcataaccaccacctttatttaaagttccaaaaaaaatgttctcctctaaaaggaaaccccatcccattaagcagatactctccattccttccttcctccagcccccagcaaccaccaatctgctttctgtctctatggatttatctattcttgctattttatataaattgaattgtatgagaccttttgtgtctggcttctttcacttagtacaagtttttgagatttatttacatagtagcatgtatcaacacttcatttttatggccaaataaaattgtattatgtgtttatagcacaatttatttatccactcattcattgatggactttgggttgtttctgacttttggctattgggaatagtgctgctatgaatgtttgtgtacctgtatttgtttgaatgcctattttgcattctcttgggtatatatctaggagtggaactgctgggtcatatgttaattctatgtttagctttttgaggaacagacaaactgttttccacagcagttgaaccattccacattcccaccagcaatgtatgagaattccaatttctgtccacttcctcaccaacacttattattttccttttcctttttttaaaaaaaataagttatggccatcttagtgggtgtgaagtggtatctcattgtgttttttatttgcatttcctatgtaatgagctagaaactaaagtacaaactagatgggacatccagtccctttgatagataatgctgagtaaaaaatgagatgaaagacatttgtttgtttttagaacacgagtgacagtttgttaaaaagctttagaggaggaatgaaaacaaagtgaagtacacttagaaaagggccaagtggacatcttggatgtcaagtgcctagttcagtatcttttttttttttttttttttttttgagacagtgcctcactctgtcacccaggctggagtgtagtggcatgatctgggctcactgcaacctcctcctcctggattcaagcaattctcttgcttcagcctcccaagtagctgagactacaagcacccaccatcacacccagctaattttgtatttttcagtagagacggggtttcgccacattggccgtgttggtcttgaactcctggcctcaagcgatccgcctacctcagcctcccaaagtgctaggattacaggcataagccactgagcccagccctagttcagtatcttttatgtaaattacaaacatctgcaacattatgtatcatatgcagatacttattgcatttcttttattagtggtgaaagtgttctatgcatttattggctcttgaatttcctcatctatgaattgtcattcatacacctacttttctgcttcgtttttacatatgtctttgcctattaaagatattatccctctgttttatattttctctcattcttgtattgccttttaaattttgttatgatgtttcattaataaacagtgttttgttttcctctataatcaa

SEQ ID NO: 269147 - DNA, 1131 bp, Artificial Sequence
  derived and/or modified sequence
atggagaccctgagcaacgccagcggcaccttcgccatcagactgctgaagatcctgtgccaggacaaccccagccacaacgtgttctgcagccccgtgagcatcagcagcgccctggccatggtgctgctgggcgccaagggcaacaccgccacccagatggcccaggccctgagcctgaacaccgaggaggacatccacagagccttccagagcctgctgaccgaggtgaacaaggccggcacccagtacctgctgagaaccgccaacagactgttcggcgagaagacctgccagttcctgagcaccttcaaggagagctgcctgcagttctaccacgccgagctgaaggagctgagcttcatcagagccgccgaggagagcagaaagcacatcaacacctgggtgagcaagaagaccgagggcaagatcgaggagctgctgcccggcagcagcatcgacgccgagaccagactggtgctggtgaacgccatctacttcaagggcaagtggaacgagcccttcgacgagacctacaccagagagatgcccttcaagatcaaccaggaggagcagagacccgtgcagatgatgtaccaggaggccaccttcaagctggcccacgtgggcgaggtgagagcccagctgctggagctgccctacgccagaaaggagctgagcctgctggtgctgctgcccgacgacggcgtggagctgagcaccgtggagaagagcctgaccttcgagaagctgaccgcctggaccaagcccgactgcatgaagagcaccgaggtggaggtgctgctgcccaagttcaagctgcaggaggactacgacatggagagcgtgctgagacacctgggcatcgtggacgccttccagcagggcaaggccgacctgagcgccatgagcgccgagagagacctgtgcctgagcaagttcgtgcacaagagcttcgtggaggtgaacgaggagggcaccgaggccgccgccgccagcagctgcttcgtggtggccgagtgctgcatggagagcggccccagattctgcgccgaccaccccttcctgttcttcatcagacacaacagagccaacagcatcctgttctgcggcagattcagcagcccctag

SEQ ID NO: 269148 - DNA, 1956 bp, Artificial Sequence
  derived and/or modified sequence
atgtgggctgacgatgcgaagaagttatgccctgacctgctcttggcccaggtacgggagagcagggggaaagcaaatctgactaagtatcgtgaagccagtgtagaagtcatggaaatcatgtcacgttttgctgtgattgagagagcatcaatcgatgaagcttacgtcgatcttacaagcgcagtgcaggagcggcttcagaaactccaggggcaacccatctccgcagatctcctgcctagcacatatatcgaaggattgcctcagggccctaccaccgccgaggagacagtgcagaaagaaggcatgcgcaagcaaggtctttttcaatggctggattccttgcagattgacaatctgacctcgccggatctacagctcaccgtgggcgcagtgatcgttgaggagatgagggccgcaattgaacgcgagacaggcttccaatgttccgccggcatttcacataacaaagtcctcgcaaagctggcgtgtgggctaaacaaacccaaccgccagaccctggtgtcccatggatcagtgccacagctgttttcacaaatgcctatcaggaaaattagatccttagggggcaagcttggcgcatctgtcatcgaaatactcggaattgaatatatgggggaactgacacagtttaccgaatcccagctacagtcacatttcggcgagaagaatggctcttggctatatgcaatgtgcagaggcatcgagcacgacccagttaagccaagacaactcccgaagacaattggctgctctaagaactttcctggcaagaccgccctggctactagggagcaggtgcagtggtggctcttgcagctcgcgcaggaattggaggagagactgaccaaagaccgtaacgacaacgacagggttgctactcaactggtggttagtatccgcgttcagggagacaaacgacttagttcactcagaagatgctgtgccctgacccgatacgacgctcacaagatgtctcatgacgcgttcacagttattaaaaattgtaatactagcggcattcagaccgaatggagcccacctctgacgatgttgtttctgtgtgccaccaagttttctgcatcagccccttcttcttcaactgatatcacgtcatttctctcctcagacccctctagtctgcccaaggtcccggtcacaagcagtgaagcaaagacccaggggtctggacccgcggttactgcaaccaagaaagcgaccaccagtctggaatctttcttccaaaaagccgccgagagacagaaagttaaggaggcctccctgtcatctttgacagctccaactcaagcccctatgagcaactcccccagtaagccgagtctgcctttccaaacatcccaatccacgggtaccgagcctttctttaaacagaagagtcttctcttgaagcagaagcagttaaacaattctagcgtctcaagtcctcagcagaacccctggtctaattgcaaggccctccccaattcccttcctactgagtaccctggatgcgtgccggtgtgtgaaggagtgtcaaagctggaggaaagctccaaggcaactcccgctgaaatggaccttgcccataactcccaaagcatgcatgcctccagcgccagtaaatctgtcctggaggttacacaaaaagccacaccaaacccatcactgctcgccgcggaagaccaggttccttgtgagaaatgtgggagtctggttccggtgtgggacatgcccgagcacatggattaccattttgccctggagcttcagaaaagtttcctccagccacactctagcaatcctcaggtggtgtctgcagtgtcccaccaggggaagcggaatccaaaatcccctctagcctgtacaaataaaaggccccgccctgaggggatgcagactctggagtctttctttaaaccactgacccactag

SEQ ID NO: 269149 - DNA, 1956 bp, Artificial Sequence
  derived and/or modified sequence
atgtgggcagatgatgccaagaagctgtgcccagacctgctgctggcccaggtgcgggagagccggggcaaggccaacctgaccaagtaccgggaggcctctgtggaggtgatggagatcatgagcagatttgctgtgattgagcgggccagcattgatgaggcctacgtggacctgaccagcgctgtgcaggagcggctgcagaagctgcagggccagcccatctctgctgacctgctgcccagcacctacatcgagggcctgccccagggccccaccacagctgaggagaccgtgcagaaggagggcatgaggaagcagggcctcttccagtggctggacagcctgcagattgacaacctgaccagcccagacctgcagctgactgtgggcgccgtcatcgtggaggagatgagagctgccatcgagcgggagaccggcttccagtgcagcgctggcatcagccacaacaaggtgctggccaagctggcctgtggcctgaacaagcccaaccggcagaccctggtgagccacggctctgtgccccagctgttcagccagatgcccatcaggaagatccgcagcctgggcggcaagctgggcgcctctgtgattgagatcctgggcatcgagtacatgggagagctgacccagttcacagagagccagctgcagagccactttggagagaagaatggctcctggctgtatgccatgtgccggggcattgaacatgaccctgtgaagccccggcagctgcccaagaccatcggctgcagcaagaacttccctgggaagacagccctggccacccgggagcaggtgcagtggtggctgctgcagctggcccaggagctggaggagcggctgaccaaggacagaaatgacaatgacagagtggccacccagctggtggtgtccatccgggtgcagggcgacaagaggctgagcagcctgcggcgctgctgtgccctgaccaggtatgatgcccacaagatgagccatgatgccttcaccgtcatcaagaactgcaacaccagcggcatccagacagagtggagcccccccctgaccatgctgttcctgtgtgccaccaagttcagcgccagcgcccccagcagcagcacagacatcaccagcttcctgagcagtgaccccagcagcctgcccaaggtgcctgtgaccagcagcgaggccaagacccagggcagcggccctgctgtgacagccaccaagaaggccaccaccagcctggagagcttcttccagaaggctgctgagcggcagaaggtgaaggaggccagcctgagcagcctgacagcccccacccaggcccccatgagcaacagccccagcaagcccagcctgcccttccagaccagccagagcactggaacagagcccttcttcaagcagaagagcctgctgctgaagcagaagcagctgaacaacagctctgtgagcagcccccagcagaacccctggagcaactgcaaggccctgcccaacagcctgcccacagagtacccaggctgtgtgcctgtgtgtgagggcgtgtccaagctggaggagagcagcaaggccaccccagctgagatggacctggcccacaacagccagagcatgcacgccagcagcgccagcaagtctgtgctggaggtgacccagaaggccacccccaaccccagcctgctggccgctgaggaccaggtgccctgtgagaagtgtggcagcctggtgcctgtgtgggacatgcctgagcacatggactaccactttgccctggagctgcagaagagcttcctgcagccccacagcagcaacccccaggtggtgtctgctgtgagccaccagggcaagaggaaccccaagagccccctggcctgcaccaacaagaggcccaggcctgagggcatgcagaccctggagagcttcttcaagcccctgacccactag

SEQ ID NO: 269150 - DNA, 1956 bp, Artificial Sequence
  derived and/or modified sequence
atgtgggccgacgacgccaagaagctgtgccccgacctgctgctggcgcaagtacgtgagtctagagggaaggcaaatctaacaaaatatcgcgaagccagcgtggaagttatggaaattatgagtcgattcgccgtaattgaacgcgccagtattgatgaagcttatgttgacctcactagcgcggtccaggaacggctgcagaaactacaggggcaaccaatatccgccgacctgctgccatcaacgtacatcgagggtctgccgcagggcccaactaccgcagaagagaccgtccaaaaagagggcatgagaaaacaagggctgttccagtggctcgactctctgcagattgataacttgacatcgccagacctgcagctgacagtgggagcggtgatagtggaggagatgcgggccgccattgaacgggagactggcttccagtgcagtgctggcataagtcataataaggtgctcgctaagctggcctgtggcttaaacaagcctaacagacagactctggtgagccatggcagcgtgccccagctctttagtcagatgcctatccggaagattcggagcttggggggtaaattgggggctagcgttatagaaatccttggcatagaatacatgggcgaactgacacagttcacagaatcgcagctgcagtcccacttcggggaaaagaatgggagctggctgtatgcaatgtgtaggggcatagaacacgatccagtgaagccgcggcaactccccaaaaccattggctgctccaagaacttcccagggaagactgccctggctacaagagaacaggttcagtggtggctgctgcaactggcacaagaactggaagagaggcttactaaggatagaaatgataacgacagggttgccactcagttggttgtcagcatcagggtccagggagacaagaggctgtcatctctcaggagatgttgtgctcttaccagatatgacgcacacaagatgtcacacgacgctttcacagtgatcaaaaattgcaacacctccggtatccagactgaatggtccccgcctttgacaatgctcttcctctgcgccactaagtttagcgcctcagcaccgagttctagcactgatatcacctcatttttgtcctccgacccctccagtttgccaaaggtgccagtgacctctagcgaggccaaaacccagggttcgggcccagccgtgactgctaccaagaaggctacaactagcctggagtctttctttcaaaaagctgccgaaaggcagaaggtaaaggaagcgagtctgtccagtctgaccgccccaactcaagccccaatgtccaactcaccatctaaaccttcacttcccttccagaccagccagtccaccggaacagagccctttttcaagcagaaatccttactgctgaaacaaaagcagctgaacaactcttcagtaagcagtccacaacagaatccttggtctaactgtaaagcactccctaactccctgccgaccgagtacccaggctgtgtgccagtctgtgagggggtgtcaaagctggaggaatcctccaaggccacacccgcggaaatggatctagctcataactcacagagcatgcacgctagctctgcgtcaaagtcagtgctggaagtgactcagaaggcaactcctaatccttcactgctggccgcagaggaccaggttccttgcgagaagtgcggctcactggtccctgtctgggacatgccagagcatatggactatcatttcgccttggaactgcaaaagtctttccttcagcctcactcgtcgaacccccaggtggtctccgccgtatcacaccagggtaagcggaacccaaagagtccattggcatgtactaacaaacgacctaggcctgaaggcatgcaaaccctcgaaagtttcttcaaaccattaacccactag

SEQ ID NO: 269151 - DNA, 1956 bp, Artificial Sequence
  derived and/or modified sequence
atgtgggccgatgatgctaaaaagctttgtcccgacttgctgctggcacaagtgcgggagtcaagaggtaaggccaatttgactaagtaccgcgaagcttcggtggaggtgatggagataatgagtcgcttcgctgtgatcgaaagagccagcattgatgaagcttacgttgacctcacttcagccgtgcaagagcgccttcaaaaactgcagggacaaccgatcagtgccgatctccttccatctacttatatcgaagggctcccacagggcccaacaaccgctgaagagactgtgcagaaggaaggaatgaggaaacagggcttgtttcagtggctggattctctgcaaattgataatctgacatcacctgatctccaacttacagtaggagctgtgatcgtagaagagatgcgcgcagccatcgagagagagaccggattccaatgctctgccggaatttcacataacaaggtcctggcaaagttggcgtgcggcctgaacaaacccaaccgccaaacactggtgtcacacggaagcgtaccacagctgttttctcaaatgccgatccgcaagattcgtagcctggggggaaagcttggcgcatccgtgattgaaatactggggatcgagtacatgggtgagctaacgcagttcacagaatcccagttgcagagtcactttggagagaagaacggcagctggctgtatgctatgtgtcgaggcattgagcacgatcctgtcaaacctcgccaactgccgaaaaccatcgggtgttccaagaattttcccggtaaaactgctctcgctacaagggagcaggtgcagtggtggctgttgcagcttgcccaggaattagaagaacggctgaccaaggaccgcaatgacaacgatagggttgccacccagctggttgtttcaattcgggtgcaaggggataagcgtctttcatcgctgcgaaggtgttgcgcccttaccaggtacgacgcgcacaagatgagtcacgatgcgtttaccgttatcaaaaactgcaacacctctggaattcagacagagtggagccccccattaactatgctgtttctgtgcgctactaagttttccgcgagcgccccttcatcctccacagacattaccagcttcctgtctagcgatccaagctccttacccaaagtgcccgtgacaagttctgaggctaagacccaggggagcggcccagccgtgacagccactaaaaaggccaccacgagcctggaaagcttctttcagaaggcagccgagcgacagaaagttaaggaggcatctctttctagcctgaccgctcccacccaggctccaatgtccaattcaccctccaaaccctcattgccattccagacttcgcagagcactggtaccgagccattctttaaacagaagtccctgctgctcaagcagaaacagctcaacaacagttctgtctctagcccacagcaaaatccctggtctaactgtaaggcattacctaacagcctacctactgagtaccctgggtgcgtcccagtctgtgagggcgtttctaagctcgaagagtcaagcaaggccacccctgccgaaatggatctggcccataattcccagtccatgcatgccagctcagcgtccaaatctgtgctggaggtcacccagaaggccacaccaaaccccagcctcctcgctgccgaggatcaggtcccatgcgagaagtgtggtagcctggtgccagtgtgggatatgcccgagcatatggactaccactttgccctggaactacagaagtccttcctgcagccacatagctccaacccccaagtggtgtccgctgtcagccaccagggaaaacgaaatcccaaaagccccttagcttgcacaaacaaaaggccacggcctgagggcatgcagaccttggagagcttctttaagccactcacacattag

SEQ ID NO: 269152 - DNA, 1956 bp, Artificial Sequence
  derived and/or modified sequence
atgtgggccgacgacgccaagaagctgtgccccgacctgctgctggcccaggtgagagagagcagaggcaaggccaacctgaccaagtacagagaggccagcgtggaggtgatggagatcatgagcagattcgccgtgatcgagagagccagcatcgacgaggcctacgtggacctgaccagcgccgtgcaggagagactgcagaagctgcagggccagcccatcagcgccgacctgctgcccagcacctacatcgagggcctgccccagggccccaccaccgccgaggagaccgtgcagaaggagggcatgagaaagcagggcctgttccagtggctggacagcctgcagatcgacaacctgaccagccccgacctgcagctgaccgtgggcgccgtgatcgtggaggagatgagagccgccatcgagagagagaccggcttccagtgcagcgccggcatcagccacaacaaggtgctggccaagctggcctgcggcctgaacaagcccaacagacagaccctggtgagccacggcagcgtgccccagctgttcagccagatgcccatcagaaagatcagaagcctgggcggcaagctgggcgccagcgtgatcgagatcctgggcatcgagtacatgggcgagctgacccagttcaccgagagccagctgcagagccacttcggcgagaagaacggcagctggctgtacgccatgtgcagaggcatcgagcacgaccccgtgaagcccagacagctgcccaagaccatcggctgcagcaagaacttccccggcaagaccgccctggccaccagagagcaggtgcagtggtggctgctgcagctggcccaggagctggaggagagactgaccaaggacagaaacgacaacgacagagtggccacccagctggtggtgagcatcagagtgcagggcgacaagagactgagcagcctgagaagatgctgcgccctgaccagatacgacgcccacaagatgagccacgacgccttcaccgtgatcaagaactgcaacaccagcggcatccagaccgagtggagcccccccctgaccatgctgttcctgtgcgccaccaagttcagcgccagcgcccccagcagcagcaccgacatcaccagcttcctgagcagcgaccccagcagcctgcccaaggtgcccgtgaccagcagcgaggccaagacccagggcagcggccccgccgtgaccgccaccaagaaggccaccaccagcctggagagcttcttccagaaggccgccgagagacagaaggtgaaggaggccagcctgagcagcctgaccgcccccacccaggcccccatgagcaacagccccagcaagcccagcctgcccttccagaccagccagagcaccggcaccgagcccttcttcaagcagaagagcctgctgctgaagcagaagcagctgaacaacagcagcgtgagcagcccccagcagaacccctggagcaactgcaaggccctgcccaacagcctgcccaccgagtaccccggctgcgtgcccgtgtgcgagggcgtgagcaagctggaggagagcagcaaggccacccccgccgagatggacctggcccacaacagccagagcatgcacgccagcagcgccagcaagagcgtgctggaggtgacccagaaggccacccccaaccccagcctgctggccgccgaggaccaggtgccctgcgagaagtgcggcagcctggtgcccgtgtgggacatgcccgagcacatggactaccacttcgccctggagctgcagaagagcttcctgcagccccacagcagcaacccccaggtggtgagcgccgtgagccaccagggcaagagaaaccccaagagccccctggcctgcaccaacaagagacccagacccgagggcatgcagaccctggagagcttcttcaagcccctgacccactag

SEQ ID NO: 269153 - DNA, 354 bp, Artificial Sequence
  derived and/or modified sequence
atggagtgcctgagaagcctgccctgcctgctgcccagagccatgagactgcccagaagaaccctgtgcgccctggccctggacgtgaccagcgtgggcccccccgtggccgcctgcggcagaagagccaacctgatcggcagaagcagagccgcccagctgtgcggccccgacagactgagagtggccggcgaggtgcacagattcagaaccagcgacgtgagccaggccaccctggccagcgtggcccccgtgttcaccgtgaccaagttcgacaagcagggcaacgtgaccagcttcgtgttcgagagctgcgacaacagcagagtgagcagcgacatcagactgagctag

SEQ ID NO: 269154 - DNA, 354 bp, Artificial Sequence
  derived and/or modified sequence
atggagtgcttaaggagccttccatgtctgctaccccgcgcgatgaggttgccaagacggacattgtgcgcccttgccctcgacgtgacttccgttggaccacccgtggcggcctgtggccgtcgtgcgaacctgattggtaggagccgagccgcgcagctgtgtggacccgaccgactgcgtgtggctggtgaggtgcaccggtttaggactagtgatgtttcccaggccactctggctagcgtagcgcctgtttttaccgttactaaattcgataaacaaggtaatgttactagctttgtctttgagtcctgcgataactcccgtgtctcctccgatatcagactctcatag

SEQ ID NO: 269155 - DNA, 354 bp, Artificial Sequence
  derived and/or modified sequence
atggagtgcctgcggagcctgccctgcctgctgccccgggccatgaggctgcccaggaggaccctgtgtgccctggccctggatgtgacctctgtgggcccccctgtggccgcctgtggcagaagagccaacctgattggccgcagcagagctgcccagctgtgtggccctgaccggctgcgggtggccggggaggtgcaccgcttccgcaccagtgatgtgtcccaggccaccctggcctctgtggcccctgtgttcaccgtgaccaagtttgacaagcagggcaatgtgaccagctttgtgtttgagagctgtgacaacagccgggtgtccagtgacatccggctgtcctag

SEQ ID NO: 269156 - DNA, 354 bp, Artificial Sequence
  derived and/or modified sequence
atggagtgcctgcggagcctgccctgcctgctgccccgggccatgcggctccctcggagaacactgtgtgctctggccctggatgtgacctcagtggggcctccagtcgcggcatgcggccggagagcaaacctaattggacgtagccgggccgcccaactctgcggccccgatcgattgcgggtggctggcgaggtacaccgctttcggacctcggatgtaagccaggccacgctggcatcagtggcccctgttttcacagttacgaagttcgataaacagggcaacgtgacctctttcgtgttcgagtcttgcgataatagtcgcgtttctagcgacatccgcctgtcatag

SEQ ID NO: 269157 - DNA, 354 bp, Artificial Sequence
  derived and/or modified sequence
atggagtgcctacggagcctgccatgtctactgccacgcgcaatgcgtctcccaagacgaacactctgtgctttagcccttgacgtgacaagtgtgggcccacctgtggccgcttgtggcaggagggccaacttaatcggaaggtcacgcgcagcccaactatgtggccctgacagactccgggtagctggcgaggtgcatagattcagaacttccgatgtgagtcaggccaccctagcatcagtcgcaccagtgttcacagtcactaaatttgataaacagggcaatgttacctcattcgtttttgagagctgcgacaatagtcgagtttcttcagacattagactgagctag

SEQ ID NO: 269158 - protein, 477 aa, Artificial Sequence
  derived and/or modified sequence
MTSKFLLVSFILAALSLSTTFSLQPDQQKVLLVSFDGFRWDYLYKVPTPHFHYIMKYGVHVKQVTNVFITKTYPNHYTLVTGLFAENHGIVANDMFDPIRNKSFSLDHMNIYDSKFWEEATPIWITNQRAGHTSGAAMWPGTDVKIHKRFPTHYMPYNESVSFEDRVAKIIEWFTSKEPINLGLLYWEDPDDMGHHLGPDSPLMGPVISDIDKKLGYLIQMLKKAKLWNTLNLIITSDHGMTQCSEERLIELDQYLDKDHYTLIDQSPVAAILPKEGKFDEVYEALTHAHPNLTVYKKEDVPERWHYKYNSRIQPIIAVADEGWHILQNKSDDFLLGNHGYDNALADMHPIFLAHGPAFRKNFSKEAMNSTDLYPLLCHLLNITAMPHNGSFWNVQDLLNSAMPRVVPYTQSTILLPGSVKPAEYDQEGSYPYFIGVSLGSIIVIVFFVIFIKHLIHSQIPALQDMHAEIAQPLLQA

SEQ ID NO: 269159 - DNA, 1434 bp, Artificial Sequence
  derived and/or modified sequence
atgacttccaagtttctgctcgtctcctttatcctagcagcgctgagtctctctacaactttttccttacagcctgaccaacagaaagtgttactcgtgtcttttgacggttttaggtgggactacctctataaagtacccacaccccactttcactatattatgaagtatggggtgcacgtaaagcaagtaaccaacgtgttcattactaaaacttaccccaatcactacaccctagtcactggtcttttcgccgaaaatcatggtattgtggcgaatgatatgttcgacccaatccgaaataaatccttctctttagatcacatgaatatttatgattctaagttctgggaggaagcaacccccatctggataactaatcagcgtgccggacatactagtggggcagccatgtggccaggaacagacgtgaaaattcataaacgatttcccacccattacatgccttacaatgagagcgtcagtttcgaagaccgcgtggccaagatcattgagtggtttacttccaaggagcctattaatttaggcttgctttattgggaggaccccgatgacatgggacaccacctcggtcctgactcaccactcatgggaccagtgattagcgacatcgacaagaaactgggttacttaattcagatgctcaagaaggcaaagctttggaacacccttaacctaataattacatccgaccatggtatgacccaatgtagcgaagaacgactgatcgaacttgatcagtacctggacaaggaccactacacacttattgaccagtccccagtggccgcaattctgcctaaagaagggaagttcgacgaagtatacgaggccttaacccatgcccacccaaatttaaccgtgtacaaaaaggaagacgtacccgagcgctggcactacaagtacaatagcagaatccagcccatcattgccgttgcagatgaaggatggcatatcctgcaaaataaatcggacgattttctgttgggaaatcacgggtatgacaacgccctggccgacatgcaccccattttcctcgcacatggtccagcgtttcgaaaaaactttagtaaggaagcaatgaactccacagatctgtacccactgctgtgtcacttgctcaatatcacagccatgccacacaatgggagcttttggaacgtccaggacctgctcaacagcgccatgcctagggtggtgccctatacccagtcaacaatcctgctgcccggaagcgttaagccagccgaatacgaccaggaaggctcttacccttacttcatcggcgtgtcccttggttctattattgtcatcgtgttctttgtgattttcattaagcacctgatccactctcagatccccgcactacaggacatgcatgctgaaattgctcagccattacttcaagcctag

SEQ ID NO: 269160 - DNA, 1434 bp, Artificial Sequence
  derived and/or modified sequence
atgacctcgaagttcctgctcgtctcattcatattggccgcactgagcttatcaacaactttcagcctgcagcccgaccagcagaaggtgcttctcgtttcttttgacggatttaggtgggactatctgtataaggtgcctacgcctcactttcactacataatgaagtacggtgtgcacgtgaagcaggttacaaacgtattcattaccaagacctatcccaaccactatacactggtcaccggcctgtttgcagagaaccatggcatagtggccaatgacatgtttgacccgatccgaaataaatctttcagcctggaccacatgaatatctatgacagcaaattctgggaagaagctaccccaatatggattacaaatcagcgagcgggtcacacgagcggggctgctatgtggccaggcaccgatgtgaagattcataagcggtttcccacccattacatgccatacaacgagtcagtatccttcgaggacagagtcgcaaagatcattgagtggttcacttcaaaggaaccaataaacctcggactattatattgggaagacccggatgatatggggcatcatctcggtcccgactcgccactgatgggtccagtgataagtgatatagataaaaaactggggtacctgattcagatgctgaagaaggctaagttgtggaataccctgaatctgatcataacaagcgaccacgggatgacccaatgctctgaagaaaggctgattgagctggaccagtacctggacaaggatcattatactcttatcgaccaatctcccgtcgccgctattctccccaaagaagggaagttcgatgaggtgtacgaggctctaacgcatgctcatcctaatttaactgtgtataaaaaagaggacgtgcccgagcgttggcattataaatataactccagaatccagcctatcatcgccgtcgctgatgaaggatggcacatactgcagaataaatcagacgatttcctgctgggcaaccacggatatgacaacgctctcgcggatatgcatcctatcttcttggctcacggcccagctttccggaaaaattttagcaaggaagctatgaacagcaccgatctctatcccctactctgccacctcttaaacattacagcgatgccacataacgggtcattctggaatgtccaggacttacttaactcggcaatgccccgagtggtaccttatacccagagcaccattttgcttcccggaagtgtaaagcccgcagagtacgaccaggagggctcttatccctattttatcggcgtatcgttgggtagcattattgtgattgtgtttttcgttattttcatcaaacatcttattcactcacagattccagcattgcaggatatgcacgccgaaattgcgcagcccttgcttcaggcctag

SEQ ID NO: 269161 - DNA, 1434 bp, Artificial Sequence
  derived and/or modified sequence
atgactagcaagttcctgctggtgtcttttatacttgccgctctttcgctcagcacaactttttctctccagcctgatcagcaaaaggtcctgctggtgtctttcgacggatttcgatgggattacctctataaggtgcccaccccccattttcattacataatgaagtacggagtccacgtcaaacaggtgacgaacgtttttattactaaaacgtaccccaaccactatacccttgtgacaggcctgttcgccgagaatcatgggatagtggccaatgatatgttcgaccccatccgtaacaagtcatttagcttagatcatatgaacatttacgattcaaagttctgggaggaagcaactccaatctggattaccaaccaacgcgccggtcatacttcaggagctgccatgtggcccggcacagatgtgaaaattcacaagaggtttccgacccattacatgccgtacaacgaatctgttagttttgaagaccgtgtagcaaagataattgagtggttcacttccaaagaacccattaaccttggtctactgtactgggaagatccagatgacatggggcatcacttgggacccgacagccctcttatggggcctgttatttctgacattgataaaaaactcgggtatctgatccaaatgctgaaaaaggccaagctatggaacaccttgaatctaattataacttctgaccacggaatgactcagtgttccgaagagagactgatcgaacttgatcagtatctggataaggatcactatacactgatcgaccaatctccagtcgctgctatcctgcctaaagaaggaaaatttgacgaagtttacgaagctctaactcacgctcaccctaacctcaccgtgtacaaaaaggaggatgtgcccgaacggtggcactacaagtataactccagaatccaaccaataatcgccgtggctgacgagggatggcatatcctacagaacaaatcagatgactttcttctgggaaatcacggctacgacaatgccctagccgatatgcaccccatatttcttgcacacgggcccgcattccgtaagaacttcagcaaagaagccatgaattcaactgacctgtatccccttctctgccacctccttaatataacggcaatgccacacaacgggagcttctggaacgtgcaagacctgctgaatagcgctatgccacgtgtcgttccctatactcaatctaccatcttgctgcctggatctgtcaaacccgctgaatacgaccaggaagggtcttatccatacttcataggcgtttcactcggcagcatcatcgttattgtgtttttcgtcatattcatcaagcatctgatccatagccagattcctgctctccaagacatgcacgccgaaatcgcccaaccattgctgcaggcctag

SEQ ID NO: 269162 - DNA, 1434 bp, Artificial Sequence
  derived and/or modified sequence
atgacttctaagttcttactcgtgagttttattctggccgcactgagcctttctacaaccttttccttgcagccagaccagcaaaaggtattgctggtgtctttcgatggtttcagatgggattacctgtacaaagttcccacgccacactttcactacatcatgaagtatggggttcacgtaaaacaagtcaccaatgttttcattacaaagacttatccaaaccattacacactggtgacaggactgtttgctgagaatcatggaatagtggctaacgatatgtttgaccccattcgaaacaaaagctttagtctcgaccacatgaacatctatgactctaagttttgggaggaagccacccccatttggataacaaatcagagggccggtcacacctcgggtgccgcgatgtggcccggaacagatgttaagattcacaagcggtttcccactcactatatgccgtacaatgaaagtgtgagtttcgaagacagagttgcaaagatcattgagtggtttacctcaaaagaaccgataaaccttgggctgttgtactgggaagatcctgacgatatgggccaccacctcggcccagattccccacttatgggccctgttatatcggacatcgataagaagctgggctatctgatccaaatgctcaaaaaagccaaactgtggaatactctgaacctaatcattacctctgatcatggcatgacccagtgttcagaggaacgtctcattgagctggaccagtacttggacaaggaccattacaccctgattgatcaatcaccagtcgccgccattttaccgaaagagggtaaattcgatgaagtctatgaagctctgacccacgcccatcctaatctcactgtctacaagaaagaagatgtgcctgaacgctggcattataaatataattctcgaatacaacccataatcgccgtggccgacgaaggttggcacatcctgcagaacaagtctgatgactttctgttaggaaatcatggatacgacaacgctctcgctgacatgcaccccattttcttagcccacggacctgccttccgaaagaattttagtaaggaagccatgaactcaacagacttataccctttactgtgccaccttttaaatatcactgcaatgcctcataatggttcattctggaacgtgcaggacttgctgaacagcgcaatgccccgagtggttccttatacacagtctaccatcttgctgccaggaagtgtgaagccggccgaatatgatcaagaggggagctacccctattttatcggggttagtctcggttcgatcatcgtgatcgtgttctttgtcatctttattaaacacctgatacatagccagattccggcattacaggacatgcacgcagaaatagctcagcccctgctgcaagcatag

SEQ ID NO: 269163 - DNA, 1434 bp, Artificial Sequence
  derived and/or modified sequence
atgacatccaagttcctccttgtgtccttcatactggctgctctctcacttagcaccaccttctcccttcagcccgaccagcagaaggtcctgctcgtctcttttgatggttttaggtgggattacctttacaaggttccaactcctcacttccattatatcatgaaatacggagtgcacgtcaaacaagtgactaacgtattcattaccaaaacttatcctaaccattatacacttgtcaccggtctgtttgctgagaatcacggtatcgtggcaaatgatatgtttgatccaataaggaacaagtcatttagcttagatcatatgaacatttacgattcaaagttctgggaggaagcaactccaatctggattaccaaccaacgcgccggtcatacttcaggagctgccatgtggcccggcacagatgtgaaaattcacaagaggtttccgacccattacatgccgtacaacgaatctgttagttttgaagaccgtgtagcaaagataattgagtggttcacttccaaagaacccattaaccttggtctactgtactgggaagatccagatgacatggggcatcacttgggacccgacagtccactgatgggacccgtaatttctgacattgacaaaaagctgggctacctgattcaaatgcttaagaaagcgaagctctggaacacattgaacctaataattacatccgaccacgggatgacgcaatgtagcgaggagcggctgattgaattggatcaatacttagataaagaccactacacactgattgatcagtccccggtagcggccattctgcccaaggaagggaaattcgacgaagtttatgaagccctcacacacgcacacccaaacctcaccgtctacaaaaaagaagatgtgcctgagcgctggcattacaagtacaattctcgcatccagcccatcatagctgttgcagatgaagggtggcacattcttcagaacaaaagcgatgattttctgctgggtaatcacggatacgacaatgcactcgccgacatgcacccaatttttcttgctcacggtcccgcctttaggaaaaacttcagcaaggaggctatgaactcaaccgatctctatccgctactctgtcaccttctgaatatcaccgctatgcctcataatggaagcttctggaacgtccaggacctgttgaatagcgctatgccacgtgtcgttccctatactcaatctaccatcttgctgcctggatctgtcaaacccgctgaatacgaccaggaagggtcttatccatacttcataggcgtttcactcggcagcatcatcgttattgtgtttttcgtcatattcatcaagcatctgatccatagccagattcctgctctccaagacatgcacgccgaaatcgcccaaccattgctgcaggcctag

SEQ ID NO: 269164 - DNA, 1434 bp, Artificial Sequence
  derived and/or modified sequence
atgacctctaaattccttctggtgtcgttcattttagcagctctttctctctcaactacatttagtttacagcccgaccagcagaaagtgttacttgtctcctttgatgggttcagatgggattacttatataaggtgccaacgccacacttccactatataatgaagtacggagttcacgtgaaacaggtcactaacgtgttcataactaaaacctatccaaatcattacaccctagtcacaggtctgttcgcggagaaccacgggatagtcgcgaacgatatgttcgaccccattcggaacaaatcattcagcctcgaccacatgaacatatatgattccaaattttgggaggaggccactcccatctggattaccaaccagcgcgcaggtcatacgtcaggtgccgcaatgtggccaggcacggatgtaaaaatacataagcgctttcccacccattatatgccttacaacgagtcagtaagctttgaagacagggtcgccaaaatcatagaatggtttacttccaaagagcctataaatctggggttgctttactgggaggatcctgacgacatgggtcatcacttaggacccgactcacctctcatgggccctgttattagtgatattgacaagaaactgggctatttgattcagatgttgaagaaagctaaactctggaatacactgaaccttattatcacaagcgaccatggtatgacccagtgcagcgaagaacgtttaatcgagctggaccagtacctcgataaggaccattataccctaatcgatcaatcacctgttgccgcgatccttcccaaggaggggaagtttgacgaagtctatgaagccctgacacacgcacacccaaatctcactgtttacaaaaaagaagacgtgcctgaacgctggcattataaatataattctcgaatacaacccataatcgccgtggccgacgaaggttggcacatcctgcagaacaagtctgatgactttctgttaggaaatcatggatacgacaacgctctcgctgacatgcaccccattttcttagcccacggacctgccttccgaaagaattttagtaaggaagccatgaactcaacagacttataccctttactgtgccaccttttaaatatcactgcaatgcctcataatggttcattctggaacgtgcaggacttgctgaactctgcaatgccgcgggtcgtgccttacacacagtctacaattttacttcccgggagcgtaaaaccggcagagtacgaccaggaaggctcatatccatactttatcggtgtcagtctggggagtatcatcgtcattgttttttttgtaatttttattaagcacctcattcactctcaaatccccgctcttcaagacatgcatgctgagattgcacaacctctgcttcaagcctag

SEQ ID NO: 269165 - DNA, 2544 bp, Artificial Sequence
  derived and/or modified sequence
aggtgctccgctccagagttgagcgcaggtgagctcctgcgcgttccgggggcgttcctccagtcaccctcccgccgttacccgcggcgcgcccgagggagtctcctccagaccctccctcccgttgctccaaactaatacggactgaacggatcgctgcgaggattatcttacactgaactgatcaagtactttgaaaatgacttcgaaatttctcttggtgtccttcatacttgctgcactgagtctttcaaccaccttttctctccaaccagaccagcaaaaggttctactagtttcttttgatggattccgttgggattacttatataaagttccaacgccccattttcattatattatgaaatatggtgttcacgtgaagcaagttactaatgtttttattacaaaaacctaccctaaccattatactttggtaactggcctctttgcagagaatcatgggattgttgcaaatgatatgtttgatcctattcggaacaaatctttctccttggatcacatgaatatttatgattccaagttttgggaagaagcgacaccaatatggatcacaaaccagagggcaggacatactagtggtgcagccatgtggcccggaacagatgtaaaaatacataagcgctttcctactcattacatgccttacaatgagtcagtttcatttgaagatagagttgccaaaattattgaatggtttacgtcaaaagagcccataaatcttggtcttctctattgggaagaccctgatgacatgggccaccatttgggacctgacagtccgctcatggggcctgtcatttcagatattgacaagaagttaggatatctcatacaaatgctgaaaaaggcaaagttgtggaacactctgaacctaatcatcacaagtgatcatggaatgacgcagtgctctgaggaaaggttaatagaacttgaccagtacctggataaagaccactataccctgattgatcaatctccagtagcagccatcttgccaaaagaaggtaaatttgatgaagtctatgaagcactaactcacgctcatcctaatcttactgtttacaaaaaagaagacgttccagaaaggtggcattacaaatacaacagtcgaattcaaccaatcatagcagtggctgatgaagggtggcacattttacagaataagtcagatgactttctgttaggcaaccacggttacgataatgcgttagcagatatgcatccaatatttttagcccatggtcctgccttcagaaagaatttctcaaaagaagccatgaactccacagatttgtacccactactatgccacctcctcaatatcaccgccatgccacacaatggatcattctggaatgtccaggatctgctcaattcagcaatgccaagggtggtcccttatacacagagtactatactcctccctggtagtgttaaaccagcagaatatgaccaagaggggtcatacccttatttcataggggtctctcttggcagcattatagtgattgtattttttgtaattttcattaagcatttaattcacagtcaaatacctgccttacaagatatgcatgctgaaatagctcaaccattattacaagcctaatgttactttgaagtggatttgcatattgaagtggagattccataattatgtcagtgtttaaaggtttcaaattctgggaaaccagttccaaacatttgcagaaaccattaagcagttacatatttaggtatacacacacacacacacacacatacacacacacggaccaaaatacttacacctgcaaaggaataaagatgtgagagtatgtctccattgttcactgtagcatagggatagataagatcctgctttatttggacttggcgcagataatgtatatatttagcaactttgcactatgtaaagtaccttatgtattgcactttaaatttctctcctgatgggtactttaatttgaaatgcactttatgcacagttatgtcttataacttgattgaaaatgacaactttttgcacccatgtcacagaatacttgttacgcattgttcaaactgaaggaaatttctaataatcccgaataatgaacgtagaaatctatctccataaattgagagaagaagaaggtgataagtgttgaaaattaaatgtgataacctttgaaccttgaattttggagatgtattcccaacagcagaatgcaactgtgggcatttcttgtcttatttctttccagagaacgtggttttcatttatttttccctcaaaagagagtcaaatactgacagattcgttctaaatatattgtttctgtcataaaattattgtgatttcctgatgagtcatattactgtgattttcataataatgaagacaccatgaatatactttttttctatatagttcagcaatggcctgaatagaagcaaccaggcaccatctcagcaatgttttctcttgtttgtaattatttgctcctttgaaaattaaatcactattaattacattaa

SEQ ID NO: 269166 - DNA, 1434 bp, Artificial Sequence
  derived and/or modified sequence
atgaccagcaagttcctgctggtgagcttcatcctggccgccctgagcctgagcaccaccttcagcctgcagcccgaccagcagaaggtgctgctggtgagcttcgacggcttcagatgggactacctgtacaaggtgcccaccccccacttccactacatcatgaagtacggcgtgcacgtgaagcaggtgaccaacgtgttcatcaccaagacctaccccaaccactacaccctggtgaccggcctgttcgccgagaaccacggcatcgtggccaacgacatgttcgaccccatcagaaacaagagcttcagcctggaccacatgaacatctacgacagcaagttctgggaggaggccacccccatctggatcaccaaccagagagccggccacaccagcggcgccgccatgtggcccggcaccgacgtgaagatccacaagagattccccacccactacatgccctacaacgagagcgtgagcttcgaggacagagtggccaagatcatcgagtggttcaccagcaaggagcccatcaacctgggcctgctgtactgggaggaccccgacgacatgggccaccacctgggccccgacagccccctgatgggccccgtgatcagcgacatcgacaagaagctgggctacctgatccagatgctgaagaaggccaagctgtggaacaccctgaacctgatcatcaccagcgaccacggcatgacccagtgcagcgaggagagactgatcgagctggaccagtacctggacaaggaccactacaccctgatcgaccagagccccgtggccgccatcctgcccaaggagggcaagttcgacgaggtgtacgaggccctgacccacgcccaccccaacctgaccgtgtacaagaaggaggacgtgcccgagagatggcactacaagtacaacagcagaatccagcccatcatcgccgtggccgacgagggctggcacatcctgcagaacaagagcgacgacttcctgctgggcaaccacggctacgacaacgccctggccgacatgcaccccatcttcctggcccacggccccgccttcagaaagaacttcagcaaggaggccatgaacagcaccgacctgtaccccctgctgtgccacctgctgaacatcaccgccatgccccacaacggcagcttctggaacgtgcaggacctgctgaacagcgccatgcccagagtggtgccctacacccagagcaccatcctgctgcccggcagcgtgaagcccgccgagtacgaccaggagggcagctacccctacttcatcggcgtgagcctgggcagcatcatcgtgatcgtgttcttcgtgatcttcatcaagcacctgatccacagccagatccccgccctgcaggacatgcacgccgagatcgcccagcccctgctgcaggcctag

SEQ ID NO: 269167 - DNA, 1434 bp, Artificial Sequence
  derived and/or modified sequence
atgaccagcaagtttctgctggtgagcttcattctggcggccttaagtctatctactacattttcgctgcaaccagatcagcagaaggtgctacttgtctcttttgacggttttcgctgggattacctgtataaggttcctacacctcactttcattacatcatgaagtacggcgtgcacgtgaagcaggtgaccaacgtctttattactaagacctacccgaatcattacaccctggtcaccggcctctttgccgaaaatcatgggattgttgctaacgatatgttcgaccccatcagaaataagtcgttttcgctcgatcacatgaatatttacgacagcaagttctgggaggaagctacgccaatctggataaccaaccagcgcgccgggcacacttctggcgccgctatgtggcccggtaccgacgtaaagatccacaaacggtttcccacacattacatgccctacaacgaatccgtgtcatttgaagatcgtgttgccaagataatagagtggttcacaagtaaggagcccatcaacctcggtctgctgtactgggaggatccagacgatatggggcaccacctcggccccgatagcccattgatgggacccgtgatttccgacattgacaaaaagctcggttacttaatccagatgcttaaaaaggccaaactttggaacactctgaatttaatcatcaccagcgaccacggcatgacacagtgcagtgaagaaaggttaatagagctcgatcagtacctcgacaaggatcactacaccctaatcgatcaaagccctgtcgctgccatcctgcccaaggaagggaaatttgacgaagtgtatgaagccttgactcatgcccacccaaacctgaccgtgtacaagaaagaggatgtacccgaacgctggcattacaagtacaacagtaggatccagcccattatcgccgttgccgacgagggatggcacatactccagaacaagagcgatgactttctacttggtaatcatgggtatgataacgccttggccgacatgcatccaatttttctagcacacggccccgcgttccgtaagaacttctcaaaagaggctatgaactccacagatttgtacccactcctgtgccacctgttgaacattaccgctatgccacacaacgggtccttctggaacgttcaagatttactcaactcggctatgccccgcgtagtgccatatacccagtcaactattttgcttcccggttccgtcaaacctgcagaatatgatcaggaagggtcttacccatattttataggggtcagcctgggtagcataattgtcatcgtgttttttgtcatcttcataaagcatcttattcactctcaaattcctgctcttcaggacatgcacgctgagattgctcagcctcttctgcaagcatag

SEQ ID NO: 269168 - DNA, 1434 bp, Artificial Sequence
  derived and/or modified sequence
atgacaagtaagttcctgctcgtctctttcatcctggcagctctgagcctatctactaccttctctctccagccagaccagcagaaggtgctgctagtgtccttcgacggctttcgttgggactatctatacaaggtacccacgccacactttcactatatcatgaagtatggcgtgcatgtgaaacaggtgacaaatgtctttattacgaagacatacccaaaccactacactcttgtcacaggtcttttcgctgagaatcacggaattgttgcaaacgacatgttcgacccgatccgcaacaagtcttttagcctggatcatatgaatatctatgattctaagttttgggaggaggcaaccccaatctggatcacaaatcagcgagccggtcacacctcgggtgccgcaatgtggccaggcacagacgtaaagatccacaaaagattccctacacactacatgccttacaacgagtctgtgtctttcgaagaccgcgtcgccaagattattgagtggtttacctccaaagaacccatcaacctggggctcctctactgggaggaccctgatgatatggggcaccatctcggaccggatagtcctctgatggggcctgttatctccgatattgacaaaaagctaggctacctcatccagatgctcaagaaggccaagctgtggaatacactgaacctcataatcaccagcgaccacgggatgacgcaatgttctgaggaacggcttatcgagcttgatcagtacctggataaggatcactatactctgatcgaccagtcccccgttgcggctatcctgcccaaagagggtaagtttgatgaagtatacgaggcacttactcatgcacatccaaaccttacagtgtataagaaggaggatgtcccagagagatggcattacaaatataactccaggatacagccaattatcgcggtggctgatgagggctggcacattcttcagaacaaaagcgatgattttttgctcggcaaccacggttatgataatgctctggcagatatgcaccccatattccttgctcacggaccagccttccggaagaattttagtaaagaagctatgaattccacggacctttacccactgctctgtcacctactaaacattaccgcgatgccccacaatggatcattctggaatgtacaggacctactgaacagtgccatgccacgtgttgtaccatacacccaatctactattttgcttccgggctcagttaaacccgctgaatacgaccaggagggcagttacccttatttcattggggtgagcctggggtcaataattgtcattgtgttctttgtgattttcatcaagcatttgatccactcacagatcccggcattgcaagatatgcacgctgaaatcgcacaacctttgttgcaggcgtag

SEQ ID NO: 269169 - DNA, 1434 bp, Artificial Sequence
  derived and/or modified sequence
atgaccagcaagttcctgctggtgtccttcatcctggccgccctgagcctgagcaccaccttcagcctgcagcctgaccagcagaaggtgctgctggtgtcctttgatggcttccgctgggactacctgtacaaggtgcccaccccccacttccactacatcatgaagtatggagtgcacgtgaagcaggtgaccaacgtgttcatcaccaagacctaccccaaccactacaccctggtgacaggcctgtttgctgagaaccacggcatcgtggccaatgacatgtttgaccccatccggaacaagagcttcagcctggaccacatgaacatctatgacagcaagttctgggaggaggccacccccatctggatcaccaaccagagagctggccacaccagcggggccgccatgtggccaggcacagatgtgaagatccacaagcgcttccccacccactacatgccctacaatgaatctgtgtcctttgaggacagagtggccaagatcatcgagtggttcaccagcaaggagcccatcaacctgggcctgctgtactgggaggaccctgatgacatgggccaccacctgggccctgacagccccctgatgggccctgtgatcagtgacatcgacaagaagctgggctacctgatccagatgctgaagaaggccaagctgtggaacaccctgaacctgatcatcaccagtgaccacggcatgacccagtgcagcgaggagcggctcatcgagctggaccagtacctggacaaggaccactacaccctgattgaccagagccctgtggccgccatcctgcccaaggagggcaagtttgatgaggtgtatgaggccctgacccacgcccaccccaacctgactgtgtacaagaaggaggatgtgcctgagcgctggcactacaagtacaacagccgcatccagcccatcatcgctgtggctgatgagggctggcacatcctgcagaacaagagtgatgacttcctgctgggcaaccacggctatgacaatgccctggccgacatgcaccccatcttcctggcccacggccctgccttcaggaagaacttcagcaaggaggccatgaacagcacagacctgtaccccctgctgtgccacctgctgaacatcacagccatgccccacaacggcagcttctggaatgtgcaggacctgctgaacagcgccatgccccgggtggtgccctacacccagagcaccatcctgctgcccggctctgtgaagccagcagaatatgaccaggagggcagctacccctacttcatcggcgtgtccctgggcagcatcatcgtgattgtgttcttcgtcatcttcatcaagcacctgatccacagccagatcccagccctgcaggacatgcacgccgagatcgcccagcccctgctgcaggcctag

SEQ ID NO: 269170 - DNA, 2606 bp, Artificial Sequence
  derived and/or modified sequence
aggtgctccgctccagagttgagcgcaggtgagctcctgcgcgttccgggggcgttcctccagtcaccctcccgccgttacccgcggcgcgcccgagggagtctcctccagaccctccctcccgttgctccaaactaatacggactgaacggatcgctgcgagggtgggagagaaaattagggggagaaaggacagagagagcaactaccatccatagccagatagattatcttacactgaactgatcaagtactttgaaaatgacttcgaaatttctcttggtgtccttcatacttgctgcactgagtctttcaaccaccttttctctccaaccagaccagcaaaaggttctactagtttcttttgatggattccgttgggattacttatataaagttccaacgccccattttcattatattatgaaatatggtgttcacgtgaagcaagttactaatgtttttattacaaaaacctaccctaaccattatactttggtaactggcctctttgcagagaatcatgggattgttgcaaatgatatgtttgatcctattcggaacaaatctttctccttggatcacatgaatatttatgattccaagttttgggaagaagcgacaccaatatggatcacaaaccagagggcaggacatactagtggtgcagccatgtggcccggaacagatgtaaaaatacataagcgctttcctactcattacatgccttacaatgagtcagtttcatttgaagatagagttgccaaaattattgaatggtttacgtcaaaagagcccataaatcttggtcttctctattgggaagaccctgatgacatgggccaccatttgggacctgacagtccgctcatggggcctgtcatttcagatattgacaagaagttaggatatctcatacaaatgctgaaaaaggcaaagttgtggaacactctgaacctaatcatcacaagtgatcatggaatgacgcagtgctctgaggaaaggttaatagaacttgaccagtacctggataaagaccactataccctgattgatcaatctccagtagcagccatcttgccaaaagaaggtaaatttgatgaagtctatgaagcactaactcacgctcatcctaatcttactgtttacaaaaaagaagacgttccagaaaggtggcattacaaatacaacagtcgaattcaaccaatcatagcagtggctgatgaagggtggcacattttacagaataagtcagatgactttctgttaggcaaccacggttacgataatgcgttagcagatatgcatccaatatttttagcccatggtcctgccttcagaaagaatttctcaaaagaagccatgaactccacagatttgtacccactactatgccacctcctcaatatcaccgccatgccacacaatggatcattctggaatgtccaggatctgctcaattcagcaatgccaagggtggtcccttatacacagagtactatactcctccctggtagtgttaaaccagcagaatatgaccaagaggggtcatacccttatttcataggggtctctcttggcagcattatagtgattgtattttttgtaattttcattaagcatttaattcacagtcaaatacctgccttacaagatatgcatgctgaaatagctcaaccattattacaagcctaatgttactttgaagtggatttgcatattgaagtggagattccataattatgtcagtgtttaaaggtttcaaattctgggaaaccagttccaaacatttgcagaaaccattaagcagttacatatttaggtatacacacacacacacacacacatacacacacacggaccaaaatacttacacctgcaaaggaataaagatgtgagagtatgtctccattgttcactgtagcatagggatagataagatcctgctttatttggacttggcgcagataatgtatatatttagcaactttgcactatgtaaagtaccttatgtattgcactttaaatttctctcctgatgggtactttaatttgaaatgcactttatgcacagttatgtcttataacttgattgaaaatgacaactttttgcacccatgtcacagaatacttgttacgcattgttcaaactgaaggaaatttctaataatcccgaataatgaacgtagaaatctatctccataaattgagagaagaagaaggtgataagtgttgaaaattaaatgtgataacctttgaaccttgaattttggagatgtattcccaacagcagaatgcaactgtgggcatttcttgtcttatttctttccagagaacgtggttttcatttatttttccctcaaaagagagtcaaatactgacagattcgttctaaatatattgtttctgtcataaaattattgtgatttcctgatgagtcatattactgtgattttcataataatgaagacaccatgaatatactttttttctatatagttcagcaatggcctgaatagaagcaaccaggcaccatctcagcaatgttttctcttgtttgtaattatttgctcctttgaaaattaaatcactattaattacattaa

SEQ ID NO: 269171 - DNA, 1434 bp, Artificial Sequence
  derived and/or modified sequence
atgaccagcaagttcctgctggtgagcttcatcctggccgccctgtccctatctactacattcagtctgcagcccgatcaacaaaaagtgctgctggtgagtttcgatgggttcagatgggattacctgtacaaggtccccacaccgcactttcattatataatgaaatacggcgtccacgttaaacaggttacaaatgtgttcattactaaaacctatcccaaccactacaccttggtcacgggcctctttgctgaaaatcatgggatcgttgctaacgacatgttcgacccgatacggaacaagtccttttccctcgaccatatgaatatctacgactccaaattctgggaagaggccacaccgatttggattacaaaccagcgggcaggtcatactagcggcgcagcgatgtggcctgggacagacgtaaagattcacaagaggttccctacgcattacatgccttacaacgaatctgtttctttcgaagaccgggtagcaaaaattatagaatggttcacgtccaaggaaccaatcaatctggggctgctgtactgggaggatccagacgatatgggacaccatctcggtcccgattctcccctgatgggccctgtgatcagtgacatagataaaaaacttgggtacttaatccagatgttaaagaaggctaagttatggaataccctgaacctgatcatcacatcagatcatggcatgacccagtgcagcgaagaacgtctgatcgagctagatcaataccttgacaaagaccactacacattgatcgaccagagcccagtcgcagcaatattgcccaaggagggaaagtttgacgaggtctatgaagctctcacccacgcacatccgaacctgaccgtgtataagaaagaagatgtccccgagcgctggcattacaagtataatagcagaatccagcccattatcgccgtggccgacgagggctggcatatattgcagaataaatctgatgatttcttactgggaaatcacgggtatgacaatgcgctggccgacatgcaccccatattcttggcccacggcccagcattccggaagaatttctcaaaggaggcgatgaattccacagacctatacccccttttgtgccacctgctgaacatcacagctatgccccataatgggtctttctggaatgttcaggacctcttaaatagcgccatgccacgtgtggtgccttatactcagtctactattctgctgcccggcagtgtgaagcctgccgaatatgatcaggagggtagttacccttactttattggggtgtctctgggatccattatcgttatcgtcttcttcgtcatttttattaaacatctcatacactcacagataccggcattgcaggacatgcatgctgagatcgcccagcccctccttcaagcctag

SEQ ID NO: 269172 - DNA, 1434 bp, Artificial Sequence
  derived and/or modified sequence
atgaccagcaagttcctgctggtgagcttcatcctggccgccctgagcctctccactacgttctcattacagcctgatcagcagaaagtactactcgtcagtttcgatggtttcagatgggactatttgtacaaagtgccaaccccgcacttccactacattatgaagtatggcgtgcatgtgaagcaggtgacaaatgtgttcattaccaaaacatatccaaatcattacacactggtgactggcctctttgcagaaaaccatggtattgtggctaatgacatgttcgatcccatacgcaacaaatccttttccctggaccacatgaacatttatgattcaaaattctgggaggaagccacgcccatctggattacgaaccagagggctggacatacaagcggcgccgcaatgtggccaggtacagatgtcaagatccataagcgctttcccacccactatatgccttataatgaatccgtgagctttgaagaccgagtagccaaaattatagagtggtttacatctaaagaaccgattaatcttggattactgtattgggaagaccccgatgatatgggacatcacctcgggcctgattcaccactgatgggacctgtgatcagtgatatcgataagaaattagggtaccttattcagatgctcaaaaaagcgaagttatggaatacactgaacctgattattacgtcagaccacggaatgacacagtgctctgaggagcgactcattgagctagatcagtatctggataaagatcactacactctgatcgaccagtctccagtggccgctattctcccaaaggagggtaaattcgatgaagtgtacgaagcgttgacacatgcacacccgaacctgacggtttataaaaaagaagacgtacctgagcggtggcattataagtacaattcacgcatccagccgatcattgccgtggcagacgaggggtggcacatcttgcagaacaagtcggacgacttcctgctgggtaaccacgggtacgacaatgcgctcgccgacatgcaccccattttcctggcacacggtcctgcattccggaagaatttttctaaggaggccatgaatagtaccgatctgtacccccttctttgtcatttgctgaatatcacagccatgcctcataacggatccttttggaacgttcaggatctgttgaattctgccatgcccagggtggtgccatacacacagtccactatcctcctgcccgggtccgttaaacctgccgagtatgaccaggaaggatcctatccatactttatcggagtgagcctgggtagtatcatagtaatcgtcttcttcgtaattttcataaagcatctcatccactcccaaattccggcattacaagatatgcacgctgaaattgcacagccactccttcaggcgtag

SEQ ID NO: 269173 - RNA, 1434 nt, Artificial Sequence
  derived and/or modified sequence
augacuagcaaguuccugcuggugucuuuuauacuugccgcucuuucgcucagcacaacuuuuucucuccagccugaucagcaaaagguccugcuggugucuuucgacggauuucgaugggauuaccucuauaaggugcccaccccccauuuucauuacauaaugaaguacggaguccacgucaaacaggugacgaacguuuuuauuacuaaaacguaccccaaccacuauacccuugugacaggccuguucgccgagaaucaugggauaguggccaaugauauguucgaccccauccguaacaagucauuuagcuuagaucauaugaacauuuacgauucaaaguucugggaggaagcaacuccaaucuggauuaccaaccaacgcgccggucauacuucaggagcugccauguggcccggcacagaugugaaaauucacaagagguuuccgacccauuacaugccguacaacgaaucuguuaguuuugaagaccguguagcaaagauaauugagugguucacuuccaaagaacccauuaaccuuggucuacuguacugggaagauccagaugacauggggcaucacuugggacccgacagcccucuuauggggccuguuauuucugacauugauaaaaaacucggguaucugauccaaaugcugaaaaaggccaagcuauggaacaccuugaaucuaauuauaacuucugaccacggaaugacucaguguuccgaagagagacugaucgaacuugaucaguaucuggauaaggaucacuauacacugaucgaccaaucuccagucgcugcuauccugccuaaagaaggaaaauuugacgaaguuuacgaagcucuaacucacgcucacccuaaccucaccguguacaaaaaggaggaugugcccgaacgguggcacuacaaguauaacuccagaauccaaccaauaaucgccguggcugacgagggauggcauauccuacagaacaaaucagaugacuuucuucugggaaaucacggcuacgacaaugcccuagccgauaugcaccccauauuucuugcacacgggcccgcauuccguaagaacuucagcaaagaagccaugaauucaacugaccuguauccccuucucugccaccuccuuaauauaacggcaaugccacacaacgggagcuucuggaacgugcaagaccugcugaauagcgcuaugccacgugucguucccuauacucaaucuaccaucuugcugccuggaucugucaaacccgcugaauacgaccaggaagggucuuauccauacuucauaggcguuucacucggcagcaucaucguuauuguguuuuucgucauauucaucaagcaucugauccauagccagauuccugcucuccaagacaugcacgccgaaaucgcccaaccauugcugcaggccuag

SEQ ID NO: 269174 - RNA, 1434 nt, Artificial Sequence
  derived and/or modified sequence
augacuucuaaguucuuacucgugaguuuuauucuggccgcacugagccuuucuacaaccuuuuccuugcagccagaccagcaaaagguauugcuggugucuuucgaugguuucagaugggauuaccuguacaaaguucccacgccacacuuucacuacaucaugaaguaugggguucacguaaaacaagucaccaauguuuucauuacaaagacuuauccaaaccauuacacacuggugacaggacuguuugcugagaaucauggaauaguggcuaacgauauguuugaccccauucgaaacaaaagcuuuagucucgaccacaugaacaucuaugacucuaaguuuugggaggaagccacccccauuuggauaacaaaucagagggccggucacaccucgggugccgcgauguggcccggaacagauguuaagauucacaagcgguuucccacucacuauaugccguacaaugaaagugugaguuucgaagacagaguugcaaagaucauugagugguuuaccucaaaagaaccgauaaaccuugggcuguuguacugggaagauccugacgauaugggccaccaccucggcccagauuccccacuuaugggcccuguuauaucggacaucgauaagaagcugggcuaucugauccaaaugcucaaaaaagccaaacuguggaauacucugaaccuaaucauuaccucugaucauggcaugacccaguguucagaggaacgucucauugagcuggaccaguacuuggacaaggaccauuacacccugauugaucaaucaccagucgccgccauuuuaccgaaagaggguaaauucgaugaagucuaugaagcucugacccacgcccauccuaaucucacugucuacaagaaagaagaugugccugaacgcuggcauuauaaauauaauucucgaauacaacccauaaucgccguggccgacgaagguuggcacauccugcagaacaagucugaugacuuucuguuaggaaaucauggauacgacaacgcucucgcugacaugcaccccauuuucuuagcccacggaccugccuuccgaaagaauuuuaguaaggaagccaugaacucaacagacuuauacccuuuacugugccaccuuuuaaauaucacugcaaugccucauaaugguucauucuggaacgugcaggacuugcugaacagcgcaaugccccgagugguuccuuauacacagucuaccaucuugcugccaggaagugugaagccggccgaauaugaucaagaggggagcuaccccuauuuuaucgggguuagucucgguucgaucaucgugaucguguucuuugucaucuuuauuaaacaccugauacauagccagauuccggcauuacaggacaugcacgcagaaauagcucagccccugcugcaagcauag

SEQ ID NO: 269175 - RNA, 1434 nt, Artificial Sequence
  derived and/or modified sequence
augacauccaaguuccuccuuguguccuucauacuggcugcucucucacuuagcaccaccuucucccuucagcccgaccagcagaagguccugcucgucucuuuugaugguuuuaggugggauuaccuuuacaagguuccaacuccucacuuccauuauaucaugaaauacggagugcacgucaaacaagugacuaacguauucauuaccaaaacuuauccuaaccauuauacacuugucaccggucuguuugcugagaaucacgguaucguggcaaaugauauguuugauccaauaaggaacaagucauuuagcuuagaucauaugaacauuuacgauucaaaguucugggaggaagcaacuccaaucuggauuaccaaccaacgcgccggucauacuucaggagcugccauguggcccggcacagaugugaaaauucacaagagguuuccgacccauuacaugccguacaacgaaucuguuaguuuugaagaccguguagcaaagauaauugagugguucacuuccaaagaacccauuaaccuuggucuacuguacugggaagauccagaugacauggggcaucacuugggacccgacaguccacugaugggacccguaauuucugacauugacaaaaagcugggcuaccugauucaaaugcuuaagaaagcgaagcucuggaacacauugaaccuaauaauuacauccgaccacgggaugacgcaauguagcgaggagcggcugauugaauuggaucaauacuuagauaaagaccacuacacacugauugaucaguccccgguagcggccauucugcccaaggaagggaaauucgacgaaguuuaugaagcccucacacacgcacacccaaaccucaccgucuacaaaaaagaagaugugccugagcgcuggcauuacaaguacaauucucgcauccagcccaucauagcuguugcagaugaaggguggcacauucuucagaacaaaagcgaugauuuucugcuggguaaucacggauacgacaaugcacucgccgacaugcacccaauuuuucuugcucacggucccgccuuuaggaaaaacuucagcaaggaggcuaugaacucaaccgaucucuauccgcuacucugucaccuucugaauaucaccgcuaugccucauaauggaagcuucuggaacguccaggaccuguugaauagcgcuaugccacgugucguucccuauacucaaucuaccaucuugcugccuggaucugucaaacccgcugaauacgaccaggaagggucuuauccauacuucauaggcguuucacucggcagcaucaucguuauuguguuuuucgucauauucaucaagcaucugauccauagccagauuccugcucuccaagacaugcacgccgaaaucgcccaaccauugcugcaggccuag

SEQ ID NO: 269176 - RNA, 1434 nt, Artificial Sequence
  derived and/or modified sequence
augaccucuaaauuccuucuggugucguucauuuuagcagcucuuucucucucaacuacauuuaguuuacagcccgaccagcagaaaguguuacuugucuccuuugauggguucagaugggauuacuuauauaaggugccaacgccacacuuccacuauauaaugaaguacggaguucacgugaaacaggucacuaacguguucauaacuaaaaccuauccaaaucauuacacccuagucacaggucuguucgcggagaaccacgggauagucgcgaacgauauguucgaccccauucggaacaaaucauucagccucgaccacaugaacauauaugauuccaaauuuugggaggaggccacucccaucuggauuaccaaccagcgcgcaggucauacgucaggugccgcaauguggccaggcacggauguaaaaauacauaagcgcuuucccacccauuauaugccuuacaacgagucaguaagcuuugaagacagggucgccaaaaucauagaaugguuuacuuccaaagagccuauaaaucugggguugcuuuacugggaggauccugacgacaugggucaucacuuaggacccgacucaccucucaugggcccuguuauuagugauauugacaagaaacugggcuauuugauucagauguugaagaaagcuaaacucuggaauacacugaaccuuauuaucacaagcgaccaugguaugacccagugcagcgaagaacguuuaaucgagcuggaccaguaccucgauaaggaccauuauacccuaaucgaucaaucaccuguugccgcgauccuucccaaggaggggaaguuugacgaagucuaugaagcccugacacacgcacacccaaaucucacuguuuacaaaaaagaagacgugccugaacgcuggcauuauaaauauaauucucgaauacaacccauaaucgccguggccgacgaagguuggcacauccugcagaacaagucugaugacuuucuguuaggaaaucauggauacgacaacgcucucgcugacaugcaccccauuuucuuagcccacggaccugccuuccgaaagaauuuuaguaaggaagccaugaacucaacagacuuauacccuuuacugugccaccuuuuaaauaucacugcaaugccucauaaugguucauucuggaacgugcaggacuugcugaacucugcaaugccgcgggucgugccuuacacacagucuacaauuuuacuucccgggagcguaaaaccggcagaguacgaccaggaaggcucauauccauacuuuaucggugucagucuggggaguaucaucgucauuguuuuuuuuguaauuuuuauuaagcaccucauucacucucaaauccccgcucuucaagacaugcaugcugagauugcacaaccucugcuucaagccuag

SEQ ID NO: 269177 - protein, 286 aa, Artificial Sequence
  derived and/or modified sequence
MPQGSVGRWGCEKKCIVGSRPGGGGDGPGWIPQRRRRRRWQAENNKPRSRSQGRLDGTGWATAGGINSTVSLPGGGSGPPEDVKPPVLGVRGLHCPPPPGGPGAGKRLCAICGDRSSGKHYGVYSCEGCKGFFKRTIRKDLTYSCRDNKDCTVDKRQRNRCQYCRYQKCLATGMKREAVQEERQRGKDKDGDGEGAGGAPEEMPVDRILEAELAVEQKSDQGVEGPGGTGGSGSSVSVGVNPLSFVMGVGGGSLGLFYIPSPSFPLITFLTLLGTGGAAKQGLSNI

SEQ ID NO: 269178 - DNA, 1614 bp, Artificial Sequence
  derived and/or modified sequence
atgtcgtgggcagcaagacctccttttttaccacaaaggcacgccgcagggcaatgcgggcccgtaggagtgcgtaaggagatgcactgcggcgtggcgtcaagatggcgaaggagacggccgtggctggatcccgccgccgcagctgcagctgctgtggccgggggggaacagcagactcccgaaccggagccaggtgaagcaggacgggatgggatgggggactcagggagagattcaagaagtcctgattctagctctccgaaccccctcccccaaggagtgccccctccgagtcccccggggccccctcttccaccaagtaccgctccatctctgggaggcagcggagcaccaccaccccccccaatgcctccccctccccttggaagtccatttcccgtcatttctagctctatgggcagtccgggtctgcctccaccggcacctccggggtttagcgggcccgtgtcctccccgcaaatcaactccaccgtgagcctccccggcggcggcagtgggccgcccgaggacgtaaaaccccctgtgcttggcgtcaggggtctccattgtccacctccgcccgggggccccggggcaggtaaaagattatgcgcaatctgtggtgataggagcagcggaaagcactatggtgtatactcatgtgaaggttgtaaaggattttttaaacgcacaattcggaaggatctcacctacagctgcagagacaacaaagattgcactgtagataagcgacaaaggaacagatgtcagtattgtagataccaaaagtgtctcgcaacaggaatgaagcgcgaagctgttcaagaggagcggcagcgcgggaaggacaaagacggcgatggcgagggcgcaggcggggcacctgaggagatgccagtggatcggatccttgaagctgagctggccgtagagcagaagtcagaccagggcgtggaaggcccaggtgggacaggcgggtccggctccagtcccaatgaccccgtcactaatatctgtcaggcagccgacaaacagttatttactctcgtcgaatgggctaagagaattcctcatttttctagcctgcctttggacgaccaggtaattctgttaagggccggatggaacgagctgctgatagcctcgttctcccatcgtagcattgacgttcgcgatggtatactgcttgctaccggcctccatgtgcacagaaattccgctcattctgccggagtcggcgccatcttcgaccgtagcctgagcagggttctgacagagcttgtgtctaagatgcgggacatgcggatggataagaccgagcttggatgcctgcgggcgatcatcctgttcaaccccgacgctaaaggattgagcaatccctccgaggtcgaagtgttacgggaaaaagtatacgcctccctggaaacctactgcaaacagaagtaccctgagcaacaggggaggttcgccaagctgctgcttaggctccctgccctccgctcaattggtcttaaatgcctggagcacctcttctttttcaagctcattggtgatacacccatcgataccttcctgatggagatgttagaagcaccacaccagctcgcttag

SEQ ID NO: 269179 - DNA, 1614 bp, Artificial Sequence
  derived and/or modified sequence
atgtcgtgggccgccagacccccttttcttccccagcgacatgctgcaggacagtgcggacccgtgggtgtccgaaaggagatgcattgtggggtggcctctaggtggaggcgtagaaggccctggctggaccctgctgcggccgcagcagccgcagtggccggtggcgagcagcagacccccgaacctgagcccggagaggcaggaagggacgggatgggagacagcggtcgggacagtcgctcccctgacagctccagcccaaaccctctccctcagggtgtccctccaccaagtccaccaggccctcctctgcctccaagcaccgctccatctctgggcggtagcggggctccaccacctcctcctatgcccccgccaccactcggtagtcccttccctgttataagctcctcgatgggctccccggggctgcctccaccagctccccctggattttcgggccctgtctcctctcctcagattaattcaacagtgagcctcccagggggcggcagtgggcctcccgaggatgtgaaaccaccggtgctgggagttcgcgggctgcactgcccccctcctcccgggggccccggagctggtaagagactgtgcgcgatatgcggcgaccggtccagtggtaaacactatggtgtttactcttgtgagggctgcaaaggcttctttaaaagaactatccgtaaggacctgacctactcttgtagagacaataaggattgtactgttgacaagagacaacgcaaccggtgccagtactgccgttaccagaagtgccttgcgactggcatgaaacgtgaggcggtccaagaagagcgccagcgtggcaaggataaagacggggacggggagggggcaggcggcgctcctgaagaaatgcctgtagacagaatcctggaagccgaactggcggttgaacagaagtccgatcagggcgtggagggtcctggaggcactggcggctctggctcctcccctaacgatccagtgacgaacatttgccaagccgcagacaagcagctttttacactggttgaatgggccaagcgtatccctcactttagcagccttcccctcgacgaccaggtcattctgctgcgtgctggctggaatgagctgctgattgccagtttcagccacagaagcatcgacgtcagagacggaattctgcttgccactggattacatgtgcataggaatagcgcccactcggcaggtgtcggggctatcttcgataggtccctgtctagagtcctgaccgagctcgtttccaaaatgcgcgatatgcgtatggataaaacagagctcggctgcctgcgggccataattctgtttaaccccgatgctaagggcctctcaaacccctccgaagttgaagtcctccgggagaaagtttatgctagcctagagacctattgcaaacagaagtatcccgagcagcaaggtagattcgccaaactgctgttgagattgccagccttgaggagcatcgggctgaagtgcctggagcacctcttttttttcaaactcattggggatactccgatagatacattcttgatggagatgctggaagcccctcaccagctggcatag

SEQ ID NO: 269180 - DNA, 1614 bp, Artificial Sequence
  derived and/or modified sequence
atgtcctgggccgcgcggccaccattcctcccacaaagacacgcagctggtcagtgcggtcccgtgggggtccgcaaagagatgcattgtggcgtggcctcacggtggaggaggagacggccatggctggatccagccgcagcagccgctgccgccgtcgccggaggagagcagcagacgccggaacccgaaccaggcgaagccggcagagatgggatgggagattccggcagggactcacgctcaccagatagttcatccccaaatcccctgcctcagggtgtacctccgccctcaccccccggccctccattaccgcccagtaccgctccctctctgggaggctcaggcgccccaccccctcctccaatgccccctcctccgttaggctctccttttcctgttatttcttcaagtatgggctcaccggggttacccccccctgctccgccaggattctcagggccagtttcttctccacagattaactccacagtgagcctgcctggcgggggttcaggtccgcccgaagacgttaagcctcctgttctaggcgtacgcgggttgcactgcccgcctccacctggtggccctggtgcaggtaagaggctgtgtgctatttgcggcgataggagctcgggtaagcattacggagtttatagctgcgaaggatgcaaaggattttttaaacgcaccattaggaaagatctgacatactcatgtagggacaataaagattgtaccgttgataaaaggcagcgaaataggtgtcagtattgtagatatcagaagtgtctggccaccgggatgaagagagaagctgtccaggaggaaagacagcggggcaaggataaagatggagatggagagggagcagggggggcccccgaggaaatgccagttgaccgaattttggaggcggaacttgctgtggagcagaagtctgatcaaggtgtcgaagggcccggaggcaccggaggatcggggtcatcgcctaatgaccctgtgacaaatatttgtcaagctgccgacaaacagctgttcactctagtcgagtgggccaaaaggattcctcatttcagtagtctccctctggatgatcaggtgatccttctgagagctggctggaatgagctcctgatcgcgtctttctcgcaccgctccatagacgttcgggacgggatcctgctcgccaccggcctgcacgtgcacaggaattcagcccatagtgctggggtgggggccatttttgaccggtccctcagtagggtgctgacagaacttgtctccaagatgcgggatatgaggatggacaagacagagctgggctgtctgcgcgcgatcattttattcaatcctgatgccaaaggtctttctaacccttctgaggtagaggtattacgagagaaggtttacgcttccctagaaacctactgcaagcagaagtaccccgaacaacaagggaggtttgctaagctgctgctgagacttcctgctctgcgcagcatcggcctcaagtgcctagaacatctattctttttcaagctgattggggacacgcccattgacaccttcctgatggagatgcttgaggctcctcatcagctcgcttag

SEQ ID NO: 269181 - DNA, 1614 bp, Artificial Sequence
  derived and/or modified sequence
atgtcttgggccgcccggcctccattcctcccccagcggcacgctgcaggtcagtgtgggcctgtcggggtccgaaaggagatgcattgtggagtcgcctccagatggcggcgacggagaccttggctcgaccccgccgctgccgccgccgctgcggtcgccggcggggagcagcagactcccgaacctgagcctggagaagctggacgggatggcatgggtgacagtggtcgagacagcagaagtcctgattcctcttctccgaatccactgcctcagggagtcccgccaccttcccctcctggtcctccactgcccccaagcaccgctccttcactggggggctcgggagcgcccccaccaccccccatgcccccccccccgttaggctcgccgttccccgtgattagctcatctatgggctcacccggacttccccccccggcccctccaggctttagcggccctgtcagtagccctcagatcaactcaaccgtgtccctgcccgggggcgggagcggccctccagaagatgttaaacccccagtccttggcgtgcgtggcctccactgtccacccccgccgggtggaccaggcgccggcaagcgactttgtgccatctgcggcgatcgcagttcaggtaaacattacggtgtgtactcctgcgagggttgcaagggcttcttcaagcgcactatacgcaaggatttgacctattcatgtagagacaataaagattgcacggtcgataaaaggcagagaaaccggtgtcaatactgcagataccagaagtgcctggccactggcatgaagcgggaggctgtccaggaggagagacagagaggtaaagacaaggacggagacggcgaaggagcgggcggcgctccagaggaaatgcccgtcgatagaatcctagaggcagaactggcggttgagcagaagagtgatcagggcgtcgagggtccagggggtaccggaggtagcggctcctcccccaacgatccggtaacaaacatttgtcaggccgcagataagcagttgttcaccctggttgaatgggctaaaagaatcccccatttcagtagtttacctctggatgaccaagtgatcttattgcgcgcaggatggaatgaactgttgattgcaagctttagccatcgatccatcgacgtacgcgatggtatactgctggcgacaggcttacatgttcaccgcaatagcgctcactccgctggcgtcggcgcaatctttgatcgatcactttccagggtgctgacagagctagtgtccaagatgcgggatatgcgaatggacaagaccgaactcggctgcctgagggccatcatcctgttcaacccagacgccaagggattgtctaacccctctgaggtggaggttcttcgtgaaaaggtttatgcttcccttgaaacctactgcaaacagaaatatcctgagcagcagggtaggtttgcaaagctgctgcttcgtctgccggcactacggagcattggcctgaaatgcctcgaacacctgttcttcttcaagctcattggagatactcctatagatacgtttctgatggagatgctggaggctccgcaccaactcgcatag

SEQ ID NO: 269182 - DNA, 1614 bp, Artificial Sequence
  derived and/or modified sequence
atgtcatgggccgcgcgccccccttttctccctcaaagacatgccgctggccagtgcgggcccgtgggagttcgcaaggagatgcattgtggggtggcaagcaggtggcgaagacggaggccatggttggatcccgccgcagcggctgccgccgccgtcgccgggggtgaacagcagacaccagaaccggagccaggagaggccggccgggacgggatgggcgatagcggcagagactctagaagcccagactcctccagccctaacccacttccgcagggagtgccccctcccagtccaccaggaccacccctcccacccagtactgctccatccctggggggctcaggagcccccccaccaccccccatgcctccaccccccttggggtccccctttccagttatatccagctccatgggaagccctggcctcccccctcccgcccccccaggctttagcggtccagtgagcagtcctcagataaatagcacggtgagtctacctgggggcggttccggaccaccagaagatgtgaagcccccagttctgggggtgagaggcctacattgcccaccccccccaggcgggcccggtgctggcaaaagactgtgtgccatttgtggggaccgctcctcaggtaagcattatggagtgtattcttgcgaaggatgcaaaggattttttaagagaacaattagaaaggatttgacatactcctgccgagacaacaaggactgcacagtcgacaagcggcagcgaaaccgctgtcagtactgtagatatcagaagtgtctggctacagggatgaagcgggaggcggtccaagaggaacgccaacgcggaaaagataaagatggcgatggggaaggagctggcggggcccccgaggaaatgccggtggatcgcattttagaggccgagctggccgtggaacagaaaagcgaccagggtgtagaaggccctggcggaacaggaggatccggatcctctcccaatgacccagttaccaatatttgccaggctgcagataagcagcttttcacattagtggagtgggctaagcggatcccacacttttccagcctccccctggacgaccaggtgatactgctcagagcagggtggaacgaacttctgatagcaagtttctctcaccggtctattgatgtgagagatgggattctcttggccaccggtctccacgtccatcgtaactcagcccactcagctggcgtcggggcaattttcgaccgttctctaagtcgggtgctgacagagctcgtgtccaagatgagagacatgagaatggataagacagaactgggctgtctgcgtgccattatcctatttaatcccgatgccaaggggctcagtaatccttctgaggtagaggttctccgggagaaggtttacgccagcctggagacttactgtaagcaaaaatatcctgaacagcaggggcggtttgccaagctgctactgaggctgccagcgctccgatcaatcggattgaaatgtctcgaacatttattcttttttaagcttatcggggacactccaatcgacaccttcctcatggagatgctggaggcccctcaccaacttgcttag

SEQ ID NO: 269183 - DNA, 1614 bp, Artificial Sequence
  derived and/or modified sequence
atgagctgggctgcgcggcccccgtttctgcctcagaggcatgcagctggtcagtgtggacccgtgggggtccggaaggagatgcattgtggggttgcttctcggtggcggcggaggaggccatggcttgatcctgccgccgccgcagccgccgccgtggctgggggcgagcagcagacccctgagccggagcctggggaagcgggcagggatgggatgggcgattcagggcgagacagcaggtcaccagactcgagttcaccaaacccactacctcagggggtgccccctcctagccccccggggcctcctctaccacccagtaccgccccgagcctcggaggttcaggagcccccccaccacctcctatgcctcctccccccttgggttcgccattccccgtgatttcaagcagtatggggagccctgggctacctcctcccgctccccccggtttctcgggtcccgtctccagcccccagattaacagtaccgtttctctgccagggggtggatcgggaccccccgaggacgtcaaaccccctgtgctcggggtgcgcgggctgcattgcccacctccacctggagggcccggagccggcaagcggttgtgcgctatctgtggcgatcgctccagcggcaagcactatggtgtgtactcttgcgagggctgtaagggctttttcaagcggacaattaggaaggaccttacttattcttgccgcgacaataaggattgcacagtagataagcggcagagaaaccggtgccagtactgcagataccagaagtgtctggccaccggcatgaagagagaagcagtgcaggaagagaggcaacgcgggaaagacaaagatggtgatggcgaaggtgctggaggagccccggaagagatgcccgtggataggatcttggaggccgagctagcagtggaacagaagagcgatcagggcgttgagggacccggagggacaggcggatctggttcttcccctaatgaccctgtgacgaatatctgccaagccgctgacaagcaactcttcacactagtggagtgggcaaaaagaatccctcatttctcctccctgccactggacgatcaagtcattctccttagagccggctggaacgagctgcttatcgcttcattctctcaccgctcaattgacgtgagggacggaatactgctagccacaggactgcatgtgcacaggaactctgcccatagcgccggagtaggtgcaatctttgaccgtagtctgtcacgagttctgaccgaacttgtgtcaaaaatgcgggacatgagaatggacaagacagaattgggctgcttgagggccattattctttttaatcctgatgccaagggcctgtccaacccgagtgaggtcgaggtattgagagagaaggtatatgcgtctttggagacttactgcaagcagaagtatccggaacaacagggtcgcttcgctaaactattgcttcgcctgcccgccttgcgatcaattggactgaaatgccttgagcatctgttcttttttaaactgatcggagacacccctatagacactttcctcatggagatgctcgaggcaccccatcagctggcttag

SEQ ID NO: 269184 - DNA, 1614 bp, Artificial Sequence
  derived and/or modified sequence
atgtcctgggccgcccggccccccttcctgccccagagacatgctgctggccagtgtggccctgtgggcgtgaggaaggagatgcactgcggcgtggccagccgctggaggagaagaagaccctggctggaccctgctgctgctgctgctgctgctgtggccggcggggagcagcagaccccagagcctgagcctggagaggccggcagagatggcatgggagacagcggccgggacagccgcagcccagacagcagcagccccaaccccctgccccagggcgtgcccccacccagccccccaggcccccccctgccccccagcacagcccccagcctgggcggcagcggggcccctcctcctccacccatgcctcctccacccctgggcagccccttccctgtgatcagcagctccatgggcagccctggcctgcccccaccagcccctcctggcttcagcggccctgtgagcagcccccagatcaacagcacagtgtccctgcccggcggcggcagcggccccccagaagatgtgaagccccctgtgctgggcgtgcggggcctgcactgccccccacctcctgggggccctggggccggcaagaggctgtgtgccatctgtggggacaggagcagcggcaagcactatggagtgtacagctgtgagggctgcaagggcttcttcaagaggaccatcaggaaggacctgacctacagctgccgggacaacaaggactgcaccgtggacaagaggcagaggaaccgctgccagtactgccgctaccagaagtgcctggccaccggcatgaagcgggaggccgtgcaggaggagcggcagaggggcaaggacaaggatggagatggagagggcgctgggggcgcccctgaggagatgcctgtggaccgcatcctggaggccgagctggccgtggagcagaagagtgaccagggcgtggagggccctgggggcactggaggcagcggcagcagccccaatgaccctgtgaccaacatctgccaggccgctgacaagcagctgttcaccctggtggagtgggccaagaggatcccccacttcagcagcctgcccctggatgaccaggtgatcctgctgcgggccggctggaatgagctgctgattgccagcttcagccacaggagcattgatgtgagagatggcatcctgctggccaccggcctgcacgtgcacagaaattctgcccacagcgctggggtgggcgccatctttgacaggagcctgagccgggtgctgacagagctggtgtccaagatgagggacatgaggatggacaagacagagctgggctgcctgcgggccatcatcctcttcaacccagatgccaagggcctgagcaaccccagcgaggtggaggtgctgcgggagaaggtgtatgccagcctggagacctactgcaagcagaagtacccagagcagcagggccgctttgccaagctgctgctgcggctgcctgccctgcggagcatcggcctgaagtgcctggagcacctgttcttcttcaagctgattggagacacccccatcgacaccttcctgatggagatgctggaggccccccaccagctggcctag

SEQ ID NO: 269185 - DNA, 1614 bp, Artificial Sequence
  derived and/or modified sequence
atgagctgggccgcccggccccccttcctgccccagcggcacgccgctggccaatgcggcccagtgggtgtacgaaaggagatgcactgcggtgtggcatcccgctggaggaggcgccgcccgtggctggaccctgccgctgccgcagccgcggcagtcgcagggggtgagcaacagacgcccgaacctgagccaggcgaggctggcagagacggaatgggcgacagtggaagagacagcaggagtccagactccagctctcccaacccgttgccccagggagttcctcctccatcgcccccaggaccacctcttccaccctccacggccccttccctgggtgggtccggagcacctcctcctccacccatgccccctccccctctggggtccccctttccagtgatttccagctcaatgggttctcccgggctccctccaccagctccgcctgggtttagcgggccagttagttcgccccagataaacagcaccgtgtcgttgcccggaggaggttctgggcctcccgaggatgtcaagccgcccgtgctgggagtcaggggcctgcactgccctcccccgcccggcggacccggtgcaggaaagcggctctgtgccatttgtggggaccgatctagcgggaaacactacggagtgtattcctgcgagggatgtaaaggctttttcaagcgtaccatccggaaggaccttacctattcatgccgagacaacaaggattgcactgtcgacaagcgccagcgcaataggtgtcagtattgccgctaccagaagtgtcttgcaaccgggatgaaacgcgaggcagttcaagaggaaagacagaggggcaaggataaggacggcgacggagaaggcgcaggaggagcccccgaggaaatgcccgtggataggatcctagaagccgagctggcagttgaacagaagtctgaccagggggttgagggaccaggcggcactggcgggtccgggagtagtcccaacgaccctgttaccaacatctgccaggccgcggataaacaactattcaccctggtggagtgggcgaagcgtattccccacttctcctctctcccactcgatgatcaggtgatactcctgcgcgctggttggaacgaactgctaattgcaagtttttcccatcgctcaatcgacgtgcgcgacggcatcttgttggccactgggctccatgttcatcgtaattccgcacattctgccggcgtcggggcaatttttgatcgatccctttctcgcgtattgaccgagctggtaagcaagatgcgggacatgaggatggacaaaactgagctgggatgcctgcgggccataatcctttttaaccctgacgccaaaggcctcagtaaccctagtgaggtggaagtcttgcgcgagaaggtgtacgcctctcttgagacatactgcaaacagaaatatccagaacaacagggacgctttgcgaagttgctccttcgtctccctgccctgcgctctatcggactcaaatgtttggagcatcttttcttttttaaactcataggagatacacctatcgatacatttctgatggaaatgcttgaagcaccccaccagctcgcttag

SEQ ID NO: 269186 - DNA, 1614 bp, Artificial Sequence
  derived and/or modified sequence
atgagctgggccgcccggccccccttcctgccccagcggcacgccgccgggcaatgcggcccagtgggggtcagaaaggaaatgcattgcggggtggcctcacgatggcgcaggcggcgcccctggttggaccctgctgccgcagccgcggccgccgtggccgggggcgagcagcagacccccgaacccgaaccgggcgaagccggccgggacggtatgggggatagcggccgcgatagccggtctcccgactccagctcccctaatccactgcctcagggcgtcccacccccatcgccccccggccctcccctgccgcctagtacagcaccaagcctgggcgggagtggcgcgcctccccctccccccatgccacctccccctctgggttctccctttcccgtaattagttcctcaatgggtagtcccgggctcccccctcccgctccaccaggattctccggtccggtctcctccccccagataaattccactgtgagtttacctgggggcggaagcggtcctccagaggacgtcaagccccccgttttgggggtgcgcggtctacattgccctccgcccccaggcggccccggagctggcaaacgcctttgcgccatatgcggtgatcgcagcagcggcaagcactacggtgtgtacagttgcgaggggtgtaaggggttcttcaagaggacaattaggaaagatctgacgtactcttgcagagataacaaagactgtaccgtggacaaacgccagcggaacaggtgtcagtactgcagatatcagaaatgtctggctaccggcatgaaacgcgaggctgtccaggaggagcggcaacgggggaaggacaaagacggggatggtgagggcgctggcggagcaccagaagaaatgcccgttgataggatcctggaagccgagttggccgtagagcagaaaagtgatcagggggtggaaggcccgggagggactggcggaagcggcagcagccccaacgaccccgtcaccaacatttgccaggcggcagacaagcagctctttacccttgtagagtgggccaaacgaatcccacacttcagcagtctgcctctggacgatcaggtgatcctgttgagggctggctggaatgaactgctgatagcgtccttttcccacaggtccatcgatgtacgcgatgggatcctgctggcaaccgggctccatgtccatagaaacagtgcacactcagccggggtgggcgctattttcgatcgttcactgagtcgcgttctcacagaactcgtgtctaaaatgcgggatatgcgtatggacaaaactgagctcggctgcctaagggccatcattctgtttaatccggatgccaaggggttgagcaatccatcagaggtagaggttctgcgggaaaaggtgtacgcatcattagagacctactgcaagcaaaagtatcccgagcaacagggacgctttgcaaagcttctgttgcgcctgcctgccttaagaagcatcggtcttaagtgcctcgagcacctcttttttttcaagctaataggtgacacccctatagatacatttctaatggaaatgcttgaagctccacatcagctagcttag

SEQ ID NO: 269187 - DNA, 1614 bp, Artificial Sequence
  derived and/or modified sequence
atgagctgggccgcccggccccccttcctgccccagcggcacgccgctgggcagtgtggacctgtaggcgtgagaaaagagatgcattgtggggttgcttcccgttggcggcgcagaaggccctggctggaccctgctgctgctgctgcggctgcagtcgccggaggagaacagcagaccccggagccggagcccggggaggctggccgggacggcatgggcgattcgggtcgcgactccagaagccctgacagctctagcccaaacccactgccacagggcgttccccctccatcacctcctgggccacctctgcccccttccactgctccatcattgggggggagcggcgctccacctccaccccctatgcccccacctcccctcgggtcaccctttccagtcatttcttcatcaatgggctctcccgggctgcctccacctgctcctcctggcttttcaggaccggtgtcttcacctcaaatcaactccacagtgtctctgccagggggggggagcgggccccctgaggatgtaaagccacctgtgctgggagttcgagggctgcactgccctcccccgcccggaggacctggtgccggcaagaggctgtgcgcaatttgcggtgaccggtcatcgggcaaacactatggtgtttattcgtgcgagggctgcaagggattcttcaaacgcacgatacggaaggatcttacatattcctgcagagataacaaggattgtaccgttgacaaaaggcagcggaacagatgtcagtattgcagataccagaagtgcctggccaccggcatgaaaagggaggccgtccaggaggagcgccagcggggaaaagacaaagatggcgatggtgaaggggcaggaggcgctccagaggagatgccagtcgacagaatcctggaagcggaactggctgtggagcagaaaagcgatcagggtgtggaaggacccggtggaacgggcgggagcggctcctcccctaatgaccctgtgacaaatatatgccaagctgcagataaacagctgtttacactcgtagaatgggcgaagcggatcccgcacttttcttcgctacctcttgatgatcaggtgatactgttgagggctggttggaacgagctgctgatcgcctctttttctcaccgctctattgatgttcgagacggcatcctgctggctaccgggcttcatgtgcacaggaactcagcccattccgccggcgtcggagcaatctttgacagatctctgtcacgcgttctgacagaacttgtgagtaagatgagagacatgcgaatggataaaacagagctggggtgcctaagggccattatcctttttaatcccgacgccaaaggtctttcaaaccccagcgaggttgaggttttgagggagaaggtctacgcgtctctggaaacctattgtaagcaaaagtatccagagcagcaggggcgatttgccaaattgctactccgtctgcctgccttgaggtcaattgggctgaaatgccttgaacacttgtttttcttcaagctaattggggatactcccatcgacaccttcctcatggagatgttggaagcgccacaccagctcgcatag

SEQ ID NO: 269188 - DNA, 1614 bp, Artificial Sequence
  derived and/or modified sequence
atgagctgggccgcccggccccccttcctgccccagcggcacgccgccggacagtgtggccctgtaggcgtgcgtaaggagatgcactgtggggtcgcctcacgctggcgccggcgccggccttggctagatcccgctgcagccgctgctgctgctgtagcaggcggagaacagcagactccggaaccagaacccggagaagcgggacgcgatgggatgggagattctggacgagattccagatcgccagactcaagttcaccaaaccctttgccacaaggcgtgccacctccaagcccccccggccccccgctgccgccgagtactgcaccttctctgggaggttccggagctccaccaccaccacccatgcccccaccacccctcggatctccatttcctgtcattagctcttcaatgggcagtcccggtctgccaccaccggctccacctggcttctcaggccccgttagcagccctcagattaatagcactgtctcactacccggcggtggatctggaccacctgaggacgtcaagcctcccgtgttaggtgtcagggggctgcactgtcccccaccacctggagggcctggtgcaggaaagaggctctgtgccatctgtggcgataggtcatccgggaagcactatggagtatatagctgcgagggctgcaaggggttctttaagagaaccatccgtaaggatctcacctattcttgcagagacaataaagattgcactgtcgacaagcggcagcgaaatcggtgtcagtattgcaggtatcagaagtgcctggccacaggtatgaagcgcgaagccgtacaggaagaacgtcaacgcgggaaagataaggacggcgacggggaaggagcaggcggggcaccagaagagatgcccgtagataggatacttgaggctgagctggcagtggaacaaaagagcgaccagggcgtggagggaccaggtggaactggcggctccggaagttctcccaatgatccagtcaccaatatttgtcaggccgcagacaagcagctgttcaccctcgtagagtgggctaagaggatcccccacttttctagtctccccttggacgatcaggtcatcctactgagagctgggtggaacgaacttcttatcgcctcttttagtcaccggagtatagacgtgcgggatggcattcttcttgccacgggcctacacgtgcacaggaattcagcccatagcgcaggcgtcggagctatttttgacagatcattgtcacgagtgttgacagaattggtctctaaaatgagggacatgcggatggacaagacagagctgggctgccttcgggccatcatcctgttcaaccccgacgccaagggcttgtcaaaccctagcgaggtggaagttcttagagaaaaggtttatgcatctctcgaaacctactgtaaacaaaagtaccccgagcagcaggggagattcgccaagttgcttttgcgactccctgcgttacgctctatcggattgaagtgcctggagcacttgtttttttttaaactaatcggcgacaccccaattgacactttccttatggaaatgctggaggctccccaccaactggcttag

SEQ ID NO: 269189 - DNA, 1614 bp, Artificial Sequence
  derived and/or modified sequence
atgagctgggccgcccggccccccttcctgccccagcggcacgccgccggccagtgcggacccgttggcgtcaggaaggaaatgcattgtggcgttgctagcagatggagaagacgcagaccttggctggacccagccgccgctgccgctgctgccgtcgccggcggcgaacagcaaactccagagcccgagccgggagaagccggtagggacgggatgggagatagtggacgcgatagccggagcccagattcttcaagtccgaatcctctgccccagggcgttcctcctcctagcccccctgggccccccctgccccccagtactgccccctccctcggcggcagcggcgcccctcccccccctcctatgcccccaccgcccctcgggtcaccattcccagtcatctctagttcaatgggtagcccaggcttgcctcctccagctccacctgggttcagtggtccagtgtctagcccacaaatcaacagtaccgtgagccttcccggcggaggaagcggaccaccagaggatgtaaaaccccccgtgctgggcgttcgtggcctgcattgtccacctccgccaggtggccctggagccggtaagcgcctatgtgcgatttgcggcgataggagctctggtaaacactacggggtttatagctgcgagggctgcaaggggttctttaagcggaccatcagaaaggacctgacctacagctgcagggacaacaaagattgtactgtcgataagcgtcaacgaaataggtgtcagtattgtagatatcaaaaatgcctagcgaccgggatgaagcgggaagccgtgcaggaagagcgacagcgtgggaaagataaggatggagacggggaaggagcagggggcgcccccgaggagatgccagttgaccgaatcttagaagctgagttggcggtggagcagaagagcgaccagggagttgagggcccgggcggaactggtggctccgggagcagtccaaacgaccccgtgactaatatttgccaagccgctgacaaacagctgttcactctggttgaatgggctaagagaatccctcacttttccagtctgccgctggatgaccaggtgattttactgcgggccgggtggaatgagctattgattgcgtccttctcccacagatcaattgacgttcgagatggcattctcctggcaacaggcctacatgtacatcgcaactctgcccattccgccggcgtaggtgctatctttgatagatccttgtctagagtgctcacagagctcgtgagcaaaatgagagacatgaggatggataaaactgaactcggttgtctgagagctattatattatttaatcccgacgctaaggggctctcaaacccgagtgaagtggaggtgctgcgtgagaaggtttatgcctcgctggagacgtattgcaaacagaaatacccagagcagcagggtcgcttcgctaagctgctcttgcgcctgcccgcacttaggtccatcggccttaaatgcctggagcatttgtttttcttcaaactcattggagacacccccatcgacacattcctgatggaaatgctggaggcgccacatcagcttgcctag

SEQ ID NO: 269190 - DNA, 1614 bp, Artificial Sequence
  derived and/or modified sequence
atgagctgggccgcccggccccccttcctgccccagcggcacgccgcaggacagtgtgggcctgtcggtgtgagaaaggaaatgcattgcggagtcgcatccagatggagacggcggcggccctggctggatccagccgccgccgcggccgcggccgtcgccggaggggagcaacaaactccagagccagagcccggcgaggcagggagagatggaatgggtgatagtgggcgtgactctcgatcaccagatagctccagcccaaatccacttcctcaaggggttcccccacccagtcctcccggcccacctttgcctccctcaacggccccctctctcggcggcagcggggcaccacctccccccccgatgcctccgccgccacttggcagccctttcccggttatctcctctagtatgggatcgcctggtctgcctcctcctgccccgcccggtttttctgggcctgttagttcaccgcagatcaactctactgtgtccctgccaggaggcggatccgggccaccggaagacgtcaaacctcccgttttgggcgtccgcgggcttcactgtccgcccccgcccggggggcctggtgcaggtaagcgcctctgtgcaatatgcggtgatcggagttcagggaagcactacggggtgtactcttgcgaggggtgtaagggattcttcaaacgcacaatccgcaaggacctcacatactcatgcagagataacaaggactgtacagtggataagcggcagcgaaacagatgtcagtattgtaggtaccagaaatgcttggctaccggcatgaagcgcgaggccgtacaagaggaacggcaacggggcaaggacaaagacggggacggtgagggggcgggcggggcccctgaggagatgcccgttgacagaattcttgaagctgagctggccgtggaacagaaatcagatcaaggcgtcgaggggcccggtgggaccgggggtagcggctcaagcccaaacgatcccgttaccaatatctgccaggcggcagataaacagctttttacacttgtggagtgggcaaaacgaattccacactttagttccctgcccctagatgatcaggtgatactcctgcgcgcaggatggaatgagctactaatagcgagcttcagtcacagaagcatcgacgtaagggatggaatcctgttggcgaccggtctgcatgtacatcggaattcagctcacagcgcaggtgtcggagctattttcgatagatccctgagcagagtattgactgagttagtgtccaaaatgagggacatgcgcatggacaaaacggaactcggatgcctgcgtgctatcatccttttcaatccggatgctaagggcctgagtaacccctccgaggtggaggttcttcgggagaaggtgtatgccagcttggaaacttattgcaagcagaagtaccctgagcaacaggggcggtttgccaagctactgttacgattgccagcacttcggtcaatcggcttgaaatgtttggaacacctctttttcttcaaacttataggtgatacaccaattgatacctttctaatggaaatgttagaggccccccatcaactggcatag

SEQ ID NO: 269191 - DNA, 1614 bp, Artificial Sequence
  derived and/or modified sequence
atgagctgggctgccagacctccatttctgccccagagacatgctgcagggcagtgtggcccagtcggcgtgcggaaggaaatgcattgcggagtagcgtcgaggtggcggcgacgacgcccatggctagaccctgccgcagcagcggcagctgccgtcgccggtggggagcaacagaccccagaacctgaaccaggggaggccggacgggacggaatgggcgactccggaagggactccagatccccagattctagttctcctaaccctctaccgcagggggtaccccctccatccccccctgggccacctcttcctccgtccactgccccatctctcggtggaagtggggctccgccaccacccccaatgcctccccctcccctgggaagtccgtttcccgtcatctcttcttccatgggaagtcctggtctcccacctcccgctcctcctggattcagcgggccagtgagcagtccacagattaatagtaccgtcagtctgcctggaggcggaagtgggcctcccgaggatgtgaaacccccagtgttaggcgtgagaggccttcattgcccgcctcctccagggggtcccggtgccggtaaacgtctatgcgcaatctgcggcgataggtcttctggtaagcattacggggtgtacagctgcgaagggtgcaagggcttcttcaaacggaccatccgcaaggatctgacctactcctgtagagacaacaaggactgcacagtggataagcggcaacgaaaccgctgccagtactgcagataccagaagtgccttgcaacagggatgaaacgggaggcagtgcaggaagaacgacagcggggaaaagataaggatggagatggagaaggggctggcggagctccagaggaaatgcctgtagatagaatactggaggcagagctggcagtagagcagaagagcgaccagggagttgagggcccagggggaaccggagggagtggttcgtctcctaatgaccctgttacaaacatatgccaagcagcagataagcagttatttaccctggtagaatgggcaaagcgaatacctcatttctcaagcctaccgctcgatgatcaggtcattctcctgagagctggttggaatgagctgctcatcgcatccttctctcatcgaagtattgatgtgcgggatggaattctgttggctaccggcctccacgtgcataggaacagcgcccatagcgccggagttggagccatctttgacagatcattatcacgtgtgctcaccgaactggtctcaaaaatgcgggatatgcgcatggacaagacggagctagggtgtctacgcgcaatcattctctttaacccagacgccaaaggactaagcaatccatccgaggtggaggtactgagggagaaagtttatgcaagtctggaaacctactgtaagcaaaagtacccagagcaacagggcaggtttgcaaaactgctcctgcgcttgccagcactccgctcaattgggttaaagtgcctggagcacctgttttttttcaagttaattggtgatacgccaatcgacactttcttgatggagatgctggaagctccccatcagctcgcttag

SEQ ID NO: 269192 - DNA, 1614 bp, Artificial Sequence
  derived and/or modified sequence
atgtcttgggccgctagaccgcctttcctcccgcaaaggcatgccgcaggtcaatgtggccctgttggagtccgcaaagagatgcattgtggcgtcgctagtcgttggagacggagacggccttggctggatcctgctgcagcagccgctgccgctgtcgccggaggcgagcagcaaacgcctgagcctgaaccaggagaggctggcagagacggaatgggggattcaggcagagacagccgctctccagacagctcctccccaaatcctctcccacaaggcgtgcctcccccatctccaccagggccacccctgcctccaagtaccgctcctagtttagggggatccggtgcacctccccctccccctatgcctcccccacccttaggcagtcctttccccgtgatttctagctcgatgggctcaccaggactaccaccccctgcgcctccgggttttagcggcccagtgagttctccgcagatcaacagcacagtttcactgcctggtgggggatccgggcctccggaggatgtaaagcccccagtgttgggtgttaggggcctccattgccccccaccacccggaggcccaggcgcagggaaacgactgtgcgccatctgcggagatagatcgtcaggcaagcattacggcgtttattcgtgtgaaggctgtaagggttttttcaagaggacaattcgcaaggatcttacgtactcttgtcgagacaacaaggattgcacggtcgataagagacagcgcaacagatgtcagtactgcaggtaccagaagtgcttagccaccgggatgaagagggaagccgtccaggaggagcgtcagcgaggcaaggacaaggatggagacggcgaaggcgctggtggagccccagaggagatgcccgtggatcggattttagaagctgagctggcagtggagcagaaatcagatcagggcgtggagggccctgggggtacagggggaagcgggtcttctcccaatgatcctgttactaacatttgccaggccgctgacaagcagctatttacgttagtagaatgggccaagaggattcctcacttttcttcgttgcccctcgatgaccaggttatacttctcagggctggatggaacgagctgctcattgcttccttcagccacaggagcatcgacgtaagggatggtatcctcctcgctacgggtttgcacgtgcaccgaaacagtgctcattcggctggcgtcggggctatcttcgaccgcagcctctctagggtgctgacagagctggtgtcaaagatgcgggatatgcggatggacaaaacagagttggggtgtctgagggctatcatactgtttaatcccgacgccaaaggtctgtctaacccttccgaggtcgaggttctccgcgaaaaggtgtacgcaagtcttgaaacatactgtaagcagaagtaccctgagcagcagggcaggtttgccaagctgctgctccgcctccctgcactgaggagtattgggctaaagtgcctcgaacacctgtttttcttcaaacttatcggggacactcccatcgatacttttctcatggaaatgctagaggccccacaccagcttgcttag

SEQ ID NO: 269193 - DNA, 1614 bp, Artificial Sequence
  derived and/or modified sequence
atgagctgggccgcacgcccaccgtttctgccacagaggcacgcggcagggcagtgcggtcccgtgggggttcgcaaggaaatgcactgtggcgtagccagccggtggcgcaggaggaggccgtggttagacccggcagccgctgctgccgctgctgtcgcaggtggcgaacaacaaactcccgagcctgaaccaggcgaggctggcagggatgggatgggggatagcggacgagactccagatccccagacagctcgagtccaaaccccctcccccagggagtcccgcctcctagcccaccagggccacccctccctcccagcacagccccttcattaggtggttccggtgcccctccgccaccccctatgccgcctcctcccctgggtagcccatttcccgtgatcagttcttccatgggctcccctggcctgcctccccctgcgccaccaggctttagtggaccagtgagcagccctcaaataaactctacggtgtcactgcctgggggtggctctggacctcctgaggacgtgaagccgcctgtgttgggagtccgcggtctgcattgtccaccaccacccggtggtcccggagcagggaaacgattatgcgctatctgcggagaccgcagttctggaaaacattatggagtatatagctgtgaagggtgtaagggcttttttaagcgaactatccgtaaagacctcacatactcttgcagagacaataaagactgtacagtagacaaacggcagaggaaccgttgtcagtattgcaggtatcagaaatgtttggccactggaatgaaacgggaagcagtccaggaggagaggcaacgcggtaaagacaaagatggtgacggggagggcgctggcggagccccagaagaaatgccagtggaccgcattctcgaggccgaacttgcagtggaacagaagtcggatcaaggtgtggaaggaccaggagggacaggtggatcgggaagttctccaaatgacccagtgaccaacatttgccaggctgcagataagcagttattcactttggtggagtgggcaaaacgtatccctcacttcagtagtttgcccctcgacgaccaggttatcctgctcagagctggttggaacgagttactgatcgcatcgttctcacaccgcagtatcgacgtgcgtgacggaatcctccttgcaaccgggttacacgttcatcgaaattctgctcacagtgctggtgtgggggcaattttcgaccggtccttgagcagagttttgacggagctcgttagtaaaatgcgtgacatgcggatggacaagacagagctggggtgtttgagagctattatcctgtttaaccccgatgccaagggcctatccaatcccagcgaggttgaagtgttacgcgaaaaggtgtacgctagccttgaaacctactgtaaacagaagtacccggagcagcaaggtcgcttcgcaaaacttcttcttagattgcctgccctgcgcagcataggtctgaagtgcctggagcatcttttctttttcaaactgattggggatacaccaatcgatactttccttatggaaatgttggaagctccccaccagctagcgtag

SEQ ID NO: 269194 - DNA, 1614 bp, Artificial Sequence
  derived and/or modified sequence
atgagctgggccgctaggcccccatttctccctcagcgacacgcagctgggcagtgcggaccggtcggagtcagaaaggagatgcattgtggcgttgcaagccgatggcgtcgaagaagaccatggctggatcccgcagcagccgctgccgcagctgtcgcgggtggcgaacagcagacacccgaaccggaacctggtgaggcagggcgagacggcatgggggattccgggcgagatagccggagtcctgattcgagcagtccaaacccccttccccagggcgtgccccctccatcaccacccggtccaccccttcccccttcaaccgctccaagtttaggtggaagcggcgcacctccccctcctccaatgccaccccctcctcttggctctcccttcccagtgatatcatcatctatgggaagccccggtctccctcccccagcgcctcccggtttctccggcccagtcagttctcctcagataaatagcaccgtgtcccttcccggtggagggtcgggcccaccagaagatgtcaagcctcctgtcttaggggtgaggggtcttcactgcccaccccctcccggtggtccaggagctggtaagcggctgtgcgctatatgcggagatagaagctcagggaagcactatggggtctatagttgtgagggctgcaagggattcttcaagagaacgattcggaaggatcttacctactcatgtcgcgacaataaggactgcactgtggataagcgtcagaggaacagatgccaatattgccgctaccagaaatgcctggcaacaggaatgaagcgtgaagctgttcaagaggagagacagcgtggaaaagataaagatggtgatggagagggtgccggtggtgccccagaggaaatgcccgtcgatcgcatcctcgaggccgaattggccgtggaacagaagtccgaccagggagttgaaggaccaggaggtactggcggtagtgggtcctcaccaaatgatcctgtgaccaatatctgccaagctgcagataagcagctatttactctggtggagtgggccaaacgaattccccatttcagtagcttgccactggatgaccaggttatactgctcagagctggttggaatgagctgctcatcgctagctttagtcaccgctccatcgatgttagagacggaatcctgctggctacgggactccatgtgcatcgtaattccgctcactctgcaggagttggtgcaatattcgataggagcttatcacgcgttctcacggaactggtgtcaaagatgagagacatgcgcatggacaaaactgaactagggtgcctaagggcgatcatcctgtttaatcccgatgccaagggcctctccaatccatccgaagtggaggtactcagggagaaggtctacgcctccctcgagacttactgcaaacagaagtacccagagcaacaagggaggttcgctaagcttctgcttcgactgccagccctgaggtccatcgggctcaagtgcctggaacacctgttcttctttaaactgatcggggatacgcctattgacaccttcctgatggaaatgttggaggcacctcaccagcttgcctag

SEQ ID NO: 269195 - DNA, 1614 bp, Artificial Sequence
  derived and/or modified sequence
atgtcctgggccgcacgcccacccttcctgccacaacgacatgccgcaggtcagtgtgggcctgttggcgtacgtaaggagatgcactgtggggtcgcaagtcgatggaggcggagacggccatggctggacccggctgctgcagccgctgctgccgtggccggaggcgaacagcagacaccagagcccgaaccgggagaagcgggaagggatgggatgggcgactcgggccgtgacagccgatcccctgactcatccagccccaatccactcccccagggcgttcctcccccaagccctcctggaccacccctgcccccatcaaccgcaccctctcttgggggttcaggtgctccccctccgccaccgatgccgcctccgcctctggggagtccctttcctgtaatttcctcctccatggggagccctgggttacctccacccgctccacctgggttcagcggccctgtcagctctccccaaatcaatagcaccgtctcgctgcctggcggaggcagcgggccacctgaggatgtgaagcccccagtattgggcgtgcgcggattgcattgcccaccacctcctgggggtcccggagccggtaagcgtctgtgcgctatttgtggagatcgcagctccggaaagcactatggcgtctattcatgcgagggctgtaagggattctttaagagaactattagaaaggacttgacctatagctgccgagataataaggactgcaccgtagataaaaggcagagaaaccgctgccagtactgccggtaccagaaatgcttggccacaggaatgaaaagggaggccgtccaggaagaaaggcagcggggtaaggacaaggatggcgacggtgaaggagctggcggtgccccagaggagatgccagtagaccgaatactagaagcagagctggcggtggaacagaagagtgaccaaggagtggagggtcctggaggaaccggagggtccggatcgagcccgaacgaccccgtgaccaacatttgccaggccgcagataagcagctctttaccctggtggagtgggcaaaacgcattccacacttctcaagcctgcccttggatgaccaggtgatcctcctgcgggcaggttggaatgagctgctcattgcctccttttcgcaccgtagtattgacgtgagggatggaatactgttggcaaccggccttcacgtgcaccggaattccgcacactccgcaggcgtgggagccatattcgatcggtcactctcaagggtcctaaccgagctggtgagcaagatgagggatatgcggatggacaagacagagctgggctgcttgagggcgatcattctcttcaatcccgacgcaaagggactgtcaaatccctctgaggttgaggtgcttcgggaaaaagtgtacgccagcctggagacctactgtaaacagaagtaccctgagcaacaagggcgattcgccaagttgctcctgcgccttccagccctgaggtccatcggtcttaagtgtctcgagcacctgttcttctttaaacttatcggggatactccgatagatacatttttgatggaaatgcttgaggccccacaccagcttgcctag

SEQ ID NO: 269196 - DNA, 1614 bp, Artificial Sequence
  derived and/or modified sequence
atgagctgggccgctcgcccaccctttcttccccagcgtcacgcagccggacagtgtggtcccgtgggggtgaggaaagagatgcactgtggtgtggcgtctcggtggcgacgcaggagaccctggctggatcccgctgctgctgcagcagctgcagtggctgggggtgagcagcagactcccgaaccagaaccaggagaggccggacgggatggtatgggagacagtggacgagactcaagaagccctgattcatcctcccccaatccattgccccagggagtccctcccccatcacctccaggccctcccctcccgccatccaccgcaccttcacttggaggtagcggtgcaccaccccctcctcctatgccaccaccacctctcggcagtccattccctgtcatttcctcaagcatggggtctcccggtctgccacctccagcacccccaggctttagtggcccagtatcttcaccacagatcaattcaacagtctccttgcccggaggaggcagtgggcctcccgaggatgtgaaacctccagtattgggtgtgcgagggttgcactgccctccgccaccaggcggacctggtgctggaaaacggctctgcgccatttgtggcgacaggagctcaggaaaacattacggagtatatagctgcgagggctgcaagggcttttttaagcggacaattcgcaaggatctgacttattcctgcagagacaataaggactgtactgttgataagaggcagcgtaaccggtgccagtattgcagatatcaaaagtgtctggccacaggaatgaagcgtgaagcggtgcaggaggagcggcagcggggaaaggataaagatggtgacggtgagggcgctggaggtgcccctgaagagatgcctgtcgatcgaatcctcgaggctgaactcgccgtggaacagaagtctgaccagggtgttgaaggtccgggaggcacaggtggaagtggcagtagccctaacgaccccgtgactaacatttgtcaggccgcagacaaacagctgttcactcttgttgaatgggcaaagcggattccccacttttcctccctcccattggacgaccaggtaatcctccttcgtgccggttggaacgaactcctgatcgcttcgttcagccacagaagtattgatgtgcgggatggaatcctcttggcaaccggcctgcatgtccaccgaaattccgcccattcagccggagtcggcgcaatctttgataggtcactgtccagagttctcacagaactggtatctaagatgcgggacatgagaatggataagactgagctcgggtgtcttagggccatcatcctcttcaaccctgatgccaagggactctcaaatccaagtgaagtggaggtgttgcgcgaaaaagtgtatgcatcccttgagacatattgtaagcagaagtatcctgaacagcagggacgattcgctaagttgttgcttaggctacccgctttgcggagcattggtcttaaatgtctggagcatctgttttttttcaagctaatcggcgataccccaatagatacattccttatggagatgctggaggcccctcatcagctggcatag

SEQ ID NO: 269197 - DNA, 2846 bp, Artificial Sequence
  derived and/or modified sequence
gcagagcgacgggcttaattcgacccaatccaggccagagtctttctctcaggggcttcctcgtgctcagctaatcctccgatcaatccttgggaatccctgggacctcttcggtatccctactctcagccagggatcatgtcttgggccgctcgcccgcccttcctccctcagcggcatgccgcagggcagtgtgggccggtgggggtgcgaaaagaaatgcattgtggggtcgcgtcccggtggcggcggcgacggccctggctggatcccgcagcggcggcggcggcggcggtggcaggcggagaacaacaaaccccggagccggagccaggggaggctggacgggacgggatgggcgacagcgggcgggactcccgaagcccagacagctcctccccaaatccccttccccagggagtccctcccccttctcctcctgggccacccctacccccttcaacagctccatcccttggaggctctggggccccacccccacccccgatgccaccacccccactgggctctccctttccagtcatcagttcttccatggggtcccctggtctgccccctccagctcccccaggattctccgggcctgtcagcagcccccagattaactcaacagtgtcactccctgggggtgggtctggcccccctgaagatgtgaagccaccagtcttaggggtccggggcctgcactgtccaccccctccaggtggccctggggctggcaaacggctatgtgcaatctgcggggacagaagctcaggcaaacactacggggtttacagctgtgagggttgcaagggcttcttcaaacgcaccatccgcaaagaccttacatactcttgccgggacaacaaagactgcacagtggacaagcgccagcggaaccgctgtcagtactgccgctatcagaagtgcctggccactggcatgaagagggaggcggtacaggaggagcgtcagcggggaaaggacaaggatggggatggggagggggctgggggagcccccgaggagatgcctgtggacaggatcctggaggcagagcttgctgtggaacagaagagtgaccagggcgttgagggtcctgggggaaccgggggtagcggcagcagcccaaatgaccctgtgactaacatctgtcaggcagctgacaaacagctattcacgcttgttgagtgggcgaagaggatcccacacttttcctccttgcctctggatgatcaggtcatattgctgcgggcaggctggaatgaactcctcattgcctccttctcacaccgatccattgatgttcgagatggcatcctccttgccacaggtcttcacgtgcaccgcaactcagcccattcagcaggagtaggagccatctttgatcggtccctctccagggtgctgacagagctagtgtccaaaatgcgtgacatgaggatggacaagacagagcttggctgcctgagggcaatcattctgtttaatccagatgccaagggcctctccaaccctagtgaggtggaggtcctgcgggagaaagtgtatgcatcactggagacctactgcaaacagaagtaccctgagcagcagggacggtttgccaagctgctgctacgtcttcctgccctccggtccattggccttaagtgtctagagcatctgtttttcttcaagctcattggtgacacccccatcgacaccttcctcatggagatgcttgaggctccccatcaactggcctgagctcagacccagacgtggtgcttctcacactggaggagcacacatccaagagggactccaagccctggggcagggtggggggccatgttcccagaaccttgatggggtgagaagtacagggcagaaccaagaacataaaccctccaagggatctgcttgatatcccaagttggaagggaccccagatacctgtgaggactggttgtctctcttcggtggccttgagtctctgaatttgtcgggttctcccatgatttggggtgatttctcaccctctgtccttcccccagcacaaagcactggccttgcctccaggaccttgcttccttctcatcttgcctcattttgcttcccatctgaagagtggaaatggggaactcccccagaggtggatactggggggcaggcctcccaagctgatggacatgagagtagggccctgacaggccttcctcctctcaaacctggcagatgggggcctctctggaagagggaggggccctgtcactgtccagagtctctttttacacttcacctccttctgcagtcagactgaaatataaaaaaggtggtggtggtggtgaaggggctggtggagatgtaggaaccgatctgctatttttaatttcctgtgaggatagagacttgcagttagactcaaagaagtactgtactttcccaggttgactaagaaatgccagtggtggaggtgggtgtttgggaaaggcagggccctgaaatggcctgtccctagggctctccaagcactagccttcccagcttcccgccgccccccctatctcttcctgtctaacttggggaaggggcctgggctgtgaggacagggcccccacaggggatggtttcacgagtgtagtcccggaggccttccctttacagctctcctccagccctgggcacatagcataggctggggacacaggatcctggcctgagaattgaggggaggtggccagcccgcagaggtggggtgctggggctgcatgatttttgccctgcgtcccttctctttggggctcctttcccctctcatacataaaatcgctttcaaattaaaatcgctgttttctgga

SEQ ID NO: 269198 - DNA, 2832 bp, Artificial Sequence
  derived and/or modified sequence
gcagagcgacgggcttaattcgacccaatccaggccagagtctttctctcaggggcttcctcgtgctcagctaatcctccgatcaatccttgggaatccctgggacctcttcggtatccctactctcagccagggatcatgtcttgggccgctcgcccgcccttcctccctcagcggcatgccgcagggcagtgtgggccggtgggggtgcgaaaagaaatgcattgtggggtcgcgtcccggtggcggcggcgacggccctggctggatcccgcagcggcggcggcggcggcggtggcaggcggagaacaacaaaccccggagccggagccaggggaggctggacgggacgggatgggcgacagcgggcgggactcccgaagcccagacagctcctccccaaatccccttccccagggagtccctcccccttctcctcctgggccacccctacccccttcaacagctccatcccttggaggctctggggccccacccccacccccgatgccaccacccccactgggctctccctttccagtcatcagttcttccatggggtcccctggtctgccccctccagctcccccaggattctccgggcctgtcagcagcccccagattaactcaacagtgtcactccctgggggtgggtctggcccccctgaagatgtgaagccaccagtcttaggggtccggggcctgcactgtccaccccctccaggtggccctggggctggcaaacggctatgtgcaatctgcggggacagaagctcaggcaaacactacggggtttacagctgtgagggttgcaagggcttcttcaaacgcaccatccgcaaagaccttacatactcttgccgggacaacaaagactgcacagtggacaagcgccagcggaaccgctgtcagtactgccgctatcagaagtgcctggccactggcatgaagagggaggcggtacaggaggagcgtcagcggggaaaggacaaggatggggatggggagggggctgggggagcccccgaggagatgcctgtggacaggatcctggaggcagagcttgctgtggaacagaagagtgaccagggcgttgagggtcctgggggaaccgggggtagcggcagcagcccaaatgaccctgtgactaacatctgtcaggcagctgacaaacagctattcacgcttgttgagtgggcgaagaggatcccacacttttcctccttgcctctggatgatcaggtcatattgctgcgggcaggctggaatgaactcctcattgcctccttttcacaccgatccattgatgttcgagatggcatcctccttgccacaggtcttcacgtgcaccgcaactcagcccattcagcaggagtaggagccatctttgatcggtccctctccagggtgctgacagagctagtgtccaaaatgcgtgacatgaggatggacaagacagagcttggctgcctgagggcaatcattctgtttaatccagatgccaagggcctctccaaccctagtgaggtggaggtcctgcgggagaaagtgtatgcatcactggagacctactgcaaacagaagtaccctgagcagcagggacggtttgccaagctgctgctacgtcttcctgccctccggtccattggccttaagtgtctagagcatctgtttttcttcaagctcattggtgacacccccatcgacaccttcctcatggagatgcttgaggctccccatcaactggcctgagctcagacccagacgtggtgcttctcacactggaggagcacacatccaagagggactccaagccctggggcagggtggggggccatgttcccagaaccttgatggggtgagaagtacagggcagaaccaagaacataaaccctccaagggatctgcttgatatcccaagttggaagggaccccagatacctgtgaggactggttgtctctcttcggtggccttgagtctctgaatttgtcggggtctcccatgatttggggtgatttctcaccctctgtccttcccccagcacaaagcactggccttgcctccaggaccttgcttccttctcatcttgcctcattttgcttcccatctgaagagtggaaatggggatctcccccagaggtggatactggggggcaggcctcccaagctgatggacatgagagtagggccctgacaggccttcctcctctcaaacctggcagatgggggcctctctggaagagggaggggccctgtcactgtccagagtctctttttacacttcacctccttctgcagtcagactgaaatataaaaaaggtggtggtggtggtgaaggggctggtggagatgtaggaaccgatctgctatttttaatttcctgtgaggatagagacttgcagttagactcaaagaagtactgtactttcccaggttgactaagaaatgccagtggtggaggtgggtgtttgggaaaggcagggccctgaaatggcctgtccctagggctctccaagcactagccttcccagcttcccgccgcccccccccatctcttcctgtctaacttggggaaggggcctgggctgtgaggacagggcccccacaggggatggtttcacgagtgtagtcccggaggccttccctttacagctctcctccagccctgggcacatagcataggctggggacacaggatcctggcctgagaattgaggggaggtggccagcccgcagaggtggggtgctggggctgcatgatttttgccctgcgtcccttctctttggggctcctttcccctctcatacataaaatcgctttcaaattaaaa

SEQ ID NO: 269199 - DNA, 2846 bp, Artificial Sequence
  derived and/or modified sequence
gcagagcgacgggcttaattcgacccaatccaggccagagtctttctctcaggggcttcctcgtgctcagctaatcctccgatcaatccttgggaatccctgggacctcttcggtatccctactctcagccagggatcatgtcttgggccgctcgcccgcccttcctccctcagcggcatgccgcagggcagtgtgggccggtgggggtgcgaaaagaaatgcattgtggggtcgcgtcccggtggcggcggcgacggccctggctggatcccgcagcggcggcggcggcggcggtggcaggcggagaacaacaaaccccggagccggagccaggggaggctggacgggacgggatgggcgacagcgggcgggactcccgaagcccagacagctcctccccaaatccccttccccagggagtccctcccccttctcctcctgggccacccctacccccttcaacagctccatcccttggaggctctggggccccacccccacccccgatgccaccacccccactgggctctccctttccagtcatcagttcttccatggggtcccctggtctgccccctccagctcccccaggattctccgggcctgtcagcagcccccagattaactcaacagtgtcactccctgggggtgggtctggcccccctgaagatgtgaagccaccagtcttaggggtccggggcctgcactgtccaccccctccaggtggccctggggctggcaaacggctatgtgcaatctgcggggacagaagctcaggcaaacactacggggtttacagctgtgagggttgcaagggcttcttcaaacgcaccatccgcaaagaccttacatactcttgccgggacaacaaagactgcacagtggacaagcgccagcggaaccgctgtcagtactgccgctatcagaagtgcctggccactggcatgaagagggaggcggtacaggaggagcgtcagcggggaaaggacaaggatggggatggggagggggctgggggagcccccgaggagatgcctgtggacaggatcctggaggcagagcttgctgtggaacagaagagtgaccagggcgttgagggtcctgggggaaccgggggtagcggcagcagcccaaatgaccctgtgactaacatctgtcaggcagctgacaaacagctattcacgcttgttgagtgggcgaagaggatcccacacttttcctccttgcctctggatgatcaggtcatattgctgcgggcaggctggaatgaactcctcattgcctccttttcacaccgatccattgatgttcgagatggcatcctccttgccacaggtcttcacgtgcaccgcaactcagcccattcagcaggagtaggagccatctttgatcggtccctctccagggtgctgacagagctagtgtccaaaatgcgtgacatgaggatggacaagacagagcttggctgcctgagggcaatcattctgtttaatccagatgccaagggcctctccaaccctagtgaggtggaggtcctgcgggagaaagtgtatgcatcactggagacctactgcaaacagaagtaccctgagcagcagggacggtttgccaagctgctgctacgtcttcctgccctccggtccattggccttaagtgtctagagcatctgtttttcttcaagctcattggtgacacccccatcgacaccttcctcatggagatgcttgaggctccccatcaactggcctgagctcagacccagacgtggtgcttctcacactggaggagcacacatccaagagggactccaagccctggggcagggtggggggccatgttcccagaaccttgatggggtgagaagtacagggcagaaccaagaacataaaccctccaagggatctgcttgatatcccaagttggaagggaccccagatacctgtgaggactggttgtctctcttcggtggccttgagtctctgaatttgtcggggtctcccatgatttggggtgatttctcaccctctgtccttcccccagcacaaagcactggccttgcctccaggaccttgcttccttctcatcttgcctcattttgcttcccatctgaagagtggaaatggggatctcccccagaggtggatactggggggcaggcctcccaagctgatggacatgagagtagggccctgacaggccttcctcctctcaaacctggcagatgggggcctctctggaagagggaggggccctgtcactgtccagagtctctttttacacttcacctccttctgcagtcagactgaaatataaaaaaggtggtggtggtggtgaaggggctggtggagatgtaggaaccgatctgctatttttaatttcctgtgaggatagagacttgcagttagactcaaagaagtactgtactttcccaggttgactaagaaatgccagtggtggaggtgggtgtttgggaaaggcagggccctgaaatggcctgtccctagggctctccaagcactagccttcccagcttcccgccgccccccccatctcttcctgtctaacttggggaaggggcctgggctgtgaggacagggcccccacaggggatggtttcacgagtgtagtcccggaggccttccctttacagctctcctccagccctgggcacatagcataggctggggacacaggatcctggcctgagaattgaggggaggtggccagcccgcagaggtggggtgctggggctgcatgatttttgccctgcgtcccttctctttggggctcctttcccctctcatacataaaatcgctttcaaattaaaatcgctgttttctgga

SEQ ID NO: 269200 - DNA, 2846 bp, Artificial Sequence
  derived and/or modified sequence
gcagagcgacgggcttaattcgacccaatccaggccagagtctttctctcaggggcttcctcgtgctcagctaatcctccgatcaatccttgggaatccctgggacctcttcggtatccctactctcagccagggatcatgtcttgggccgctcgcccgcccttcctccctcagcggcatgccgcagggcagtgtgggccggtgggggtgcgaaaagaaatgcattgtggggtcgcgtcccggtggcggcggcgacggccctggctggatcccgcagcggcggcggcggcggcggtggcaggcggagaacaacaaaccccggagccggagccaggggaggctggacgggacgggatgggcgacagcgggcgggactcccgaagcccagacagctcctccccaaatccccttccccagggagtccctcccccttctcctcctgggccacccctacccccttcaacagctccatcccttggaggctctggggccccacccccacccccgatgccaccacccccactgggctctccctttccagtcatcagttcttccatggggtcccctggtctgccccctccagctcccccaggattctccgggcctgtcagcagcccccagattaactcaacagtgtcactccctgggggtgggtctggcccccctgaagatgtgaagccaccagtcttaggggtccggggcctgcactgtccaccccctccaggtggccctggggctggcaaacggctatgtgcaatctgcggggacagaagctcaggcaaacactacggggtttacagctgtgagggttgcaagggcttcttcaaacgcaccatccgcaaagaccttacatactcttgccgggacaacaaagactgcacagtggacaagcgccagcggaaccgctgtcagtactgccgctatcagaagtgcctggccactggcatgaagagggaggcggtacaggaggagcgtcagcggggaaaggacaaggatggggatggggagggggctgggggagcccccgaggagatgcctgtggacaggatcctggaggcagagcttgctgtggaacagaagagtgaccagggcgttgagggtcctgggggaaccgggggtagcggcagcagcccaaatgaccctgtgactaacatctgtcaggcagctgacaaacagctattcacgcttgttgagtgggcgaagaggatcccacacttttcctccttgcctctggatgatcaggtcatattgctgcgggcaggctggaatgaactcctcattgcctccttttcacaccgatccattgatgttcgagatggcatcctccttgccacaggtcttcacgtgcaccgcaactcagcccattcagcaggagtaggagccatctttgatcggtccctctccagggtgctgacagagctagtgtccaaaatgcgtgacatgaggatggacaagacagagcttggctgcctgagggcaatcattctgtttaatccagatgccaagggcctctccaaccctagtgaggtggaggtcctgcgggagaaagtgtatgcatcactggagacctactgcaaacagaagtaccctgagcagcagggacggtttgccaagctgctgctacgtcttcctgccctccggtccattggccttaagtgtctagagcatctgtttttcttcaagctcattggtgacacccccatcgacaccttcctcatggagatgcttgaggctccccatcaactggcctgagctcagacccagacgtggtgcttctcacactggaggagcacacatccaagagggactccaagccctggggcagggtggggggccatgttcccagaaccttgatggggtgagaagtacagggcagaaccaagaacataaaccctccaagggatctgcttgatatcccaagttggaagggaccccagatacctgtgaggactggttgtctctcttcggtggccttgagtctctgaatttgtcggggtctcccatgatttggggtgatttctcaccctctgtccttcccccagcacaaagcactggccttgcctccaggaccttgcttccttctcatcttgcctcattttgcttcccatctgaagagtggaaatggggaactcccccagaggtggatactggggggcaggcctcccaagctgatggacatgagagtagggccctgacaggccttcctcctctcaaacctggcagatgggggcctctctggaagagggaggggccctgtcactgtccagagtctctttttacacttcacctccttctgcagtcagactgaaatataaaaaaggtggtggtggtggtgaaggggctggtggagatgtaggaaccgatctgctatttttaatttcctgtgaggatagagacttgcagttagactcaaagaagtactgtactttcccaggttgactaagaaatgccagtggtggaggtgggtgtttgggaaaggcagggccctgaaatggcctgtccctagggctctccaagcactagccttcccagcttcccgccgccccccccatctcttcctgtctaacttggggaaggggcctgggctgtgaggacagggcccccacaggggatggtttcacgagtgtagtcccggaggccttccctttacagctctcctccagccctgggcacatagcataggctggggacacaggatcctggcctgagaattgaggggaggtggccagcccgcagaggtggggtgctggggctgcatgatttttgccctgcgtcccttctctttggggctcctttcccctctcatacataaaatcgctttcaaattaaaatcgctgttttctgga

SEQ ID NO: 269201 - DNA, 1614 bp, Artificial Sequence
  derived and/or modified sequence
atgagctgggccgccagaccccccttcctgccccagagacacgccgccggccagtgcggccccgtgggcgtgagaaaggagatgcactgcggcgtggccagcagatggagaagaagaagaccctggctggaccccgccgccgccgccgccgccgccgtggccggcggcgagcagcagacccccgagcccgagcccggcgaggccggcagagacggcatgggcgacagcggcagagacagcagaagccccgacagcagcagccccaaccccctgccccagggcgtgcccccccccagcccccccggcccccccctgccccccagcaccgcccccagcctgggcggcagcggcgcccccccccccccccccatgccccccccccccctgggcagccccttccccgtgatcagcagcagcatgggcagccccggcctgcccccccccgccccccccggcttcagcggccccgtgagcagcccccagatcaacagcaccgtgagcctgcccggcggcggcagcggcccccccgaggacgtgaagccccccgtgctgggcgtgagaggcctgcactgcccccccccccccggcggccccggcgccggcaagagactgtgcgccatctgcggcgacagaagcagcggcaagcactacggcgtgtacagctgcgagggctgcaagggcttcttcaagagaaccatcagaaaggacctgacctacagctgcagagacaacaaggactgcaccgtggacaagagacagagaaacagatgccagtactgcagataccagaagtgcctggccaccggcatgaagagagaggccgtgcaggaggagagacagagaggcaaggacaaggacggcgacggcgagggcgccggcggcgcccccgaggagatgcccgtggacagaatcctggaggccgagctggccgtggagcagaagagcgaccagggcgtggagggccccggcggcaccggcggcagcggcagcagccccaacgaccccgtgaccaacatctgccaggccgccgacaagcagctgttcaccctggtggagtgggccaagagaatcccccacttcagcagcctgcccctggacgaccaggtgatcctgctgagagccggctggaacgagctgctgatcgccagcttcagccacagaagcatcgacgtgagagacggcatcctgctggccaccggcctgcacgtgcacagaaacagcgcccacagcgccggcgtgggcgccatcttcgacagaagcctgagcagagtgctgaccgagctggtgagcaagatgagagacatgagaatggacaagaccgagctgggctgcctgagagccatcatcctgttcaaccccgacgccaagggcctgagcaaccccagcgaggtggaggtgctgagagagaaggtgtacgccagcctggagacctactgcaagcagaagtaccccgagcagcagggcagattcgccaagctgctgctgagactgcccgccctgagaagcatcggcctgaagtgcctggagcacctgttcttcttcaagctgatcggcgacacccccatcgacaccttcctgatggagatgctggaggccccccaccagctggcctag

SEQ ID NO: 269202 - protein, 96 aa, Artificial Sequence
  derived and/or modified sequence
  misc_feature (1)..(1): Xaa can be any naturally occurring amino acid
XSPNDPVTNICQAADKQLFTLVEWAKRIPHFSSLPLDDQVILLRAGLHVHRNSAHSAGVGAIFDRVLTELVSKMRDMRMDKTELGCLRAIILFNPD

SEQ ID NO: 269203 - DNA, 861 bp, Artificial Sequence
  derived and/or modified sequence
atgccacaaggaagcgtgggccggtgggggtgcgaaaaaaagtgtatcgttggcagtcgaccaggaggaggcggcgatgggccaggctggatccctcagagaaggagacggcggcgctggcaggccgaaaataacaaaccgaggtctaggagccaaggtcgtctggatggaacaggctgggccactgccggcggcattaactcaactgttagcttaccagggggagggtctggcccacccgaagatgtgaagccccccgtactcggggtcagagggctgcattgccccccaccccctggaggccccggcgctggcaagcggctgtgtgcaatctgtggcgacagaagtagcggcaaacactatggagtatatagctgtgaaggctgcaagggattctttaaacgcacaatacgaaaggatttgacctacagctgtagggacaacaaagattgcaccgtggacaagcgtcagcgaaatcggtgccagtattgccggtaccagaagtgccttgcaacaggtatgaaaagagaggcagtacaggaagaacgacagagggggaaggataaagatggagacggggaaggcgcaggcggagcacctgaggaaatgccagtagacagaatcctcgaagcagagctcgctgtggagcaaaagtcagaccagggcgtggaggggccagggggcaccggcgggagcggctcaagcgtctccgttggagtgaaccccctgagttttgtgatgggagtaggtggaggcagcctaggattgttctatatccccagcccttcatttccactcatcaccttccttaccctactgggcacaggtggagccgctaagcaaggactgtccaatatctag

SEQ ID NO: 269204 - DNA, 291 bp, Artificial Sequence
  derived and/or modified sequence
taatcccctaatgatccagtaacaaatatctgccaagcagccgataagcagctgttcactttggttgaatgggctaaacgcattccccacttcagttccttgcccctggacgaccaggtgattctactgagagccgggctccacgtgcaccggaatagcgcccattcagcgggcgtgggcgcaatcttcgacagggtactaacagaactagtcagcaagatgagggatatgcggatggataagacagaactcggctgcctacgggctattattttgttcaatcctgactag

SEQ ID NO: 269205 - DNA, 291 bp, Artificial Sequence
  derived and/or modified sequence
tgaagtccaaatgacccagtgacaaacatctgccaggctgctgataagcagctcttcacacttgtagagtgggcgaaaagaatcccccacttcagcagtctgccgctcgacgaccaagtcattctactcagggcaggtctgcacgtgcaccggaattctgcacactctgctggggtaggcgctattttcgatcgtgtgctcactgagctagtatcgaagatgcgcgacatgcgaatggacaagactgagctggggtgcctgcgtgcgatcatacttttcaaccctgactag

SEQ ID NO: 269206 - DNA, 291 bp, Artificial Sequence
  derived and/or modified sequence
taaagccccaatgatcccgtaaccaatatttgccaggctgcagataaacagttattcacactggtggagtgggcaaaacggatcccacacttcagctcactcccactcgatgaccaggtgatcctcttaagagcaggcctacacgtccatagaaacagtgcccactcagccggagtgggagcgatttttgacagagttctgactgaactggtctccaaaatgagagatatgcgcatggacaagacggaactgggctgcttacgggctatcatcctgttcaatccagattag

SEQ ID NO: 269207 - DNA, 291 bp, Artificial Sequence
  derived and/or modified sequence
tagtccccgaatgatccggtcaccaacatctgccaggccgccgataaacagctttttactctagttgaatgggctaaaaggataccccacttttctagtttaccgctggatgaccaggtgatcctgttgcgggctgggctgcatgtccaccgtaattccgcccatagtgctggcgtgggtgctatcttcgacagggttctgaccgagctggtcagcaagatgagagacatgcgcatggataagactgaacttggctgtcttcgagcaatcattttatttaacccggattag

SEQ ID NO: 269208 - DNA, 291 bp, Artificial Sequence
  derived and/or modified sequence
tagagccccaatgatcccgtgacaaatatttgccaggctgccgataaacagttgttcactctagtggagtgggccaaacgtatcccccacttctcatcgctgcctctggacgatcaggtcatactgcttagggctggcctgcatgtccatcggaacagcgcccatagcgccggagttggtgccatcttcgaccgtgtgctgaccgagttggtctcaaagatgagggatatgaggatggataaaactgagctaggctgtctgagggccatcatcctgttcaaccctgattag

SEQ ID NO: 269209 - DNA, 861 bp, Artificial Sequence
  derived and/or modified sequence
atgccccagggatctgtgggtcgatggggatgcgaaaaaaagtgtatcgttggatccagaccagggggagggggagacgggccggggtggattcctcagcggaggcggagacgccgctggcaagccgagaacaataaaccacggtctaggagtcaaggacgtctggacggcacaggatgggcaacggctggcggcataaatagcacagttagtctgcccgggggcgggtcaggccctcccgaggacgttaagcctcccgtgctcggggtacgaggactgcactgtcctcctccccccggtgggcctggcgctggaaaaagactgtgcgcaatttgcggcgacagaagctctgggaagcattacggcgtttacagctgcgaagggtgcaaggggttttttaagcgaacaatcaggaaggacttaacttacagttgcagagacaacaaggactgtaccgtggataagaggcaacgcaaccggtgccagtactgtcgttatcagaagtgtctagcaaccgggatgaagcgagaagctgttcaggaggagagacaacgaggcaaagataaggatggtgacggggagggagccgggggtgcacccgaggagatgcccgttgacaggattctggaagccgaattggccgtggagcaaaagagcgaccaaggggtagagggccctgggggcacggggggatcaggctcgagtgtgagcgtcggggtcaaccctctgagtttcgtcatgggggtgggcggtggcagcctcggactgttctatatacctagcccgtcatttcccctgataacattcctgaccttgctggggaccgggggtgccgcgaaacaggggcttagcaacatttag

SEQ ID NO: 269210 - DNA, 861 bp, Artificial Sequence
  derived and/or modified sequence
atgccccaaggtagcgtggggagatggggatgtgagaaaaaatgtattgttggttcacgacctggtggaggcggagatggcccaggctggatccctcagcgccgtcggcgtaggcggtggcaggccgagaataacaaaccgcggagccgaagtcagggcaggctggacgggaccggttgggccacggccggcggcattaactcaacagtgtccctgccaggcgggggttcagggcccccagaagacgtgaagccgcctgttctcggagtgagagggttgcattgccctcctcccccaggtggcccgggcgcgggcaaaaggctttgcgccatctgcggggatcgctctagcggaaaacattacggggtgtactcctgtgagggttgtaaaggtttttttaagagaaccatacggaaagacctgacctactcctgccgcgacaataaagactgcactgtggacaagcgacagcggaatcgatgccaatactgcaggtatcagaaatgcttggcaacgggcatgaaaagagaggcagttcaagaggagaggcagcgcggaaaagacaaggacggtgacggggaaggagccggaggtgcgccggaggagatgcccgtagatcgcattttagaggccgagttggctgttgaacagaagtcggatcagggggtcgagggaccaggcgggaccggtgggtccggatcctcagtgtccgttggagtgaaccccctcagcttcgtcatgggcgtgggtgggggctcccttggacttttttacattccaagcccttctttccccctgattacatttctgacattgctcggaaccggcggggcagctaagcaaggcctgtccaatatttag

SEQ ID NO: 269211 - DNA, 861 bp, Artificial Sequence
  derived and/or modified sequence
atgccacagggctcagtgggtagatggggctgcgagaagaagtgcatagtggggagcagacccgggggtgggggagacggacccgggtggatcccccagcgccgtagacggcgaagatggcaggccgagaacaacaaacctagatctagaagtcaggggcgactggatggtaccggctgggcaactgcaggaggcattaacagtacagtgtcacttcctggcggggggtccggaccacccgaggacgttaagcctcccgtcctgggagtgcgcggactccactgtccaccgcctcccggaggacccggggctggcaagcgtctctgcgccatttgcggggacaggtctagcggcaagcattacggagtatactcatgcgagggctgtaaaggattttttaaaaggacaatccggaaggacctcacctattcctgtcgggacaataaggattgcacagtagacaaaagacagcgcaatcgatgtcagtattgcaggtatcaaaagtgcctcgccaccggaatgaagagagaagccgtgcaggaagagcgacagaggggcaaagacaaagatggtgacggtgagggcgctggaggcgcccccgaagaaatgccggtggatagaattctggaagccgaactggcggtcgagcagaagtcggatcagggagttgaaggcccaggcggcaccggcggcagcgggtcttccgtctcggtcggcgttaatcccctctcattcgtcatgggggttggcggtggctcattgggcctcttctacatcccttcaccatcctttcctctcattacctttctaacccttcttgggacaggcggagctgctaagcaaggattgtctaatatctag

SEQ ID NO: 269212 - DNA, 861 bp, Artificial Sequence
  derived and/or modified sequence
atgccacagggaagcgtgggccgttggggctgcgagaaaaagtgcattgtgggctctcggccaggcggtggaggcgacgggccaggatggattccacaacggcggaggaggaggagatggcaggccgaaaacaacaagcctcgctccaggtctcaaggacgcctggatggaaccggatgggccacagccgggggcattaacagcaccgtaagcctgccaggaggcggaagcggtccccccgaagatgtcaagccccccgtgctgggcgtgagaggcttgcactgcccccctcctcccggcggccccggcgccggaaaacgtttatgcgctatttgcggcgatcgatcgagcggtaaacattacggcgtgtattcttgcgagggatgcaagggcttcttcaagaggacaatccgcaaggatctgacatattcctgtagagataataaagattgcacagttgacaaacgccagcggaatcgctgtcagtactgcagatatcagaagtgcctggcaacgggcatgaagcgagaggctgtgcaagaggaacggcagcggggtaaagacaaagatggagacggcgagggggcaggaggagcccccgaggagatgccggtggacagaatcctcgaggcggagctggctgtggaacagaaaagcgatcagggagtggagggcccggggggaacaggcggcagtggatccagcgtctcggtcggcgtcaaccctctgagctttgtcatgggcgtcggcggcggatccttaggcctgttctatatcccttccccttcatttcctcttatcactttcttaacactgttgggcacaggcggcgcggcaaagcaaggcctaagcaacatctag

SEQ ID NO: 269213 - DNA, 861 bp, Artificial Sequence
  derived and/or modified sequence
atgccccagggctctgtgggccgctggggctgtgagaagaagtgcatcgtgggcagcaggcctgggggcggcggagatggccctggctggatcccccagaggagaagaagaagacgctggcaggccgagaacaacaagcccaggagccgcagccagggccgcctggatggcaccggctgggccacagctgggggcatcaacagcacagtgtccctgcccggcggcggcagcggccccccagaagatgtgaagccccctgtgctgggcgtgcggggcctgcactgccccccacctcctgggggccctggggccggcaagaggctgtgtgccatctgtggggacaggagcagcggcaagcactatggagtgtacagctgtgagggctgcaagggcttcttcaagaggaccatcaggaaggacctgacctacagctgccgggacaacaaggactgcaccgtggacaagaggcagaggaaccgctgccagtactgccgctaccagaagtgcctggccaccggcatgaagcgggaggccgtgcaggaggagcggcagaggggcaaggacaaggatggagatggagagggcgctgggggcgcccctgaggagatgcctgtggaccgcatcctggaggccgagctggccgtggagcagaagagtgaccagggcgtggagggccctgggggcactggaggcagcggcagctctgtgtctgtgggcgtgaaccccctgagctttgtgatgggcgtgggcggcggcagcctgggcctcttctacatccccagccccagcttccccctcatcaccttcctgaccctgctgggcactggaggagctgccaagcagggcctgagcaacatctag

SEQ ID NO: 269214 - DNA, 291 bp, Artificial Sequence
  derived and/or modified sequence
tgaagccccaatgaccctgtgaccaacatctgccaggccgctgacaagcagctgttcaccctggtggagtgggccaagaggatcccccacttcagcagcctgcccctggatgaccaggtgatcctgctgcgggccggcctgcacgtgcacagaaattctgcccacagcgctggggtgggcgccatctttgacagagtgctgacagagctggtgtccaagatgagggacatgaggatggacaagacagagctgggctgcctgcgggccatcatcctcttcaacccagactag

SEQ ID NO: 269215 - DNA, 861 bp, Artificial Sequence
  derived and/or modified sequence
atgccccagggcagcgtgggccggtggggctgcgagaagaagtgcattgtgggctccagaccaggtggtgggggcgatgggccggggtggatcccccagcgaaggcggcgaaggagatggcaggcggagaataataagccccgcagccggagccagggaaggctcgatgggactggatgggccactgccggtgggatcaacagtacagtgtccctgccagggggggggagtggacccccagaagatgttaagcctcccgtcctgggcgttaggggcctccattgtccccctcccccaggtggaccaggggccgggaaacgcttatgcgcaatctgcggcgatcgatcctcaggtaagcactatggcgtgtacagttgcgagggttgcaagggatttttcaagcgaacgatcagaaaagatttgacctattcgtgtcgggacaataaagactgcacagttgataaacgccagaggaaccggtgccagtactgtcgttatcagaagtgcctcgccaccggcatgaagagagaagctgtgcaggaggagagacagcggggaaaagacaaagatggagatggtgagggagctggaggggccccagaggagatgcctgtagacaggattttggaggccgagttagccgtggagcagaagtccgatcagggcgtggaagggccaggtggcactggaggaagcggctcgtcagtgtcagtgggcgtgaatcctttgtcgttcgtgatgggcgtggggggcggatctctcggcctgttttatattccgtctcccagctttccgttgattacttttctcacacttctgggtacaggtggagccgctaaacaaggcctttctaacatctag

SEQ ID NO: 269216 - DNA, 291 bp, Artificial Sequence
  derived and/or modified sequence
tgaagccccaacgaccccgtgaccaacatctgccaggccgccgacaaacagctgttcaccctggtcgaatgggccaaacgtatcccccatttctcatctctgccgctagacgatcaggtcattctgctgagagccggtctgcacgttcacagaaacagcgcacattcagccggggtgggggccatcttcgatcgcgtgctcactgaactggtgagcaagatgcgcgatatgagaatggacaagaccgagcttgggtgccttcgcgctattatattgtttaaccccgactag

SEQ ID NO: 269217 - DNA, 291 bp, Artificial Sequence
  derived and/or modified sequence
tgaagccccaacgaccccgtgaccaacatctgccaggccgccgacaagcaactgtttacactggtggagtgggctaaacgcatcccccatttctccagtctgcccctggacgaccaggttattcttctcagggctggactgcacgttcatcgtaactctgcccactccgctggggttggcgccatcttcgacagggtcttgaccgagctggtcagcaagatgcgtgatatgagaatggacaaaacagagttagggtgccttcgcgctataattctatttaatcctgattag

SEQ ID NO: 269218 - DNA, 291 bp, Artificial Sequence
  derived and/or modified sequence
tgaagccccaacgaccccgtgaccaacatctgccaggccgccgacaaacagctgttcactttggtcgagtgggccaaacgcatcccacactttagctcactgccactggatgaccaggtgatactattacgggccggacttcatgtccaccgtaatagcgcccacagcgctggcgtaggcgcgatctttgatcgcgttctgacggagctggtttctaaaatgcgagacatgcggatggacaagactgaattaggatgtttaagagccatcatccttttcaatcctgactag

SEQ ID NO: 269219 - DNA, 291 bp, Artificial Sequence
  derived and/or modified sequence
tgaagccccaacgaccccgtgaccaacatctgccaggccgccgacaagcagttgtttacgctggttgaatgggctaagcggatcccgcacttcagctcccttcctctggatgaccaggtgatcttactacgcgctgggctgcacgtccaccggaactccgcccactccgctggtgttggcgctattttcgacagagtccttaccgagctggtgagtaaaatgagagacatgaggatggacaagaccgagctcgggtgcttgagggctattatccttttcaatcccgattag

SEQ ID NO: 269220 - DNA, 291 bp, Artificial Sequence
  derived and/or modified sequence
tgaagccccaacgaccccgtgaccaacatctgccaggccgccgacaagcagctcttcacactggtggagtgggccaagagaataccacatttttccagtctgcccctggacgatcaagttattctactaagggctgggctgcacgtgcataggaactccgcccactctgcaggcgtaggcgctattttcgaccgcgtgttaactgagcttgtctctaagatgcgcgatatgcggatggataagaccgagctgggttgtttgagagcgataatcctgtttaatccggactag

SEQ ID NO: 269221 - DNA, 861 bp, Artificial Sequence
  derived and/or modified sequence
atgccccagggcagcgtgggccggtggggctgcgagaagaagtgcattgtgggctcccggcccggcggcggaggagacgggcctggttggattcctcaaagacgtaggcgtcgtcggtggcaggctgaaaataacaagccacgaagcagatcccaaggaagactcgatgggacgggatgggccacagctggaggaatcaattccacggtgagtctcccaggtggcgggagtggacctcccgaagatgtgaagccacccgttctgggagtgcgagggctgcactgcccccctccccccggtgggcccggggccggaaagaggctctgtgccatttgtggcgacaggtcatcggggaagcattacggggtgtactcctgtgagggctgtaaaggattcttcaagcggactatcaggaaggaccttacctacagttgccgcgacaataaggactgcacagttgataaaagacaacggaaccggtgtcaatattgccggtatcagaagtgccttgcaaccggcatgaagcgagaagccgtgcaggaggaaaggcagagggggaaagacaaagacggcgatggcgaaggggcaggtggcgcccctgaagagatgccagtcgatcgcattctagaggccgagctggccgtcgaacagaagtcagatcagggggtcgaaggaccggggggcacaggcgggagcggcagcagcgtctccgtcggagttaatccactttccttcgtcatgggcgtcggtggtggatctcttgggcttttttacatcccttcacccagcttccccctgattacctttcttactcttctgggaactgggggcgcagcgaagcaggggctgtctaatatctag

SEQ ID NO: 269222 - DNA, 861 bp, Artificial Sequence
  derived and/or modified sequence
atgccccagggcagcgtgggccggtggggctgcgagaagaagtgcatagtcgggagccggcctggcgggggcggggacgggccgggttggatccctcaacgcagacgcaggcgccgttggcaagctgagaacaataaacctcggagcagatctcagggccgcctcgacggaactggatgggccaccgctggcggaatcaattccaccgtctctttgcccggagggggttcaggccctcccgaggacgtaaaaccacctgtgctcggagtccgaggactgcactgccccccccctcccggaggcccaggcgcggggaagcggttgtgcgctatctgtggggaccgaagctctggcaagcactatggtgtgtactcttgcgagggatgcaaaggcttcttcaagagaactattcggaaagacctcacttactcgtgccgcgataacaaagattgtactgtggacaagagacagcggaaccgttgtcaatattgcaggtaccaaaagtgcttagccactgggatgaagcgcgaggccgttcaggaagaacgtcagagaggcaaagacaaagacggtgacggagaaggggctggcggagctcctgaggaaatgcccgtagaccggatcctagaggcagagttggccgtggaacagaaatccgaccagggcgtggaaggaccaggggggacggggggtagcgggtcatccgtgagtgtgggcgtgaaccccctgtcctttgtgatgggggtgggcggggggtccctgggcctcttttatattccatctcctagttttcctttgatcacttttcttactctactggggaccggtggtgctgcgaagcaaggattgtctaacatttag

SEQ ID NO: 269223 - DNA, 861 bp, Artificial Sequence
  derived and/or modified sequence
atgccccagggcagcgtgggccggtggggctgcgagaagaagtgcatcgttggctctcgtccgggggggggcggggatgggcccgggtggatcccacagcggcgtagacgtcggaggtggcaagccgagaacaataaacccagaagcagatctcaggggcggctggatggcactggctgggctacagccggaggtattaacagcactgtttccctaccagggggtggatccggaccacccgaggacgtaaagcctcctgttcttggcgtgcggggactgcactgtcccccaccgcccggtgggcccggtgccggtaagcgtctgtgtgctatctgtggtgatagatctagtggcaaacactatggtgtgtactcctgtgaaggttgcaagggattcttcaagcgaactattagaaaagacctgacctattcatgccgggacaacaaggattgtacagtagacaagaggcagagaaatcgatgccagtattgtcgctaccaaaaatgcctcgctacgggcatgaagagggaagctgtacaggaggaacggcagcgggggaaagataaggatggggacggcgagggagcagggggcgccccagaggaaatgcccgtcgaccggatcctggaagccgagctggctgtcgaacagaagtctgaccagggggtggagggccccggaggcaccgggggcagcggtagctctgtgtccgtgggcgtgaacccactttcttttgtcatgggggtggggggcggcagcctggggcttttttatattccaagtccctcattccctcttattacctttctgactctgctgggaactgggggagctgctaagcagggtctgtccaacatctag

SEQ ID NO: 269224 - DNA, 861 bp, Artificial Sequence
  derived and/or modified sequence
atgccccagggcagcgtgggccggtggggctgcgagaagaagtgcattgtgggatctaggcccggaggcgggggggatggaccaggatggataccccagcggagaagacgacgtcgatggcaggctgaaaataataagcctcgtagccggtcccagggaaggcttgacgggaccgggtgggcgactgcaggcggaattaattcaacagtgagcctcccaggcggtggcagcgggccaccagaggacgtaaagccgcctgtgttaggagtgagaggtctgcactgcccacccccaccaggagggccaggggccggaaagagactctgcgccatatgcggagacagaagctctggaaaacattacggagtatattcctgtgaagggtgcaaaggcttcttcaagcggacaatacggaaagacctgacttattcttgtcgagacaataaggactgtaccgtggataagcgccagcgcaatagatgtcaatactgccgatatcagaaatgcctggctaccgggatgaaaagagaagcagtccaggaggagcggcagagaggtaaagataaggacggtgacggtgagggagccggcggagcccccgaggagatgccggtcgataggatccttgaagcggaacttgcagtggaacaaaaaagcgatcaaggagtggagggaccgggtggtactggggggagcgggtctagcgtaagcgtgggggtgaatcccctgtctttcgtgatgggtgtcggaggggggagcctggggctcttttacattccctccccaagcttccctctgattacatttctgactttgttggggacgggcggcgccgccaaacaggggcttagtaacatctag

SEQ ID NO: 269225 - DNA, 861 bp, Artificial Sequence
  derived and/or modified sequence
atgccccagggaagcgttggtcgatggggctgcgaaaagaagtgtatagtgggctccagaccaggcggtggaggcgacgggccaggatggataccacagagaagacggcgtcggcgatggcaggcagagaataacaaacccagaagtagaagccaaggaaggctggacggcactgggtgggccacggccggtgggattaacagcactgtttcactcccagggggaggttccggaccacctgaagacgtgaaaccacccgtgctgggggtaaggggactacactgtccgcctcctcccggaggcccaggcgctggaaagaggctatgcgctatctgtggtgatcggtccagcgggaaacactacggagtgtactcctgtgaggggtgcaaggggttctttaaaaggactatccgcaaagacctcacatactcctgtcgcgataataaggactgcacagtggataagaggcagcgcaataggtgccagtattgccgctaccaaaaatgcctggctaccggaatgaagcgtgaggctgtccaggaggaacgccagcgcggaaaggacaaggatggggacggagaaggagccggaggtgcaccggaagagatgccggtggaccggattctggaggcggaactcgccgtggagcaaaaatccgatcagggcgtcgaagggcctggtggcaccggcggaagtgggtcttcagtctccgtgggcgtaaacccattaagcttcgtgatgggcgttgggggagggtccctgggtctcttttacattcctagcccttcctttccccttattacttttctgacccttttaggcactggaggcgcagcaaagcaaggtctgtctaatatctag

SEQ ID NO: 269226 - DNA, 291 bp, Artificial Sequence
  derived and/or modified sequence
taatcaccaaacgaccccgtcaccaatatctgtcaggctgctgataagcaactcttcaccttggttgagtgggcgaagcgaattcctcacttcagtagcttgcccctggacgaccaagtgatcttactgcgcgctggactccacgtccatagaaattccgcccattcagccggagtcggcgctatttttgatagggttctgacagagctggtcagtaagatgagagatatgaggatggacaaaactgaactcggatgtcttcgagccattatcctttttaatccggattag

SEQ ID NO: 269227 - DNA, 291 bp, Artificial Sequence
  derived and/or modified sequence
tgatctcctaatgaccccgtcactaatatctgccaggcagcagataaacaattgtttaccctggtcgaatgggctaagcgcatcccccacttttcctccctccccctggatgatcaagttattttgctgcgggctggtctgcatgtgcataggaatagtgcacatagtgctggagtaggggcaatcttcgatagagtgctgacagaactggtatctaagatgagggacatgcgcatggataagacggagctgggatgtctcagggcgataattcttttcaaccctgactag

SEQ ID NO: 269228 - DNA, 291 bp, Artificial Sequence
  derived and/or modified sequence
tgatccccaaacgatcccgtgacaaacatatgtcaggccgcagacaagcagctgtttacgctggtggaatgggctaaacgaattccacatttctctagtctgccactggacgaccaagtcattctgctgagagctggtttacacgtccacagaaactctgctcattcggcaggtgtgggtgcaatctttgatagagtccttacagaacttgtctcaaagatgcgagatatgaggatggataagacagagttgggttgcctccgagcgataatcctttttaatcccgactag

SEQ ID NO: 269229 - DNA, 291 bp, Artificial Sequence
  derived and/or modified sequence
tgatcgcctaatgatccagtcactaacatatgccaagctgctgacaaacagttgtttacgcttgtagagtgggccaaaagaatcccccacttctctagtttacctctggacgaccaggtgatattactgagagccggtctgcacgtgcaccgcaatagcgcgcactccgcaggggttggtgcaatcttcgatcgggtgctaaccgaattggtctcaaagatgagggatatgcgtatggacaaaaccgaactgggttgtttgagagccattatcctctttaaccctgattag

SEQ ID NO: 269230 - DNA, 291 bp, Artificial Sequence
  derived and/or modified sequence
taatcccccaacgacccagtgacgaatatctgtcaagctgccgataaacagctcttcacactcgtagagtgggcgaagagaatcccccacttctccagcttgcctttggacgaccaggtcattttgctgagggccggtttgcacgtacaccgaaatagcgctcacagcgctggcgtaggcgctatctttgaccgagtgctaaccgagctcgtgtcaaagatgcgagacatgaggatggataagaccgaactgggctgtctgagagccatcattctgtttaatccagactag

SEQ ID NO: 269231 - DNA, 861 bp, Artificial Sequence
  derived and/or modified sequence
atgcctcagggttccgtcggaaggtgggggtgtgaaaaaaaatgtatagtcggaagccgacccggtggaggaggcgacggccctgggtggattccccagagacgacggaggcgaaggtggcaagctgagaacaataaacctcggagccgttctcaaggcagactggacggaaccggctgggccacagcaggcggaattaactccacagtttcgcttcccggaggaggatccggccctcccgaggacgtgaaaccgcctgttctgggagtgagggggctccattgcccccctcccccagggggtccaggagccggtaaacggctctgtgcaatttgcggagacagatcctctgggaagcactacggagtatactcatgtgagggctgcaaaggtttctttaagagaacaattagaaaggaccttacctacagttgccgcgataacaaggattgcacggtcgataaacgacaaaggaacaggtgccagtattgcaggtaccagaagtgcctcgcgaccggcatgaagcgagaggctgtgcaagaggagaggcaacggggaaaggacaaagacggtgacggcgagggtgcgggaggcgcaccagaggagatgcccgtggaccgcattctcgaggctgagttggccgtggaacagaaaagcgatcagggcgtcgaaggccctggaggtacaggcggatccggttccagcgtgtctgtaggagtgaaccccctatcctttgtcatgggtgtcggaggcggtagcctggggctcttctatatcccttcgccttcttttccgctcattactttcttaaccttgctgggcaccgggggagctgcaaagcaggggctatccaacatctag

SEQ ID NO: 269232 - DNA, 861 bp, Artificial Sequence
  derived and/or modified sequence
atgcctcaaggtagcgtcggtcggtggggttgcgagaagaagtgcatagtcggctcccggccaggcggaggcggagacgggcctgggtggatcccacagagaagaaggcggcgtcgctggcaagctgagaataataagcccagaagcagaagccagggacgccttgatgggacgggatgggccactgccggaggcataaattccaccgttagtctgcccggagggggtagcgggccacccgaagatgtcaagccacccgtgctgggagtcaggggcctacactgtccgcctcccccaggcggaccgggagccggaaagcggctatgcgctatctgtggcgataggagcagcggaaaacattatggagtctattcctgcgagggctgtaaaggtttctttaaacggacgatacgtaaggatctgacttatagttgtcgcgacaacaaggactgcaccgtggataaaaggcagaggaatcggtgccaatactgccgctatcagaaatgtctggccacaggcatgaagagggaagcggttcaggaggaacgccaaagaggtaaggacaaggatggcgatggcgaaggggctggtggggcacccgaggaaatgcctgtggatcgtatcctagaggccgagcttgcagtcgagcaaaagtcggatcagggagtggaggggcctgggggaaccggaggcagcgggtccagcgtctccgtgggagtcaatcccctgagcttcgtcatgggggtgggagggggaagtctaggtctgttctatattccctctcccagttttcctctgatcaccttcctcactctgctggggacgggcggagcggcaaagcagggtctctcgaacatttag

SEQ ID NO: 269233 - DNA, 861 bp, Artificial Sequence
  derived and/or modified sequence
atgccacagggcagcgtgggcagatggggttgtgaaaagaagtgtatcgtgggaagccgtcccggaggcggtggggacggcccaggttggatcccacagagacgacgtcgcaggagatggcaggctgagaataataaacccagaagccgcagtcaaggcaggctggacggtactggatgggcaactgcgggaggaatcaattctaccgtaagccttccgggtggtgggtccggccctcccgaagacgttaaacctcccgtcttaggggtacgcggattgcactgtccgccacccccaggaggtcctggagcaggaaagagactttgtgctatctgtggagacaggagttcaggcaaacattacggagtgtatagctgcgagggctgtaagggtttcttcaaaaggaccattcggaaagacctgacctactcgtgtagagataacaaggattgtaccgtggacaaacggcaacggaaccgatgtcaatattgcagatatcagaaatgtcttgccacaggcatgaaacgggaggccgtacaagaggagcggcagcggggaaaggataaggacggggacggcgagggggctgggggtgccccagaggagatgcctgtagacaggattttagaggctgaattggcagttgaacaaaagagtgaccagggcgtggaaggtcccggagggactgggggatcaggtagctccgtaagtgtgggcgtaaatcctctgagctttgtgatgggagtgggcggtggcagcctgggcttgttttacattccgagcccttcttttcctttgatcacatttcttaccctactggggacagggggtgcagccaaacagggacttagtaatatctag

SEQ ID NO: 269234 - DNA, 861 bp, Artificial Sequence
  derived and/or modified sequence
atgcctcagggctcggttgggcgatggggctgtgagaaaaagtgtatcgtgggatcacggcctgggggtggcggagatgggcctggatggatccctcagcgtcgtcgaaggcggaggtggcaagcagaaaataataagccacgctctcgcagtcagggccgtctcgatgggacagggtgggcaactgcaggtggcattaatagcacagtgagtctgccaggaggtgggagtggaccacctgaagacgttaaacccccagtactgggggtccgaggactccactgccctccccctccgggagggccaggcgcagggaaacgcttatgtgctatttgtggagaccggtctagtggcaaacactatggcgtgtacagttgcgaggggtgcaagggcttttttaagcgaacaattagaaaggaccttacgtacagctgcagggacaataaagattgcaccgtagataaaagacagcggaatcgttgtcaatactgtagataccaaaaatgcctggccacaggaatgaaaagagaggccgtccaggaagagcgccagagaggaaaagacaaggatggggacggtgaaggggctgggggagcgccagaagagatgccagttgaccgcatcctagaagccgagctggcagttgaacaaaaatccgatcagggagtcgaaggtccaggtggcaccggtggatctggttcatctgtctctgtgggagtcaaccctctgtcattcgttatgggagtgggcggaggctccctgggtctcttttatattcccagcccttctttccccctgatcacctttctcaccctgctaggcaccggcggtgccgcaaagcagggactgtctaatatctag

SEQ ID NO: 269235 - DNA, 1324 bp, Artificial Sequence
  derived and/or modified sequence
acaaagatggctgccacattggcgctgtcattttggtactgagcagagcgacgggcttaattcgacccaatccaggccagagtctttctctcaggggcttcctcgtgctcagctaatcctccgatcaatccttgggaatccctgggacctcttcggtatccctactctcagccagggatcatgtcttgggccgctcgcccgcccttcctccctcagcggcatgccgcagggcagtgtgggccggtgggggtgcgaaaagaaatgcattgtggggtcgcgtcccggtggcggcggcgacggccctggctggatcccgcagcggcggcggcggcggcggtggcaggcggagaacaacaaaccccggagccggagccaggggaggctggacgggacgggatgggcgacagcgggcgggattaactcaacagtgtcactccctgggggtgggtctggcccccctgaagatgtgaagccaccagtcttaggggtccggggcctgcactgtccaccccctccaggtggccctggggctggcaaacggctatgtgcaatctgcggggacagaagctcaggcaaacactacggggtttacagctgtgagggttgcaagggcttcttcaaacgcaccatccgcaaagaccttacatactcttgccgggacaacaaagactgcacagtggacaagcgccagcggaaccgctgtcagtactgccgctatcagaagtgcctggccactggcatgaagagggaggcggtacaggaggagcgtcagcggggaaaggacaaggatggggatggggagggggctgggggagcccccgaggagatgcctgtggacaggatcctggaggcagagcttgctgtggaacagaagagtgaccagggcgttgagggtcctgggggaaccgggggtagcggcagcagcgtgagtgttggggtcaatccactctccttcgtgatgggggttgggggaggcagtctaggtctgttctacatcccctccccctcctttcccctcataaccttcctaacactacttgggactggaggtgctgccaaacaaggtctttcaaacatctgaggtggatgtgatagctccttctgtctccactccccaaacaacccactggcagaaccataggcatgtcccaaataaataattgtttgcactaatgccagaagagaagactcacttacagggattggtttggatggggctcacaggaagactatatgtaaggagggggtgtcaaaagcctcttacaagggggctcccagcatatctcaaaatcttccataactcttacccccgtcccctgcagcc

SEQ ID NO: 269236 - DNA, 287 bp, Artificial Sequence
  derived and/or modified sequence
gcagcccaaatgaccctgtgactaacatctgtcaggcagctgacaaacagctattcacgcttgttgagtgggcgaagaggatcccacacttttcctccttgcctctggatgatcaggtcatattgctgcgggcaggtcttcacgtgcaccgcaactcagcccattcagcaggagtaggagccatctttgatcgggtgctgacagagctagtgtccaaaatgcgtgacatgaggatggacaagacagagcttggctgcctgagggcaatcattctgtttaatccagat

SEQ ID NO: 269237 - DNA, 861 bp, Artificial Sequence
  derived and/or modified sequence
atgccccagggcagcgtgggcagatggggctgcgagaagaagtgcatcgtgggcagcagacccggcggcggcggcgacggccccggctggatcccccagagaagaagaagaagaagatggcaggccgagaacaacaagcccagaagcagaagccagggcagactggacggcaccggctgggccaccgccggcggcatcaacagcaccgtgagcctgcccggcggcggcagcggcccccccgaggacgtgaagccccccgtgctgggcgtgagaggcctgcactgcccccccccccccggcggccccggcgccggcaagagactgtgcgccatctgcggcgacagaagcagcggcaagcactacggcgtgtacagctgcgagggctgcaagggcttcttcaagagaaccatcagaaaggacctgacctacagctgcagagacaacaaggactgcaccgtggacaagagacagagaaacagatgccagtactgcagataccagaagtgcctggccaccggcatgaagagagaggccgtgcaggaggagagacagagaggcaaggacaaggacggcgacggcgagggcgccggcggcgcccccgaggagatgcccgtggacagaatcctggaggccgagctggccgtggagcagaagagcgaccagggcgtggagggccccggcggcaccggcggcagcggcagcagcgtgagcgtgggcgtgaaccccctgagcttcgtgatgggcgtgggcggcggcagcctgggcctgttctacatccccagccccagcttccccctgatcaccttcctgaccctgctgggcaccggcggcgccgccaagcagggcctgagcaacatctag

SEQ ID NO: 269238 - DNA, 291 bp, Artificial Sequence
  derived and/or modified sequence
tgaagccccaacgaccccgtgaccaacatctgccaggccgccgacaagcagctgttcaccctggtggagtgggccaagagaatcccccacttcagcagcctgcccctggacgaccaggtgatcctgctgagagccggcctgcacgtgcacagaaacagcgcccacagcgccggcgtgggcgccatcttcgacagagtgctgaccgagctggtgagcaagatgagagacatgagaatggacaagaccgagctgggctgcctgagagccatcatcctgttcaaccccgactag

SEQ ID NO: 269239 - protein, 361 aa, Artificial Sequence
  derived and/or modified sequence
MAIDRRREAAGGGPGRQPAPAEENGSLPPGDAAASAPLGGRAGPGGGAEIQPLPPLHPGGGPHPSCCSAAAAPSLLLLDYDGSVLPFLGGLGGGYQKTLVLLTWIPALFIGFSQFSDSFLLDQPNFWCRGAGKGTELAGVTTTGRGGDMGNWTSLPTTPFATAPWEAAGNRSNSSGADGGDTPPLPSPPDKGDNASNCDCRAWDYGIRAGLVQNVVSKWDLVCDNAWKVHIAKFSLLVGLIFGYLITGCIADWVGRRPVLLFSIIFILIFGLTVALSVNVTMFSTLRFFEGFCLAGIILTLYALRIELCPPGKRFMITMVASFVAMAGQFLMPGLAALCRDWQVLQALIICPFLLMLLYWS

SEQ ID NO: 269240 - DNA, 768 bp, Artificial Sequence
  derived and/or modified sequence
atgaataaaactggcccacaactgctggagctgtcgccgggcgagggtttctctattcaggagaagtatgtcgccgctgacaccctgtattctcagattaaggaggatgttaagaagcgtgcggtggccttggatgaggctatttcccagtccacccagttccatgataaaattgatcagatcttggagtcactcgagagaatagtcgagagactgcgccaacccccaagcatctctgccgaggtcgagaagattaaagaacaaatatcagaaaataagaatgtgagcgtagacatggagaaactccagcccctttacgagactctaaaacagagaggtgaagagatgatagcccgatccggcggcactgacaaagacatatctgcgaaggcggtgcaggataagctggaccaaatggtgttcatctgggagaatattcacactctggtcgaggagcgcgaggcgaagctgctggacgtcatggaattggctgaaaagttctggtgcgaccacatgagcctgatcgtgactatcaaagacacacaggactttatcagggatcttgaggacccagggatagacccctcagtagtcaaacaacaacaggaggctgcggagactatccgagaggagattgacggcttgcaggaagagttagatatcgtcatcaaccttggaagcgaacttattgccgcgtgtggcgagccagataagccaattgtgaaaaaaagcatcgacgaattgaattccatgggatttagtaaatag

SEQ ID NO: 269241 - DNA, 768 bp, Artificial Sequence
  derived and/or modified sequence
atgaacaagacaggcccccagctgctggagctgagccctggagagggcttcagcatccaggagaagtatgtggccgctgacaccctgtacagccagatcaaggaggatgtgaagaagagagctgtggccctggatgaggccatcagccagagcacccagttccatgacaagattgaccagatcctggagagcctggagcgcatcgtggagcggctgcggcagcccccatccatctctgctgaggtggagaagatcaaggagcagatcagcgagaacaagaatgtgtctgtggacatggagaagctgcagcccctgtatgagaccctgaagcagagaggagaggagatgattgcccggagcggcggcacagacaaggacatcagcgccaaggctgtgcaggacaagctggaccagatggtgttcatctgggagaacatccacaccctggtggaggagcgggaggccaagctgctggatgtgatggagctggccgagaagttctggtgtgaccacatgagcctgattgtgaccatcaaggacacccaggacttcatccgggacctggaggaccccggcatcgaccccagcgtggtgaagcagcagcaggaggccgctgagaccatccgggaggagattgatggcctgcaggaggagctggacatcgtcatcaacctgggcagcgagctgattgctgcctgtggggagccagacaagcccatcgtgaagaagagcattgatgagctgaacagcatgggcttcagcaagtag

SEQ ID NO: 269242 - DNA, 768 bp, Artificial Sequence
  derived and/or modified sequence
atgaacaagaccggcccccagctgctggagctgagccccggcgagggattctccatccaggagaagtacgtggccgccgacactctgtacagtcagattaaggaggacgtgaagaaacgtgcagtggccttggatgaagctatttcacagtccacccagttccacgataaaattgaccagattcttgaaagtctggagcggattgtggagcggcttaggcagcctccatcgatatctgccgaagttgagaaaatcaaagagcagatatccgaaaataagaacgtatcggtggatatggagaaactgcaaccattatacgagaccctgaagcaacggggtgaggagatgattgcccggagcgggggaacggacaaggatataagtgctaaggctgtccaggataaactagaccaaatggtgttcatttgggagaacatccatacgctggttgaagaacgcgaggcaaaattgctggacgtgatggagctagcagaaaagttctggtgcgaccatatgtcccttatagtgaccataaaagatactcaggatttcattcgcgatttggaagatccaggcatcgatcctagcgtggtcaagcagcagcaggaagcagcggaaactattcgagaggagatcgatggattacaggaagaactcgatatcgtcattaatctgggatctgaacttattgctgcctgtggagagcccgacaaaccgatcgttaaaaagtctattgacgagttgaacagcatgggcttcagtaaatag

SEQ ID NO: 269243 - DNA, 768 bp, Artificial Sequence
  derived and/or modified sequence
atgaataaaaccggacctcagttgcttgagttgagcccaggcgaggggttctcaatacaagagaagtacgttgcagccgatacactatactcccagattaaggaggatgtaaaaaagcgtgccgtggctctggatgaagctatttcacagagcacccaattccacgataaaatcgatcagatactggagtccctcgaacgaatcgtggagcggttgcgacaaccgccatccatttctgcagaggtggaaaagattaaggagcagatcagtgaaaataagaacgttagtgtggacatggagaagcttcagcctttgtatgagaccctgaagcagaggggcgaagagatgatcgctagaagcgggggaactgacaaagacattagcgcaaaggcagtgcaggataagcttgatcagatggtcttcatatgggaaaacatccatactctggttgaagagagagaggccaagttgctggacgttatggaactggcagaaaaattttggtgtgaccacatgagtctcatagtcacgattaaggacacacaggatttcatcagggatctcgaggacccagggatcgatccatcagtggttaaacaacagcaagaagcggctgaaacaatccgtgaagaaattgatggattgcaagaagaactggatatagtaataaacctgggatccgagctgattgctgcttgtggggaacccgacaaacctatagtgaaaaaaagcattgatgagctgaactctatgggcttcagtaagtag

SEQ ID NO: 269244 - DNA, 768 bp, Artificial Sequence
  derived and/or modified sequence
atgaacaagaccggcccccagctgctggagctgagccccggcgagggcttcagcatccaggagaagtacgtggccgccgacaccctgtacagccagatcaaggaggacgtgaagaagagagccgtggccctggacgaggccatcagccagagcacccagttccacgacaagatcgaccagatcctggagagcctggagagaatcgtggagagactgagacagccccccagcatcagcgccgaggtggagaagatcaaggagcagatcagcgagaacaagaacgtgagcgtggacatggagaagctgcagcccctgtacgagaccctgaagcagagaggcgaggagatgatcgccagaagcggcggcaccgacaaggacatcagcgccaaggccgtgcaggacaagctggaccagatggtgttcatctgggagaacatccacaccctggtggaggagagagaggccaagctgctggacgtgatggagctggccgagaagttctggtgcgaccacatgagcctgatcgtgaccatcaaggacacccaggacttcatcagagacctggaggaccccggcatcgaccccagcgtggtgaagcagcagcaggaggccgccgagaccatcagagaggagatcgacggcctgcaggaggagctggacatcgtgatcaacctgggcagcgagctgatcgccgcctgcggcgagcccgacaagcccatcgtgaagaagagcatcgacgagctgaacagcatgggcttcagcaagtag

SEQ ID NO: 269245 - protein, 7750 aa, Artificial Sequence
  derived and/or modified sequence
MIAAAFLVLLRPYSIQCALFLLLLLLGTIATIVFFCCWHRKLQKGRHPMKSVFSGRSRSRDAVLRSHHFRSEGFRASPRHLRRRVAAAAAARLEEVKPVVEVHHQSEQETSVRKRRIKKSSRVQPEFYHSVQGASIRRPSSGNASYRCSMSSSADFSDEDDFSQKSGSASPAPGDTLPWNLPKHERSKRKIQGGSVLDPAERAVLRIADERDKVQKKTFTKWINQHLMKVRKHVNDLYEDLRDGHNLISLLEVLSGDTLPREKGRMRFHRLQNVQIALDYLKRRQVKLVNIRNDDITDGNPKLTLGLIWTIILHFQISDIHVTGESEDMSAKERLLLWTQQATEGYAGIRCENFTTCWRDGKLFNAIIHKYRPDLIDMNTVAVQSNLANLEHAFYVAEKIGVIRLLDPEDVDVSSPDEKSVITYVSSLYDAFPKVPEGGEGIGANDVEVKWIEYQNMVNYLIQWIRHHVTTMSERTFPNNPVELKALYNQYLQFKETEIPPKETEKSKIKRLYKLLEIWIEFGRIKLLQGYHPNDIEKEWGKLIIAMLEREKALRPEVERLEMLQQIANRVQRDSVICEDKLILAGNALQSDSKRLESGVQFQNEAEIAGYILECENLLRQHVIDVQILIDGKYYQADQLVQRVAKLRDEIMALRNECSSVYSKGRILTTEQTKLMISGITQSLNSGFAQTLHPSLTSGLTQSLTPSLTSSSMTSGLSSGMTSRLTPSVTPAYTPGFPSGLVPNFSSGVEPNSLQTLKLMQIRKPLLKSSLLDQNLTEEEINMKFVQDLLNWVDEMQVQLDRTEWGSDLPSVESHLENHKNVHRAIEEFESSLKEAKISEIQMTAPLKLTYAEKLHRLESQYAKLLNTSRNQERHLDTLHNFVSRATNELIWLNEKEEEEVAYDWSERNTNIARKKDYHAELMRELDQKEENIKSVQEIAEQLLLENHPARLTIEAYRAAMQTQWSWILQLCQCVEQHIKENTAYFEFFNDAKEATDYLRNLKDAIQRKYSCDRSSSIHKLEDLVQESMEEKEELLQYKSTIANLMGKAKTIIQLKPRNSDCPLKTSIPIKAICDYRQIEITIYKDDECVLANNSHRAKWKVISPTGNEAMVPSVCFTVPPPNKEAVDLANRIEQQYQNVLTLWHESHINMKSVVSWHYLINEIDRIRASNVASIKTMLPGEHQQVLSNLQSRFEDFLEDSQESQVFSGSDITQLEKEVNVCKQYYQELLKSAEREEQEESVYNLYISEVRNIRLRLENCEDRLIRQIRTPLERDDLHESVFRITEQEKLKKELERLKDDLGTITNKCEEFFSQAAASSSVPTLRSELNVVLQNMNQVYSMSSTYIDKLKTVNLVLKNTQAAEALVKLYETKLCEEEAVIADKNNIENLISTLKQWRSEVDEKRQVFHALEDELQKAKAISDEMFKTYKERDLDFDWHKEKADQLVERWQNVHVQIDNRLRDLEGIGKSLKYYRDTYHPLDDWIQQVETTQRKIQENQPENSKTLATQLNQQKMLVSEIEMKQSKMDECQKYAEQYSATVKDYELQTMTYRAMVDSQQKSPVKRRRMQSSADLIIQEFMDLRTRYTALVTLMTQYIKFAGDSLKRLEEEEKSLEEEKKEHVEKAKELQKWVSNISKTLKDAEKAGKPPFSKQKISSEEISTKKEQLSEALQTIQLFLAKHGDKMTDEERNELEKQVKTLQESYNLLFSESLKQLQESQTSGDVKVEEKLDKVIAGTIDQTTGEVLSVFQAVLRGLIDYDTGIRLLETQLMISGLISPELRKCFDLKDAKSHGLIDEQILCQLKELSKAKEIISAASPTTIPVLDALAQSMITESMAIKVLEILLSTGSLVIPATGEQLTLQKAFQQNLVSSALFSKVLERQNMCKDLIDPCTSEKVSLIDMVQRSTLQENTGMWLLPVRPQEGGRITLKCGRNISILRAAHEGLIDRETMFRLLSAQLLSGGLINSNSGQRMTVEEAVREGVIDRDTASSILTYQVQTGGIIQSNPAKRLTVDEAVQCDLITSSSALLVLEAQRGYVGLIWPHSGEIFPTSSSLQQELITNELAYKILNGRQKIAALYIPESSQVIGLDAAKQLGIIDNNTASILKNITLPDKMPDLGDLEACKNARRWLSFCKFQPSTVHDYRQEEDVFDGEEPVTTQTSEETKKLFLSYLMINSYMDANTGQRLLLYDGDLDEAVGMLLEGCHAEFDGNTAIKECLDVLSSSGVFLNNASGREKDECTATPSSFNKCHCGEPEHEETPENRKCAIDEEFNEMRNTVINSEFSQSGKLASTISIDPKVNSSPSVCVPSLISYLTQTELADISMLRSDSENILTNYENQSRVETNERANECSHSKNIQNFPSDLIENPIMKSKMSKFCGVNETENEDNTNRDSPIFDYSPRLSALLSHDKLMHSQGSFNDTHTPESNGNKCEAPALSFSDKTMLSGQRIGEKFQDQFLGIAAINISLPGEQYGQKSLNMISSNPQVQYHNDKYISNTSGEDEKTHPGFQQMPEDKEDESEIEEYSCAVTPGGDTDNAIVSLTCATPLLDETISASDYETSLLNDQQNNTGTDTDSDDDFYDTPLFEDDDHDSLLLDGDDRDCLHPEDYDTLQEENDETASPADVFYDVSKENENSMVPQGAPVGSLSVKNKAHCLQDFLMDVEKDELDSGEKIHLNPVGSDKVNGQSLETGSERECTNILEGDESDSLTDYDIVGGKESFTASLKFDDSGSWRGRKEEYVTGQEFHSDTDHLDSMQSEESYGDYIYDSNDQDDDDDDGIDEEGGGIRDENGKPRCQNVAEDMDIQLCASILNENSDENENINTMILLDKMHSCSSLEKQQRVNVVQLASPSENNLVTEKSNLPEYTTEIAGKSKENLLNHEMVLKDVLPPIIKDTESEKTFGPASISHDNNNISSTSELGTDLANTKVKLIQGSELPELTDSVKGKDEYFKNMTPKVDSSLDHIICTEPDLIGKPAEESHLSLIASVTDKDPQGNGSDLIKGRDGKSDILIEDETSIQKMYLGEGEVLVEGLVEEENRHLKLLPGKNTRDSFKLINSQFPFPQITNNEELNQKGSLKKATVTLKDEPNNLQIIVSKSPVQFENLEEIFDTSVSKEISDDITSDITSWEGNTHFEESFTDGPEKELDLFTYLKHCAKNIKAKDVAKPNEDVPSHVLITAPPMKEHLQLGVNNTKEKSTSTQKDSPLNDMIQSNDLCSKESISGGGTEISQFTPESIEATLSILSRKHVEDVGKNDFLQSERCANGLGNDNSSNTLNTDYSFLEINNKKERIEQQLPKEQALSPRSQEKEVQIPELSQVFVEDVKDILKSRLKEGHMNPQEVEEPSACADTKILIQNLIKRITTSQLVNEASTVPSDSQMSDSSGVSPMTNSSELKPESRDDPFCIGNLKSELLLNILKQDQHSQKITGVFELMRELTHMEYDLEKRGITSKVLPLQLENIFYKLLADGYSEKIEHVGDFNQKACSTSEMMEEKPHILGDIKSKEGNYYSPNLETVKEIGLESSTVWASTLPRDEKLKDLCNDFPSHLECTSGSKEMASGDSSTEQFSSELQQCLQHTEKMHEYLTLLQDMKPPLDNQESLDNNLEALKNQLRQLETFELGLAPIAVILRKDMKLAEEFLKSLPSDFPRGHVEELSISHQSLKTAFSSLSNVSSERTKQIMLAIDSEMSKLAVSHEEFLHKLKSFSDWVSEKSKSVKDIEIVNVQDSEYVKKRLEFLKANNVLKDLGHTKMQLETTAFDVQFFISEYAQDLSPNQSKQLLRLLNTTQKCFLDVQESVTTQVERLETQLHLEQDLDDQKIVAERQQEYKEKLQGICDLLTQTENRLIGHQEAFMIGDGTVELKKYQSKQEELQKDMQGSAQALAEVVKNTENFLKENGEKLSQEDKALIEQKLNEAKIKCEQLNLKAEQSKKELDKVVTTAIKEETEKVAAVKQLEESKTKIENLLDWLSNVDKDSERAGTKHKQVIEQNGTHFQEGDGKSAIGEEDEVNGNLLETDVDGQVGTTQENLNQQYQKVKAQHEKIISQHQAVIIATQSAQVLLEKQGQYLSPEEKEKLQKNMKELKVHYETALAESEKKMKLTHSLQEELEKFDADYTEFEHWLQQSEQELENLEAGADDINGLMTKLKRQKSFSEDVISHKGDLRYITISGNRVLEAAKSCSKRDGGKVDTSATHREVQRKLDHATDRFRSLYSKCNVLGNNLKDLVDKYQHYEDASCGLLAGLQACEATASKHLSEPIAVDPKNLQRQLEETKALQGQISSQQVAVEKLKKTAEVLLDARGSLLPAKNDIQKTLDDIVGRYEDLSKSVNERNEKLQITLTRSLSVQDGLDEMLDWMGNVESSLKEQGQVPLNSTALQDIISKNIMLEQDIAGRQSSINAMNEKVKKFMETTDPSTASSLQAKMKDLSARFSEASHKHKETLAKMEELKTKVELFENLSEKLQTFLETKTQALTEVDVPGKDVTELSQYMQESTSEFLEHKKHLEVLHSLLKEISSHGLPSDKALVLEKTNNLSKKFKEMEDTIKEKKEAVTSCQEQLDAFQVLVKSLKSWIKETTKKVPIVQPSFGAEDLGKSLEDTKKLQEKWSLKTPEIQKVNNSGISLCNLISAVTTPAKAIAAVKSGGAVLNGEGTATNTEEFWANKGLTSIKKDMTDISHGYEDLGLLLKDKIAELNTKLSKLQKAQEESSAMMQWLQKMNKTATKWQQTPAPTDTEAVKTQVEQNKSFEAELKQNVNKVQELKDKLTELLEENPDTPEAPRWKQMLTEIDSKWQELNQLTIDRQQKLEESSNNLTQFQTVEAQLKQWLVEKELMVSVLGPLSIDPNMLNTQRQQVQILLQEFATRKPQYEQLTAAGQGILSRPGEDPSLRGIVKEQLAAVTQKWDSLTGQLSDRCDWIDQAIVKSTQYQSLLRSLSDKLSDLDNKLSSSLAVSTHPDAMNQQLETAQKMKQEIQQEKKQIKVAQALCEDLSALVKEEYLKAELSRQLEGILKSFKDVEQKAENHVQHLQSACASSHQFQQMSRDFQAWLDTKKEEQNKSHPISAKLDVLESLIKDHKDFSKTLTAQSHMYEKTIAEGENLLLKTQGSEKAALQLQLNTIKTNWDTFNKQVKERENKLKESLEKALKYKEQVETLWPWIDKCQNNLEEIKFCLDPAEGENSIAKLKSLQKEMDQHFGMVELLNNTANSLLSVCEIDKEVVTDENKSLIQKVDMVTEQLHSKKFCLENMTQKFKEFQEVSKESKRQLQCAKEQLDIHDSLGSQAYSNKYLTMLQTQQKSLQALKHQVDLAKRLAQDLVVEASDSKGTSDVLLQVETIAQEHSTLSQQVDEKCSFLETKLQGIGHFQNTIREMFSQFAEFDDELDSMAPVGRDAETLQKQKETIKAFLKKLEALMASNDNANKTCKMMLATEETSPDLVGIKRDLEALSKQCNKLLDRAQAREEQVEGTIKRLEEFYSKLKEFSILLQKAEEHEESQGPVGMETETINQQLNMFKVFQKEEIEPLQGKQQDVNWLGQGLIQSAAKSTSTQGLEHDLDDVNARWKTLNKKVAQRAAQLQEALLHCGRFQDALESLLSWMVDTEELVANQKPPSAEFKVVKAQIQEQKLLQRLLDDRKSTVEVIKREGEKIATTAEPADKVKILKQLSLLDSRWEALLNKAETRNRQLEGISVVAQQFHETLEPLNEWLTTIEKRLVNCEPIGTQASKLEEQIAQHKALEDDIINHNKHLHQAVSIGQSLKVLSSREDKDMVQSKLDFSQVWYIEIQEKSHSRSELLQQALCNAKIFGEDEVELMNWLNEVHDKLSKLSVQDYSTEGLWKQQSELRVLQEDILLRKQNVDQALLNGLELLKQTTGDEVLIIQDKLEAIKARYKDITKLSTDVAKTLEQALQLARRLHSTHEELCTWLDKVEVELLSYETQVLKGEEASQAQMRPKELKKEAKNNKALLDSLNEVSSALLELVPWRAREGLEKMVAEDNERYRLVSDTITQKVEEIDAAILRSQQFDQAADAELSWITETEKKLMSLGDIRLEQDQTSAQLQVQKTFTMEILRHKDIIDDLVKSGHKIMTACSEEEKQSMKKKLDKVLKNYDTICQINSERYLQLERAQSLVNQFWETYEELWPWLTETQSIISQLPAPALEYETLRQQQEEHRQLRELIAEHKPHIDKMNKTGPQLLELSPGEGFSIQEKYVAADTLYSQIKEDVKKRAVALDEAISQSTQFHDKIDQILESLERIVERLRQPPSISAEVEKIKEQISENKNVSVDMEKLQPLYETLKQRGEEMIARSGGTDKDISAKAVQDKLDQMVFIWENIHTLVEEREAKLLDVMELAEKFWCDHMSLIVTIKDTQDFIRDLEDPGIDPSVVKQQQEAAETIREEIDGLQEELDIVINLGSELIAACGEPDKPIVKKSIDELNSAWDSLNKAWKDRIDKLEEAMQAAVQYQDGLQAVFDWVDIAGGKLASMSPIGTDLETVKQQIEELKQFKSEAYQQQIEMERLNHQAELLLKKVTEESDKHTVQDPLMELKLIWDSLEERIINRQHKLEGALLALGQFQHALDELLAWLTHTEGLLSEQKPVGGDPKAIEIELAKHHVLQNDVLAHQSTVEAVNKAGNDLIESSAGEEASNLQNKLEVLNQRWQNVLEKTEQRKQQLDGALRQAKGFHGEIEDLQQWLTDTERHLLASKPLGGLPETAKEQLNVHMEVCAAFEAKEETYKSLMQKGQQMLARCPKSAETNIDQDINNLKEKWESVETKLNERKTKLEEALNLAMEFHNSLQDFINWLTQAEQTLNVASRPSLILDTVLFQIDEHKVFANEVNSHREQIIELDKTGTHLKYFSQKQDVVLIKNLLISVQSRWEKVVQRLVERGRSLDDARKRAKQFHEAWSKLMEWLEESEKSLDSELEIANDPDKIKTQLAQHKEFQKSLGAKHSVYDTTNRTGRSLKEKTSLADDNLKLDDMLSELRDKWDTICGKSVERQNKLEEALLFSGQFTDALQALIDWLYRVEPQLAEDQPVHGDIDLVMNLIDNHKAFQKELGKRTSSVQALKRSARELIEGSRDDSSWVKVQMQELSTRWETVCALSISKQTRLEAALRQAEEFHSVVHALLEWLAEAEQTLRFHGVLPDDEDALRTLIDQHKEFMKKLEEKRAELNKATTMGDTVLAICHPDSITTIKHWITIIRARFEEVLAWAKQHQQRLASALAGLIAKQELLEALLAWLQWAETTLTDKDKEVIPQEIEEVKALIAEHQTFMEEMTRKQPDVDKVTKTYKRRAADPSSLQSHIPVLDKGRAGRKRFPASSLYPSGSQTQIETKNPRVNLLVSKWQQVWLLALERRRKLNDALDRLEELREFANFDFDIWRKKYMRWMNHKKSRVMDFFRRIDKDQDGKITRQEFIDGILSSKFPTSRLEMSAVADIFDRDGDGYIDYYEFVAALHPNKDAYKPITDADKIEDEVTRQVAKCKCAKRFQVEQIGDNKYRVSFQSNFGDSQQLRLVRILRSTVMVRVGGGWMALDEFLVKNDPCRVHHHGSKMLRSESNSSITTTQPTIAKGRTNMELREKFILADGASQGMAAFRPRGRRSRPSSRGASPNRSTSVSSQAAQAASPQVPATTTPKGTPIQGSKLRLPGYLSGKGFHSGEDSGLITTAAARVRTQFADSKKTPSRPGSRAGSKAGSRASSRRGSDASDFDISEIQSVCSDVETVPQTHRPTPRAGSRPSTAKPSKIPTPQRKSPASKLDKSSKR

SEQ ID NO: 269246 - DNA, 23253 bp, Artificial Sequence
  derived and/or modified sequence
atgatcgcagcggcctttctggtactcctgagaccttactctattcagtgtgccctgttcttgcttcttctccttctggggactatcgcaacaatcgtctttttctgctgttggcataggaagctgcagaagggacggcacccaatgaagtcagtattcagcggccggtctcgctcacgagacgcagtgctgagatcgcaccacttccgctcagagggctttagggccagtcctagacacctgcggcggcgcgtggcagcagccgcagcagctcgtctggaggaagtgaagcccgtcgtggaggtccatcatcagagcgagcaggagacctcagtccggaaacggcggatcaagaaaagcagccgtgtgcagcccgagttctaccactcggtgcagggtgcctccatcagacgaccctcaagcgggaacgcctcatatcggtgctccatgtcgtcatctgcagacttttctgacgaggacgatttttcacagaaaagtgggagcgcatcccctgcacccggggacaccttaccatggaatctgccaaagcacgagagatcaaagcgaaaaattcaggggggttctgtacttgatccagcagagcgagccgtgctccgcatcgctgatgagagagataaggtgcagaaaaaaacttttacaaagtggattaaccagcatctcatgaaggtgcgcaagcatgttaatgacctctatgaggacctgcgcgatggccataatctcataagtctgctggaagttctgagtggagacacgctccctcgggaaaaaggccgcatgcgctttcacagactgcagaacgtccagattgccctcgactacctcaagcggcgccaggtaaaactggtcaatatcaggaacgatgacattactgatggtaaccccaaactcactctgggtctcatctggaccatcattcttcactttcagatttctgacattcacgtgacgggagagagtgaggatatgtccgcaaaggagcggctgttgctatggacacagcaagctacagaaggctacgcaggcatccgctgtgagaacttcacaacatgttggcgggatggcaaactcttcaatgcaataatccataagtacaggcccgacctgatcgatatgaacaccgttgcagtgcaatctaacctcgctaatctggagcatgcgttctacgtggccgaaaagataggagtgatccggctgcttgatcctgaggacgtggacgtttcatcacccgacgagaagtcggtcatcacctatgtatcttctctgtatgacgcgtttcccaaggtgcccgaagggggcgaaggaatcggcgctaatgacgtcgaagtcaagtggatcgaataccagaacatggtaaattacttgatccagtggatccgccatcacgtcaccaccatgagcgagaggacgtttcctaataaccccgtggagttgaaggctctttataaccaatatcttcagttcaaagagacagagattccccctaaagagaccgaaaagagtaagataaaaagactgtacaaacttctggagatttggattgaatttggcagaatcaaactgctgcagggttatcaccccaatgacatcgaaaaggaatggggaaaacttattatcgccatgctggagagggaaaaggcactcaggccggaggtagagaggctagagatgttgcagcagatcgctaatagggtgcagcgcgacagcgttatatgcgaagacaagctgatactggccggcaacgccctccagtcggacagcaaaaggctggagtctggggtacagtttcagaatgaagcagaaattgcaggttacatccttgagtgtgagaatctacttcgtcagcacgtgatcgatgtgcagatcttaatcgacggaaagtattaccaagctgaccagttagtccagagggtcgctaagcttcgggacgaaatcatggcccttaggaacgaatgctcctccgtgtactccaaggggaggatactgacaaccgaacagactaagttgatgatttcaggaatcacccaaagtctgaactccggattcgcccagacactgcaccctagtctcacctcagggctgactcagagtcttacaccctcactaacctctagtagtatgacttccggattgtcaagtgggatgacaagccgcctgacaccctctgttactcctgcttacactccaggattccccagcggcctcgtgccaaacttttcttcgggggtggagccaaactcccttcaaacgttaaaactaatgcagatccggaagcccctgctgaagagcagcctactggatcaaaacttgaccgaagaagaaatcaacatgaaattcgtacaggacctgctcaattgggtagatgagatgcaagtccagctcgataggacggaatgggggagcgatctaccatcggtcgagtcccatttagagaaccataagaacgtccacagagctatcgaggagtttgagagtagccttaaagaggctaagatcagcgaaattcagatgacagcccctctgaagcttacctatgctgagaagctacatcgcttagagtcccagtatgccaaactcctgaacacctcgaggaaccaggaaagacatctcgacaccctacacaactttgtgtcacgggccaccaatgagctgatttggctgaacgaaaaggaagaggaggaagtcgcctacgattggagcgagcgaaacacaaacatcgcgcgcaagaaagattatcatgcggagttaatgcgagaactcgaccagaaagaagagaatattaaatctgtgcaggaaatagcggaacaactcctgcttgaaaaccaccccgcccgccttactatcgaggcttatcgagcagccatgcagacacagtggtcatggattctccagctttgccagtgtgtcgaacagcacattaaagaaaacactgcgtattttgagttttttaacgacgccaaagaggctactgattacttgcggaacctaaaagatgctatacagcggaagtatagttgtgaccgttcttcatctatccataagctagaggacctagtgcaggagtccatggaagaaaaggaggagctgttgcagtataaatctaccatcgctaatctgatgggaaaggccaaaacaatcatacaattaaagccacggaactccgactgtcccttgaagacgagtatccccatcaaagcgatctgtgattaccgccagatcgaaattacgatctataaggacgatgaatgcgtgctggccaacaattctcatagagcaaagtggaaggtcatcagtcctactggcaacgaggccatggttcccagtgtgtgcttcaccgtgcctcctccaaataaagaagcagtagatctagcaaacaggatcgagcagcagtatcagaatgtgttaaccctgtggcatgaaagccacattaacatgaaatctgtggtcagctggcactatctaatcaatgaaatagatcggatccgtgcgtctaacgtggcttccattaagacgatgcttcctggggagcatcaacaagtgctgtccaaccttcagagccgcttcgaagacttcctggaggacagccaggagtctcaggtgtttagcgggtcggacatcacacagctcgaaaaggaggtgaatgtgtgcaagcagtactatcaggagcttctcaagtcggcagaacgtgaagaacaggaagagagtgtgtacaatctttacatatcagaggtacggaatatccgcctgcggttggagaattgcgaggacagactgataagacagatcagaacgccactggaaagggatgacctgcatgaatctgtctttcggatcacagaacaagaaaaactgaaaaaggagctagagcggctgaaggacgacctgggaactatcactaacaagtgtgaagaatttttttctcaagcagcggcttcctccagtgtgccgacactaagaagcgaactcaatgttgtcctgcagaatatgaaccaagtttactctatgtcctctacctacattgataaattaaaaacggttaacttggtgctgaagaacacacaagctgcagaagcactggtaaagctttatgaaaccaagctttgcgaggaagaggcagtgatcgccgacaagaacaatatagagaatctcatatccacattgaagcagtggcgatctgaagtcgacgagaagagacaggtgttccacgcactagaggacgaattgcagaaggccaaggctattagtgacgagatgtttaagacttacaaggagagagacttagacttcgattggcacaaggagaaagcagatcaactcgtggagcggtggcaaaatgtgcacgtacagatcgataacagactgagagaccttgaaggcatcgggaagagccttaaatattaccgcgatacctaccatcccctggacgattggattcaacaggtggaaactacacagagaaaaatccaggaaaaccagccagagaattccaaaaccctcgccactcaactgaaccaacagaaaatgctggtgtccgagatcgaaatgaagcagtccaaaatggacgagtgtcagaaatacgctgaacaatatagcgccacggtcaaagactatgagcttcagacaatgacatatcgggccatggtcgactctcagcagaagtccccagttaaaagaagacggatgcaatcatctgccgaccttataatacaagagtttatggacctgcgaactaggtatacagctttggtgacattgatgacacaatatataaagtttgcaggcgatagtctcaagagactggaggaagaagagaagtcccttgaagaggagaagaaggaacatgttgaaaaggccaaggagctgcagaaatgggttagtaacatctctaaaactttaaaggatgccgaaaaggcgggcaagccccccttcagcaaacagaaaatttcaagcgaagagatctcaaccaagaaagaacagctgagcgaagccctgcagactatccaattgttcctggccaaacacggtgacaaaatgaccgacgaggagcgcaatgagttagagaaacaggtgaagactctgcaagagtcatataacctcctattttcagagtctctgaaacagctgcaggaatctcagacctctggcgatgtgaaagttgaggagaagctggataaggtcattgccggaacaatcgatcagacaaccggcgaagttttgtcggtgtttcaggcagtcttgaggggtctcattgactacgacactggtattcgcctgctggagacgcagctcatgatatccggcttgattagtcccgagctgaggaagtgtttcgatctgaaggacgctaagtcccacggactgattgacgaacaaatcctgtgtcagctaaaagagctctctaaggcaaaggaaatcatcagcgccgccagtcccacgacaatcccagttttggatgccctcgctcagagcatgattactgagagtatggccattaaggtgctcgagatcctgctcagcactggtagccttgttatcccagctacaggcgaacagctaacccttcagaaagcatttcagcagaacctggtttcatctgcactgttctctaaagtgcttgaacggcaaaacatgtgtaaggacctcatcgacccgtgtacttccgagaaggtgtcgctgattgacatggtgcagcggtctactttgcaggaaaacactggaatgtggctgttgccagtgaggccacaagaaggtgggaggattacattaaagtgcggcagaaatataagtatcctgcgagctgcccatgagggtctcatcgaccgggaaacaatgttccgacttctttctgcacagttactcagcggtgggctcatcaatagtaacagtggccagcgcatgacggttgaggaagccgttcgtgaaggcgtgattgatagggatacagctagctccatcctgacgtatcaggttcagacaggtgggattatacaatccaaccccgcgaaaaggctgaccgtggacgaagcagtccagtgtgacctgataacttcatcaagcgcactgttagtcttagaggctcaacgcggctatgtggggctgatctggcctcatagtggcgaaatcttcccaacatcttctagcctccaacaagagctcatcactaatgaactggcatacaaaatattgaacggaaggcaaaagattgcagctttgtatattcctgaatcatcccaggtgatcggcttagacgctgcaaaacaactcgggattattgataataacactgctagtatattgaaaaacataaccttgcccgacaagatgccagacctcggggatttagaggcttgtaagaacgctcggaggtggctgtccttttgcaagtttcaaccttccactgtccatgattatcgacaggaggaggatgtctttgatggggaggagccggtcaccacccaaacttctgaagaaacaaagaagctgtttctctcctatctgatgatcaattcttatatggatgccaataccggtcagaggttgcttctttacgatggtgatttggacgaagcggtgggtatgttgctagagggttgccacgcagaattcgacggaaatactgctattaaggaatgcctggacgttctctcctcaagcggtgtgttccttaataatgcctcaggcagagaaaaggacgaatgcacagctacccccagctctttcaacaagtgccactgcggcgagcctgaacacgaagagaccccagaaaaccggaaatgcgccatagatgaggagtttaacgaaatgaggaatacggtaattaactccgagttttctcaatccggtaaactggctagcacaatcagcatcgacccaaaagtgaactcttccccctccgtctgtgtgccctccctgatctcttatttgacccagaccgaacttgcagacatcagcatgttgcggtctgatagtgagaacatacttacgaactacgagaatcaaagccgcgtagagacaaacgaacgggcaaacgagtgcagccatagcaagaacattcaaaatttcccctcagatctgattgaaaacccaatcatgaaaagtaaaatgtccaagttttgcggtgtgaatgaaaccgaaaacgaagacaataccaatcgggactcacccatttttgactatagcccccgccttagtgccctgctctcacacgacaaacttatgcactcccagggctcatttaacgacacccatactccggagtccaatggaaataagtgtgaggcccctgcactaagctttagcgacaagactatgctgtctggacaacgtattggggaaaaatttcaggaccagttcctcgggatagctgcaataaacatctcacttccaggcgagcagtacggccaaaagtccctcaacatgatatcttccaaccctcaagtgcaataccataacgataaatatattagcaacacatctggcgaagacgaaaagacgcaccccggctttcagcaaatgcctgaagataaagaagatgaaagcgaaatagaggagtattcctgtgccgttactcccggaggggataccgacaatgcgatcgtcagcctgacttgtgcaacccccctgctggacgaaaccatttccgcctctgattacgagacgagcctgttgaacgatcaacagaacaatactggcaccgacacggattctgacgatgatttctatgataccccactattcgaagatgacgaccacgattctttgctactggacggggacgacagagactgcttgcaccccgaggattatgacacactgcaggaggaaaatgacgaaactgcctcacccgcagacgtcttttacgacgtgagcaaggagaacgagaactccatggtccctcagggagcccccgtcggaagcctgagtgttaaaaataaagctcactgcctacaggactttctgatggatgtggagaaggatgagttagacagtggagagaagatacaccttaatccagtgggaagcgacaaggtgaatggccaaagcctggaaactggatccgagcgcgagtgtacgaacattctggaaggggacgaatctgactcccttactgattatgacattgtagggggaaaggaaagtttcaccgccagtttgaaatttgatgactccggatcctggcgcggcaggaaagaagagtacgtgacaggacaagaattccacagtgatactgatcacctggactctatgcagagcgaggaaagctatggggattatatctacgacagtaatgaccaggatgacgatgatgatgacgggattgacgaagagggcgggggtatcagagacgagaatgggaaacctcgctgtcaaaatgtcgcggaggacatggacatacagctgtgcgcttccatcctcaacgagaactcggacgagaacgaaaatatcaataccatgatcctgttggacaagatgcacagctgtagctcgctcgaaaaacaacagcgggtgaatgttgtgcagctggcatcaccgagtgagaacaatctggttacagaaaaaagcaacctacctgagtacaccaccgagatcgcaggaaagtccaaggagaacctgctgaaccacgagatggttttaaaagacgtcctaccgccaataattaaagacacagagagcgagaaaacttttgggccagcgtcaatcagtcacgacaataacaacatcagttccacctcagagttgggcacggacctggcaaataccaaggtgaagcttattcaaggctctgaactccccgaacttaccgattccgtgaagggcaaagatgaatattttaagaatatgacgccaaaagtggatagtagtcttgatcacatcatctgtaccgaacccgacctgattggaaagccagcagaggagtcacacctgtccttgattgcctcggtaaccgataaggacccccaaggaaacgggagcgatcttattaagggtcgcgacggcaaatccgatatactcattgaagatgaaacctcaattcagaagatgtatctgggggagggggaggtgctggtggagggtttagtagaggaagaaaacaggcacctgaaactgctacctggcaaaaacactcgggatagtttcaaactgatcaatagtcagttcccttttcctcagataacaaacaatgaagaacttaaccagaagggctcattaaagaaagccacagtcacattgaaggacgagccaaacaatctgcagatcattgtctctaaatctcctgtgcagtttgagaacttagaggagattttcgatacatccgtttccaaagagatcagtgatgacattaccagcgatatcacaagttgggaagggaacactcacttcgaagagtccttcaccgacgggccagagaaggagctggacctgtttacctacttgaaacactgcgccaagaacatcaaagctaaagatgtagctaagccaaatgaggacgtcccctcacacgtattaatcaccgcccctcctatgaaggagcacctgcaactcggggtgaacaatacaaaagagaaatctactagcacccagaaggattcccccttgaacgatatgatccagtccaatgacctgtgttcaaaggagagtatcagcgggggtgggactgagatatctcaatttacacctgagtctatcgaggcaactctgtccatactctcccgcaaacacgtggaggatgtcggaaaaaacgactttctgcagtcagaacgttgtgccaacggcttgggcaatgacaacagctcaaataccctcaacacagattacagcttcttagagattaacaacaaaaaggagcggattgagcagcagttaccaaaagaacaagcgttgtctccaaggtcacaggaaaaggaggtgcaaattccagaactgtcgcaagtgttcgtggaggatgtcaaggatattctgaagtccaggcttaaagagggccacatgaacccacaggaggtggaagagccctccgcgtgtgccgatacaaagattttgatccaaaatctgattaagcggatcaccacctctcagctggtgaatgaggcgtccacagtgccgtccgactcgcaaatgtctgattcatcaggggtgagccccatgactaacagctccgaactcaagccagagtcgagggatgaccccttttgcatcggaaacctaaagagtgagctgcttttgaatatcctgaaacaggatcaacactcccagaagatcactggtgtttttgaactcatgcgcgagctaacgcatatggaatacgacttggaaaagagaggtataactagcaaagtcctcccgctccagctggagaatatcttctataagctgctggctgatggctactcagagaagatagagcacgtgggcgacttcaatcagaaagcgtgcagcactagtgagatgatggaggagaagccacacatcctgggggatatcaagtccaaagaaggcaactattactctcctaatctggaaaccgtcaaggaaatcggtctcgaatcctcaacagtgtgggcaagcactcttcctcgggatgagaaattgaaggacctgtgtaacgattttccctcccacctcgagtgtactagcggatccaaagagatggcaagcggggacagcagtactgagcagtttagctctgagctccagcaatgcttgcagcataccgaaaaaatgcacgagtacctgacactgctgcaggacatgaaaccacccctcgataaccaggaatccttagataacaacctggaagctcttaaaaaccagctgcggcagctcgagaccttcgagctgggcttagcacccatcgctgtgatccttaggaaagacatgaagttagccgaggaattcctgaaatccctaccctcagacttcccacggggtcatgtggaggagttgtccatttctcaccagtcgcttaagactgcgttttccagcctttcaaacgtctcatctgagaggaccaaacagataatgctagctattgatagtgagatgagcaaactggccgtcagccacgaagagttcttgcacaagctgaagagcttctccgactgggtctctgaaaaatctaaatcagtgaaagacatcgaaatcgtcaatgtgcaggatagtgaatatgttaaaaaaagactggagtttctcaaggctaacaatgtgttgaaggatcttggacatactaaaatgcagttggagaccaccgccttcgacgtacagtttttcattagcgaatacgcccaggatttaagccctaaccagtctaaacagctgctgagacttttaaacaccacacagaaatgtttcctggatgtgcaggagtccgtgacaacccaggtagaaagactggagacccagctgcatctggagcaggacctggacgatcagaagatcgtggcggaaaggcagcaggagtacaaggaaaaactgcaagggatttgcgaccttctgacacagactgagaaccgactcataggtcatcaggaggctttcatgatcggtgacggcactgttgaactgaaaaaataccagagtaaacaggaagaactgcagaaggatatgcaggggtccgctcaggctctcgctgaagtcgtgaaaaataccgaaaacttcctaaaagaaaacggggaaaagctgtcccaggaagacaaggccctgattgagcaaaaactgaacgaggctaagatcaagtgtgagcagctgaacctgaaagctgaacagagcaagaaggagctggataaggtggtgaccacagccatcaaggaggagacggaaaaagtagcagctgttaagcagctcgaagaatccaaaaccaaaatagagaacctcctggattggctgagcaatgtggacaaagactccgaaagggcaggcacaaaacacaaacaagtcatagaacaaaacgggacacattttcaggagggcgatggcaagagcgccattggagaggaggacgaagtgaatggaaacctgctcgaaaccgatgtggacggccaggtaggtaccacccaagaaaatcttaatcagcagtaccagaaagtcaaggcccagcatgagaagatcatttcgcagcatcaggccgtgattattgctactcagtccgctcaggtcctgctggagaagcagggccagtatttaagtcctgaggagaaggaaaagttgcaaaagaatatgaaagagttgaaagtccactacgagaccgcactggcggagagtgaaaagaaaatgaagctcactcactcactgcaggaggaacttgagaagtttgacgcagactacactgaatttgagcattggctgcaacagtccgaacaggaattggaaaatctggaagccggcgccgatgacataaacgggctcatgaccaagctcaagagacagaaatccttttcagaggatgtaatctctcataagggagatctgagatatatcacgatttcaggaaatcgagttttggaggccgccaaatcttgctcgaagagagacggcggaaaggttgacaccagcgccacccatcgggaggttcagaggaagttggaccacgcaaccgatagatttcgatctctgtatagcaagtgtaacgtgcttggaaataacttaaaggatctcgtagataagtatcagcactatgaagacgctagctgtggtttactcgccggtctacaggcctgcgaggccactgcctctaagcatctgagcgaaccaatcgcagtggatccaaagaaccttcaacggcagctggaggagacaaaggcacttcagggacagatcagttcacagcaggtcgccgtggaaaaattaaagaaaactgccgaggttctgctcgacgcacgcggctcactcttacccgccaagaatgacatccagaagactctggacgacatcgttgggcggtacgaggatttgagcaaatctgtcaacgaacggaacgaaaaattacagattaccctaacgaggagccttagcgtgcaggatggattggacgaaatgttggattggatgggcaatgtggaaagtagtctgaaggagcagggccaggtcccactcaattctaccgcactgcaggatataataagcaagaacatcatgttagagcaggatatcgcaggtcgccagtcttcaatcaacgccatgaacgagaaggtcaagaagttcatggagactactgacccatccactgcaagttctctgcaggccaagatgaaggacctgtcagcgcgcttcagcgaggcaagccacaaacacaaggaaaccctcgccaaaatggaggaactcaagactaaagttgagctgttcgaaaacttgtcagaaaagctgcaaacattcttggagacaaagacccaagccctgactgaggtcgacgtgcccgggaaagacgtgaccgaactatcccagtacatgcaggaaagcacctcagaatttctcgagcacaaaaagcatcttgaagtgctgcattcactgctgaaagagatcagctcccacggcctgccctctgataaagcactagtccttgaaaagacaaataatctctctaaaaagttcaaagaaatggaggatactatcaaggagaaaaaggaggctgtcacttcctgtcaggaacagctcgacgcatttcaggtgcttgtgaagagcttgaagtcatggatcaaagaaaccactaagaaagtgcccattgttcagccgtctttcggtgccgaagacctagggaagagcctggaggataccaaaaaactacaggaaaaatggagtctaaagacaccggagattcaaaaagtgaacaactctggcatctcactgtgtaacctgatcagcgccgtgaccaccccagctaaggcaattgcggccgtgaagagcgggggcgctgtgctcaatggtgaaggcacagccaccaacacagaggaattctgggcaaacaaaggccttaccagcatcaagaaggacatgacagacatcagccatggctatgaagaccttgggttgctcctcaaggataaaatcgcagagttaaataccaaactcagtaaactgcagaaagcccaggaagaatcttctgctatgatgcaatggttgcagaaaatgaataagactgctaccaaatggcagcaaacaccagcccctaccgacaccgaggctgttaagacccaggtcgagcagaacaagtctttcgaggctgagctgaagcaaaacgtgaataaagttcaagagctgaaggataaattgacagagcttttggaagagaaccccgatacacctgaggcaccccgctggaaacaaatgctgacagagatcgatagcaagtggcaggaactgaatcagttgacaattgaccgacagcagaaactcgaggaatcaagcaataatcttactcaatttcaaaccgttgaggcccagctcaagcagtggctggtggagaaggagctcatggtgagtgtgctcgggccactaagtatcgatccaaacatgctgaatactcagaggcaacaggtgcagattctcctccaggagttcgcgactagaaaacctcagtacgaacagcttactgccgccggccaaggtatactgtcccggccaggcgaagacccctcacttcgcgggattgtgaaggagcagctggctgccgtgacccagaaatgggactccttaactggccagctgtccgatcgttgtgactggatcgatcaggccatcgtgaaatccacacagtatcagtcgcttttgcggtcactttcagacaaacttagtgacctggataataagttatcgagttcgctagcagtgagcacccaccccgacgccatgaaccagcagctcgagacagcccaaaagatgaagcaggaaattcaacaggaaaagaaacagatcaaagtggcccaggctttgtgcgaagatctgagcgcactagtgaaggaagaatacttaaaggccgagctaagtcgccagctcgaggggatcctcaagtcttttaaagacgtggagcaaaaggctgagaaccacgtgcaacatttgcagagcgcctgcgcctctagccaccaattccaacagatgagccgggattttcaggcttggctggacacaaaaaaagaagaacagaataaatcacaccctattagcgcaaagctcgatgtcctcgaatctctgatcaaagaccacaaagacttctccaagaccctgacagctcagagtcacatgtacgaaaaaaccatcgctgagggcgagaacctactgctgaaaactcagggctctgaaaaggccgccttacaactgcagctcaacacaattaaaactaactgggatacgttcaacaaacaagtgaaggagcgagaaaataaactcaaggaatctctggaaaaggccttgaaatataaggagcaggtagaaactctgtggccatggatagataagtgtcagaacaatctggaagagattaagttctgccttgacccagctgagggggaaaactctattgctaagctgaagtctttgcagaaggagatggaccagcatttcgggatggtggaactcctgaacaatactgccaatagcctgctgagcgtgtgcgaaatagacaaggaggtggttaccgatgagaacaaaagccttatccaaaaagttgacatggtgactgaacagctccattcaaaaaaattctgcttagaaaacatgacacagaaatttaaggaatttcaagaggtgtctaaggagagcaagcgacagctgcagtgcgccaaggagcagctggatattcacgatagcctgggatcccaagcctacagcaataaatatctcactatgttgcagacgcagcagaagagtttacaggcgctgaaacatcaggtggatctggccaagcggctggcacaggatctggtggttgaagcaagtgactcgaagggcaccagtgatgttctcctccaagttgagacaatcgcccaggagcacagtaccctctctcagcaggttgatgagaagtgctcctttttagagacaaagctacaggggatcggacatttccagaataccatcagggagatgttctctcagttcgcagaattcgatgacgaactagattccatggccccagttgggcgggacgctgagacactgcagaagcagaaagagacaatcaaggccttcctcaagaagctggaagccctcatggcctccaacgacaatgctaacaagacttgcaagatgatgctagcgactgaggaaacatccccagatctggtggggatcaagcgcgacttagaggctctttccaaacagtgtaataagctgcttgaccgggcccaagcccgtgaagaacaggtggagggaactatcaagcgacttgaggaattttacagtaagctcaaggaattcagcatattgctgcagaaagcagaggaacacgaggagagtcaaggccccgtgggcatggagaccgagactatcaatcagcagctgaacatgtttaaggtgttccagaaagaggagattgagccattacaggggaagcaacaggatgtcaactggttgggccaaggcctgattcagagcgctgcaaagagcaccagcacgcaaggtctggagcacgacctagatgatgtcaatgcccgatggaaaactctgaacaaaaaggtggcgcagcgcgcggcacagttacaagaagccttgctacattgcggaagattccaagatgctctcgaatccttgttgtcctggatggtggacaccgaggaacttgtcgctaaccagaagccaccgagcgctgagtttaaagtggtcaaagcccagattcaagagcagaagctcttgcagaggctacttgacgacaggaagtctactgtagaagtgatcaaacgggagggggagaagatcgccacaacggcggagccagctgataaagtaaagattctcaaacaattaagcctgctggactcccgttgggaggcccttctgaataaagccgaaactcgtaaccgacagctcgagggtatctccgtggttgctcaacagttccacgagaccctggaacctctgaatgagtggctgacaaccattgaaaagagacttgtgaattgtgagccaatcggaacacaggcctccaaactggaggaacagattgctcagcacaaagcacttgaggacgatatcattaatcataacaaacacttacatcaagcggtttccataggtcagagcttaaaagtcctttccagcagagaggataaggatatggtgcagtctaagcttgatttttcgcaggtttggtatattgagattcaagaaaagtctcacagccgtagcgaactcctccagcaagcgctatgcaatgccaagatttttggagaagatgaagtggagctgatgaactggctgaatgaggtgcacgacaaactctctaaactgagcgtgcaagactatagcacagaggggttgtggaaacaacaaagcgaacttcgggtccttcaggaagatatcttattacgtaaacagaacgtggatcaggcgcttttaaatggactcgagcttctgaagcagacgaccggcgatgaggttcttatcatccaggacaaactcgaagccataaaggcgaggtataaggatatcaccaagctgagcacagacgttgcgaagacactagagcaggccctgcagctagcccgacggctacatagcacccatgaggagctctgtacttggctggacaaagtggaggtggaattactgtcttacgagactcaggtgctgaagggcgaagaagcctcacaggctcagatgcgccctaaagagctgaaaaaggaggctaaaaacaacaaggcactgctggattccctgaatgaagtcagcagcgccctgctggaacttgtgccctggcgcgcaagagagggcctcgagaaaatggtggccgaagacaacgaacgttacaggcttgtttccgacacaataacacaaaaggttgaggaaattgatgctgctattctacgcagccagcaatttgaccaggcagccgacgcagagctcagttggattacagagaccgaaaaaaaacttatgtctttgggggacatccggctggagcaggaccagacatcagctcaattgcaggtgcaaaaaaccttcaccatggagattctgcgccacaaagacatcatcgacgatctggtaaagtccggccacaagattatgaccgcgtgtagcgaggaggaaaagcagtcaatgaagaaaaaactcgacaaggtattgaaaaattacgatacaatctgtcagatcaactcagagaggtatcttcaactagaacgggcacagagtctggtgaatcagttttgggaaacctacgaagagctgtggccctggctcaccgagacacagagtatcatttctcagttgcccgctcctgcgttagagtacgagacgctgcgccaacagcaggaagagcacagacagttaagagaactgatcgccgagcacaagcctcacatcgacaaaatgaataagactgggccgcagctactggaactaagtccaggagaaggcttttctatccaggagaagtacgtggccgcagacaccctctactcacaaattaaagaagacgtgaagaagagagccgtggcattggatgaagctatatcccagagcacacaatttcacgacaaaatagatcagatcctggaatccctggagagaattgtcgaacgcctgcggcagcctccatctatatctgccgaggtcgagaaaataaaggaacagatcagcgagaacaagaatgtcagtgtcgatatggagaaacttcaaccgctttacgaaacgcttaaacaaagaggcgaagaaatgatcgctcggtcaggcggaacagacaaagatatatcagccaaagcagtgcaggataagctggaccaaatggtgtttatttgggaaaacatccatactctcgtggaggaaagagaagctaagctcctcgatgtcatggagctagctgaaaagttttggtgcgaccacatgtccctcatcgtaactattaaggatactcaagacttcatccgggatctggaagaccccggaattgatcccagtgtggtcaagcagcaacaggaggcagctgagaccattcgcgaagaaattgacgggctacaagaggaattagacatagtcatcaatctcggttctgaactgatcgcagcgtgcggcgagcccgacaagccaattgtcaagaagtcaatcgacgagctcaacagcgcctgggatagtctgaataaagcatggaaggataggattgacaagttagaagaagccatgcaagcggctgtgcagtaccaggacggattacaggcagtgtttgactgggttgatatcgctggaggaaagctggccagtatgagccctattggtaccgatctggagactgtgaaacaacagattgaggagcttaaacaatttaaaagcgaggcctaccagcagcagatcgagatggaaagactgaatcatcaggcagagctgctgttaaaaaaggtgactgaagagtccgataagcacactgtgcaggacccactcatggagctgaaactcatttgggactccctggaagagcgtataataaatagacagcacaagctggagggtgccctgctcgcacttggccagttccagcacgccctggatgaactcctggcctggctgacacatactgaaggcctcttgtccgaacaaaaaccagtggggggtgatcccaaggcaattgaaatcgagctcgcaaagcaccacgttctccagaatgacgtcctggcccatcagagtactgttgaggcagtgaacaaagctggcaacgacctgatagagtcttcagcgggggaggaagcaagcaaccttcaaaataagcttgaagtattgaaccaaaggtggcagaacgtgctggaaaagaccgagcagagaaaacagcagctcgatggagccctgagacaggccaagggattccacggtgaaatcgaagatttacaacagtggctgacggacacggagcgccacctgcttgcctccaagccattggggggtctgcccgagacggcgaaggaacaactaaacgtacacatggaggtttgtgccgcctttgaggcgaaggaggaaacatataagtctctgatgcagaaggggcaacagatgctggctcgctgtcctaagtcagctgagaccaacatcgatcaggatatcaacaatctaaaagagaaatgggagagtgtcgagacaaaactgaacgagcgcaaaaccaaactagaagaggctctcaatctggcgatggagttccataactcccttcaggatttcattaactggctgacacaggcagagcaaactctgaatgtggcgagcaggccttcactgatactcgataccgtgttgtttcaaattgatgaacacaaggtctttgccaatgaggtgaactctcaccgggaacaaattattgagctcgacaagacggggactcacctcaagtatttttcccagaaacaggacgtggtgttaataaaaaatttgctgatcagtgtccagtctcggtgggagaaagtcgttcagcggcttgttgaaagagggcggagcttggatgatgctcgaaagagagcgaaacagtttcatgaagcctggtctaaattgatggagtggctcgaagagtccgagaaatcactggatagcgagttggaaattgctaacgacccagacaaaataaagactcaactggcacagcataaagagtttcaaaagtcgctgggcgctaagcatagcgtttacgacaccaccaaccgaaccggacggtctctcaaggaaaaaaccagcttagcagatgacaaccttaagctcgatgatatgctaagcgaactgagagacaagtgggacaccatatgcggcaaatccgttgagcgccaaaacaagctcgaggaagcgctgcttttcagtggccagtttaccgacgccctgcaagcactgattgattggctgtatcgggtggaaccacagctcgccgaagaccagccagtgcacggggacatcgatttagtgatgaatctgattgacaaccataaggcttttcaaaaagagctgggcaagaggacatccagtgttcaggccctaaagaggagcgcccgggaacttattgagggctccagagatgactcctcatgggtgaaagtccagatgcaagaactttctacccgatgggagacagtgtgcgccctctcaatttcaaagcaaactcgactggaggccgccctacggcaggcagaagagttccatagtgtggttcatgcactccttgaatggctcgcagaggccgagcagacactgcgattccacggggttcttcccgatgatgaagatgctcttcggaccttaatcgaccagcacaaagagttcatgaaaaagttggaggagaaacgtgcagaactgaacaaagcgacaacaatgggagataccgtgctggccatatgtcaccctgactcgattacgacaataaaacattggattaccatcatccgagcacggttcgaagaagtgctcgcttgggccaaacaacatcagcagcggttagcctccgccctcgctggtcttatcgccaaacaggaactgctcgaggctctgctggcctggcttcagtgggccgagactacactaaccgataaagataaggaagttattccacaagagattgaagaagtcaaggccctcattgcagagcaccaaacttttatggaggagatgacaaggaagcagcccgatgttgacaaggtcacaaagacttacaagcggcgggcagcagatccaagctccctccaatcgcatattcccgtgctggacaaaggcagggctggacgaaagagattccctgcttcatctctttaccccagcggctcccagacgcaaattgagaccaaaaaccctcgcgtgaacctgttggtcagcaagtggcagcaggtgtggctcttagcgctggagcgtagaaggaaattgaacgatgctcttgatcgcctggaagagctcagggagttcgcgaattttgatttcgacatttggcgcaaaaaatacatgcgttggatgaatcataagaaaagccgggtaatggacttttttcgccgaatcgataaggaccaggacggcaaaattacaagacaggaatttatcgacggtatcttgtccagcaagtttcctacatcaaggctggaaatgtctgcggtggccgatatcttcgacagggacggggacggttatatcgattactatgagtttgtggcggccttgcatcctaacaaagatgcctacaagccgatcactgacgcagataagatagaggatgaggtcacaaggcaggtggcaaagtgcaaatgtgccaaacgcttccaggtggaacagatcggtgacaacaaataccgggtgtcttttcagtctaatttcggagactcccagcagctgcgcctcgtgagaatacttcggagcactgtgatggtgcgcgttggggggggttggatggcgctcgatgagtttttagtcaagaatgatccatgccgggttcaccaccatggctcaaaaatgctgcggagtgaatctaattcttcaatcaccactacacagccaactatcgcaaagggccgaaccaatatggagctgagggaaaagttcatactggccgacggtgcctcacaggggatggccgcttttcgcccaaggggcagacgctcccgtccgtccagcagaggtgcctcccctaataggtccacctctgtaagtagtcaggccgcccaggccgcctccccacaggtgccagccacaactaccccgaaagggactcccatccagggctccaaactgaggctgcccggatatcttagcggcaaggggttccactctggcgaggactcaggcttgatcactaccgctgcagcaagggtccggacccaatttgctgattctaagaagactccctcaagaccagggtctcgggcggggagcaaggcgggatctcgggctagctcccgcagagggagtgacgcctcagactttgacattagtgagatccaatcagtttgttctgatgtagagacagtcccacagacccataggcccactcctcgcgctgggagtagaccctctaccgcaaaaccaagcaagatccctactccgcagcgcaagagtccggcgagtaagctggacaagagtagcaagagatag

SEQ ID NO: 269247 - DNA, 23253 bp, Artificial Sequence
  derived and/or modified sequence
atgattgctgctgccttcctggtgctgctgcggccctacagcatccagtgtgccctcttcctgctgctgctgctgctgggcaccatcgccaccatcgtgttcttctgctgctggcacaggaagctgcagaagggccgccaccccatgaagtctgtgttcagcggccgcagccgcagcagagatgctgtgctgcggagccaccacttccgctctgagggcttccgggccagccccaggcacctgcggaggagagtggccgctgctgctgctgcccggctggaggaggtgaagcctgtggtggaggtgcaccaccagagcgagcaggagacctctgtgaggaagaggcgcatcaagaagagcagccgggtgcagcctgagttctaccacagcgtgcagggcgccagcatcagaagacccagcagtggaaatgccagctaccgctgcagcatgagcagcagcgctgacttcagtgatgaagatgacttcagccagaagagcggcagcgccagccctgcccctggggacaccctgccctggaacctgcccaagcatgagaggagcaagaggaagatccagggcggctctgtgctggaccctgctgagagagctgtgctgagaattgctgatgagcgggacaaggtgcagaagaagaccttcaccaagtggatcaaccagcacctgatgaaggtgaggaagcacgtgaatgacctgtatgaggacctgagagatggccacaacctgatcagcctgctggaggtgctgagcggggacaccctgccccgggagaagggccgcatgaggttccaccggctgcagaatgtgcagatcgccctggactacctgaagaggcggcaggtgaagctggtgaacatcagaaatgatgacatcacagatggcaaccccaagctgaccctgggcctcatctggaccatcatcctgcacttccagatcagtgacatccacgtgactggagagagcgaggacatgtctgccaaggagcggctgctgctgtggacccagcaggccacagagggctacgccggcatccgctgtgagaacttcaccacctgctggagagatggcaagctgttcaatgccatcatccacaagtacagaccagacctgattgacatgaacacagtggccgtgcagagcaacctggccaacctggagcacgccttctacgtggccgagaagattggagtcatccggctgctggaccctgaagatgtggatgtgagcagcccagatgagaagagcgtcatcacctacgtgagcagcctgtatgatgccttccccaaggtgcctgagggcggggagggcatcggggccaatgatgtggaggtgaagtggattgagtaccagaacatggtgaactacctgatccagtggatccgccaccacgtgaccaccatgtctgagaggaccttccccaacaaccctgtggagctgaaggccctgtacaaccagtacctgcagttcaaggagacagagatcccccccaaggagacagagaagagcaagatcaagaggctgtacaagctgctggagatctggattgaatttggccgcatcaagctgctgcagggctaccaccccaatgacatcgagaaggagtggggcaagctgatcatcgccatgctggagcgggagaaggccctgcggcctgaggtggagcggctggagatgctgcagcagatcgccaacagagtgcagagggacagcgtcatctgtgaggacaagctgatcctggccggaaatgccctgcagagcgacagcaagaggctggagagcggcgtgcagttccagaatgaggccgagattgctggctacatcctggagtgtgagaacctgctgcggcagcacgtgattgatgtgcagatcctgattgatggcaagtactaccaggccgaccagctggtgcagagggtggccaagctgagagatgagatcatggccctgagaaatgaatgttcttctgtgtacagcaagggccgcatcctgaccacagagcagaccaagctgatgatcagcggcatcacccagagcctgaacagcggctttgcccagaccctgcaccccagcctgaccagcggcctgacccagagcctgacccccagcctgaccagcagctccatgaccagcggcctgagcagcggcatgaccagccggctgacccccagcgtgaccccagcctacaccccaggcttccccagcggcctggtgcccaacttcagcagtggagtggagcccaacagcctgcagaccctgaagctgatgcagatcaggaagcccctgctgaagagcagcctgctggaccagaacctgacagaggaggagatcaacatgaagtttgtgcaggacctgctgaactgggtggatgagatgcaggtgcagctggacagaacagagtggggcagtgacctgcccagcgtggagagccacctggagaaccacaagaatgtgcaccgggccatcgaggagtttgagagcagcctgaaggaggccaagatcagcgagatccagatgacagcccccctgaagctgacctacgccgagaagctgcaccggctggagagccagtatgccaagctgctgaacaccagcaggaaccaggagcggcacctggacaccctgcacaactttgtgtcccgggccaccaatgagctgatctggctgaatgagaaggaggaggaggaggtggcctatgactggagcgagaggaacaccaacatcgccaggaagaaggactaccacgccgagctgatgagggagctggaccagaaggaggagaacatcaagtctgtgcaggagattgctgagcagctgctgctggagaaccacccagcccggctgaccatcgaggcctacagagctgccatgcagacccagtggagctggatcctgcagctgtgccagtgtgtggagcagcacatcaaggaaaatacagcctactttgagttcttcaatgatgccaaggaggccacagactacctgaggaacctgaaggatgccatccagaggaagtacagctgtgacaggagcagcagcatccacaagctggaggacctggtgcaggagagcatggaggagaaggaggagctgctgcagtacaagagcaccatcgccaacctgatgggcaaggccaagaccatcatccagctgaagcccaggaacagcgactgccccctgaagaccagcatccccatcaaggccatctgtgactaccggcagatcgagatcaccatctacaaggatgatgaatgtgtgctggccaacaacagccaccgggccaagtggaaggtgatcagccccactggaaatgaggccatggtgcccagcgtgtgcttcaccgtgcccccacccaacaaggaggccgtggacctggccaacagaattgagcagcagtaccagaatgtgctgaccctgtggcatgagagccacatcaacatgaagtctgtggtgtcctggcactacctgatcaatgaaattgaccgcatccgggccagcaatgtggccagcatcaagaccatgctgcccggggagcaccagcaggtgctgagcaacctgcagagcagatttgaggacttcctggaggacagccaggagagccaggtgttcagcggcagtgacatcacccagctggagaaggaggtgaatgtgtgcaagcagtactaccaggagctgctgaagtctgctgagcgggaggagcaggaggagagcgtgtacaacctgtacatcagcgaggtgaggaacatccggctgcggctggagaactgtgaagatagactcatccggcagatccgcacccccctggagagagatgacctgcacgagagcgtcttccgcatcacagagcaggagaagctgaagaaggagctggagcggctgaaggatgacctgggcaccatcaccaacaagtgtgaggagttcttcagccaggccgccgccagcagctctgtgcccaccctgcggtctgagctgaatgtggtgctgcagaacatgaaccaggtgtacagcatgagcagcacctacatcgacaagctgaagacagtgaacctggtgctgaagaacacccaggccgctgaggccctggtgaagctgtatgagaccaagctgtgtgaggaggaggccgtgattgctgacaagaacaacattgaaaatctcatcagcaccctgaagcagtggaggtctgaggtggatgagaagaggcaggtgttccacgccctggaggatgagctgcagaaggccaaggccatcagtgatgagatgttcaagacctacaaggagcgggacctggactttgactggcacaaggagaaggctgaccagctggtggagcgctggcagaatgtgcacgtgcagattgacaaccggctgcgggacctggagggcatcggcaagagcctgaagtactacagagacacctaccaccccctggatgactggatccagcaggtggagaccacccagaggaagatccaggagaaccagcctgagaacagcaagaccctggccacccagctgaaccagcagaagatgctggtgtctgaaattgagatgaagcagagcaagatggatgagtgccagaagtatgcagagcagtacagcgccaccgtgaaggactatgagctgcagaccatgacctaccgggccatggtggacagccagcagaagagccctgtgaagagaagaaggatgcagagcagcgctgacctgatcatccaggagttcatggacctgcggacccgctacacagccctggtgaccctgatgacccagtacatcaagtttgctggggacagcctgaagaggctggaggaggaggagaagagcctggaggaggagaagaaggagcacgtggagaaggccaaggagctgcagaagtgggtgagcaacatcagcaagaccctgaaggatgctgagaaggccggcaagccacccttcagcaagcagaagatcagcagcgaggagatcagcaccaagaaggagcagctgtctgaggccctgcagaccatccagctgttcctggccaagcacggggacaagatgacagatgaggagagaaatgagctggagaagcaggtgaagaccctgcaggagagctacaacctgctcttcagcgagagcctgaagcagctgcaggagagccagaccagcggagatgtgaaggtggaggagaagctggacaaggtgattgctggcaccatcgaccagaccactggagaggtgctgagcgtcttccaggccgtgctgcggggcctgattgattatgacaccggcatccggctgctggagacccagctgatgatcagcggcctcatcagccctgagctgaggaaatgttttgacctgaaggatgccaagagccacggcctgattgatgagcagatcctgtgccagctgaaggagctgagcaaggccaaggagatcatctctgctgccagccccaccaccatccctgtgctggatgccctggcccagagcatgatcacagagagcatggccatcaaggtgctggagatcctgctgagcacaggcagcctggtgatcccagccaccggggagcagctgaccctgcagaaggccttccagcagaacctggtgtcctctgccctcttcagcaaggtgctggagcggcagaacatgtgcaaggacctgattgacccctgcaccagcgagaaggtgtccctgattgacatggtgcagaggagcaccctgcaggagaacacaggcatgtggctgctgcctgtgcggccccaggagggcggccgcatcaccctgaagtgtggcaggaacatcagcatcctgcgggccgcccacgagggcctgattgaccgggagaccatgttccggctgctgagcgcccagctgctgagcggcggcctcatcaacagcaacagcggccagaggatgacagtggaggaggccgtgcgggagggcgtgattgaccgggacacagccagcagcatcctgacctaccaggtgcagacaggaggcatcatccagagcaacccagccaagaggctgactgtggatgaagctgtgcagtgtgacctgatcaccagcagcagcgccctgctggtgctggaggcccagaggggctacgtgggcctcatctggccccacagcggggagatcttccccaccagcagcagcctgcagcaggagctgatcaccaatgagctggcctacaagatcctgaatggccggcagaagattgctgccctgtacatccctgagagcagccaggtgattggcctggatgctgccaagcagctgggcatcatcgacaacaacacagccagcatcctgaagaacatcaccctgcctgacaagatgccagacctgggggacctggaggcctgcaagaatgcccggcgctggctgtccttctgcaagttccagcccagcacagtgcatgactaccggcaggaggaggatgtgtttgatggagaggagcctgtgaccacccagaccagcgaggagaccaagaagctgttcctgagctacctgatgatcaacagctacatggatgccaacacaggccagaggctgctgctgtatgatggagacctggatgaggccgtgggcatgctgctggagggctgccacgccgagtttgatggcaacacagccatcaaggagtgcctggatgtgctgagcagcagcggggtcttcctgaacaatgccagcggccgggagaaggatgagtgcacagccacccccagcagcttcaacaagtgccactgtggggagcctgagcacgaggagaccccagaaaatagaaaatgtgccattgatgaggagttcaatgagatgaggaacacagtcatcaacagcgagttcagccagagcggcaagctggccagcaccatcagcattgaccccaaggtgaacagcagccccagcgtgtgtgtgcccagcctcatctcctacctgacccagacagagctggccgacatctccatgctgcggagtgacagcgagaacatcctgaccaactatgagaaccagagccgggtggagaccaatgaaagagccaatgaatgtagccacagcaagaacatccagaacttccccagcgacctgattgagaaccccatcatgaagagcaagatgagcaagttctgtggggtgaatgaaacagaaaatgaagacaacaccaacagagacagccccatctttgactacagcccccggctgagcgccctgctgagccatgacaagctgatgcacagccagggcagcttcaatgacacccacaccccagagagcaatggaaacaagtgtgaggccccagccctgtccttcagtgacaagaccatgctgagcggccagagaattggagagaagttccaggaccagttcctgggcattgctgccatcaacatcagcctgcccggggagcagtatggccagaagagcctgaacatgatcagcagcaacccccaggtgcagtaccacaatgacaagtacatcagcaacaccagcggggaggatgagaagacccaccctggcttccagcagatgcctgaggacaaggaggatgaaagtgaaattgaggagtacagctgtgctgtgaccccaggaggagacacagacaatgccatcgtgtccctgacctgtgccacccccctgctggatgagaccatcagcgccagtgactatgagaccagcctgctgaatgaccagcagaacaacacaggaacagacacagacagtgatgatgacttctatgacacccccctgtttgaagatgatgaccatgacagcctgctgctggatggagatgaccgggactgcctgcaccctgaggactatgacaccctgcaggaggagaatgatgaaacagccagccctgcagatgtgttctatgatgtgtccaaagaaaatgaaaattccatggtgccccagggcgcccctgtgggcagcctgtctgtgaagaacaaggcccactgcctgcaggacttcctgatggatgtggagaaggatgagctggacagcggggagaagatccacctgaaccctgtgggcagtgacaaggtgaatggccagagcctggagaccggcagcgagagagaatgtaccaacatcctggagggagatgaaagtgacagcctgacagattatgacatcgtgggcggcaaggagagcttcaccgccagcctgaagtttgatgattctggctcctggaggggcaggaaggaggagtatgtgacaggccaggagttccacagcgacacagaccacctggacagcatgcagagcgaggagagctatggagactacatctatgacagcaatgaccaggatgatgatgatgatgatggcattgatgaggagggcggcggcatcagagatgaaaatggcaagccccgctgccagaatgtggccgaggacatggacatccagctgtgtgccagcatcctgaatgaaaattctgatgaaaatgaaaacatcaacaccatgatcctgctggacaagatgcacagctgcagcagcctggagaagcagcagagggtgaatgtggtgcagctggccagccccagcgagaacaacctggtgacagagaagagcaacctgcctgagtacaccacagaaattgctgggaagagcaaagaaaacctgctgaaccacgagatggtgctgaaggatgtgctgccccccatcatcaaggacacagaaagtgagaagacctttggacctgccagcatcagccatgacaacaacaacatcagcagcaccagcgagctgggcacagacctggccaacaccaaggtgaagctgatccagggcagcgagctgcctgagctgacagacagcgtgaagggcaaggatgagtacttcaagaacatgacccccaaggtggacagcagcctggaccacatcatctgcacagagccagacctgattggcaagccagctgaggagagccacctgagcctcatcgcctctgtgacagacaaggacccccagggcaatggaagtgacctgatcaagggcagagatggcaagagtgacatcctgattgaagatgagaccagcatccagaagatgtacctgggggagggggaggtgctggtggagggcctggtggaggaggagaacagacacctgaagctgctgcccgggaagaacacccgggacagcttcaagctgatcaacagccagttccccttcccccagatcaccaacaatgaggagctgaaccagaagggcagcctgaagaaggccaccgtgaccctgaaggatgagcccaacaacctgcagatcatcgtgtccaagagccctgtgcagtttgagaacctggaggagatctttgacacctctgtgtccaaggagatcagtgatgacatcaccagtgacatcacctcctgggagggcaacacccactttgaggagagcttcacagatggccctgagaaggagctggacctcttcacctacctgaagcactgtgccaagaacatcaaggccaaggatgtggccaagcccaatgaagatgtgcccagccacgtgctgatcacagccccacccatgaaggagcacctgcagctgggcgtgaacaacaccaaggagaagagcaccagcacccagaaggacagccccctgaatgacatgatccagagcaatgacctgtgcagcaaggagagcatcagcggcggcggcacagagatcagccagttcaccccagagagcattgaggccaccctgagcatcctgagcaggaagcacgtggaggatgtgggcaagaatgacttcctgcagagcgagcgctgtgccaacggcctgggcaatgacaacagcagcaacaccctgaacacagactacagcttcctggagatcaacaacaagaaggagcgcatcgagcagcagctgcccaaggagcaggccctgagccccaggagccaggagaaggaggtgcagatccctgagctgagccaggtgtttgtggaggatgtgaaggacatcctgaagagccggctgaaggagggccacatgaacccccaggaggtggaggagcccagcgcctgtgccgacaccaagatcctgatccagaacctgatcaagaggatcaccaccagccagctggtgaatgaggccagcacagtgcccagcgacagccagatgtctgacagcagcggcgtgagccccatgaccaacagcagcgagctgaagccagagagcagagatgaccccttctgcatcggcaacctgaagtctgagctgctgctgaacatcctgaagcaggaccagcacagccagaagatcaccggggtgtttgagctgatgagggagctgacccacatggagtatgacctggagaagaggggcatcaccagcaaggtgctgcccctgcagctggagaacatcttctacaagctgctggctgatggctacagcgagaagattgagcacgtgggggacttcaaccagaaggcctgcagcaccagcgagatgatggaggagaagccccacatcctgggggacatcaagagcaaggagggcaactactacagccccaacctggagaccgtgaaggagatcggcctggagagcagcacagtgtgggccagcaccctgcccagagatgagaagctgaaggacctgtgcaatgacttccccagccacctggagtgcaccagcggcagcaaggagatggccagcggggacagcagcacagagcagttcagcagcgagctgcagcagtgcctgcagcacacagagaagatgcatgagtacctgaccctgctgcaggacatgaagccacccctggacaaccaggagagcctggacaacaacctggaggccctgaagaaccagctgcggcagctggagacctttgagctgggcctggcccccatcgccgtcatcctgaggaaggacatgaagctggccgaggagttcctgaagagcctgcccagcgacttcccccggggccacgtggaggagctgagcatcagccaccagagcctgaagacagccttcagcagcctgagcaatgtgagcagcgagaggaccaagcagatcatgctggccatcgacagcgagatgagcaagctggccgtgtcccatgaggagttcctgcacaagctgaagagcttcagtgactgggtgtctgagaagagcaagtctgtgaaggacattgaaattgtgaatgtgcaggacagtgaatatgtgaagaagaggctggagttcctgaaggccaacaacgtgctgaaggacctgggccacaccaagatgcagctggagaccacagcctttgatgtgcagttcttcatcagtgaatatgcccaggacctgagccccaaccagagcaagcagctgctgcggctgctgaacaccacccagaagtgcttcctggatgtgcaggagagcgtgaccacccaggtggagcggctggagacccagctgcacctggagcaggacctggatgaccagaagatcgtggccgagcggcagcaggagtacaaggagaagctgcagggcatctgtgacctgctgacccagacagagaacagactcatcggccaccaggaggccttcatgattggagatggcaccgtggagctgaagaagtaccagagcaagcaggaggagctgcagaaggacatgcagggcagcgcccaggccctggccgaggtggtgaagaacacagagaacttcctgaaggaaaatggagagaagctgagccaggaggacaaggccctgattgagcagaagctgaatgaggccaagatcaagtgtgagcagctgaacctgaaggccgagcagagcaagaaggagctggacaaggtggtgaccacagccatcaaggaggagacagagaaggtggccgctgtgaagcagctggaggagagcaagaccaagattgagaacctgctggactggctgagcaatgtggacaaggacagcgagcgggccggcaccaagcacaagcaggtgattgagcagaatggcacccacttccaggagggagatggcaagagcgccatcggggaggaggatgaggtgaatggaaacctgctggagacagatgtggatggccaggtgggcaccacccaggagaacctgaaccagcagtaccagaaggtgaaggcccagcacgagaagatcatcagccagcaccaggccgtcatcatcgccacccagagcgcccaggtgctgctggagaagcagggccagtacctgagccctgaggagaaggagaagctgcagaagaacatgaaggagctgaaggtgcactatgaaacagccctggccgagagcgagaagaagatgaagctgacccacagcctgcaggaggagctggagaagtttgatgctgactacacagaatttgagcactggctgcagcagagcgagcaggagctggagaacctggaggccggggctgatgacatcaatggcctgatgaccaagctgaagaggcagaagagcttctctgaagatgtgatcagccacaagggggacctgcgctacatcaccatcagcggcaacagagtgctggaggccgccaagagctgcagcaagagagatggcggcaaggtggacaccagcgccacccaccgggaggtgcagaggaagctggaccacgccacagaccgcttccgcagcctgtacagcaaatgtaatgtgctgggcaacaacctgaaggacctggtggacaagtaccagcactatgaagatgccagctgtggcctgctggccggcctgcaggcctgtgaggccacagccagcaagcacctgtctgagcccatcgctgtggaccccaagaacctgcagaggcagctggaggagaccaaggccctgcagggccagatcagcagccagcaggtggccgtggagaagctgaagaagacagctgaggtgctgctggatgcccggggcagcctgctgcctgccaagaatgacatccagaagaccctggatgacatcgtgggccgctatgaggacctgagcaagtctgtgaatgaaagaaatgagaagctgcagatcaccctgaccaggagcctgtctgtgcaggacggcctggatgagatgctggactggatgggaaatgtggagagcagcctgaaggagcagggccaggtgcccctgaacagcacagccctgcaggacatcatcagcaagaacatcatgctggagcaggacattgctggccggcagagcagcatcaatgccatgaatgagaaggtgaagaagttcatggagaccacagaccccagcacagccagcagcctgcaggccaagatgaaggacctgagcgcccgcttcagcgaggccagccacaagcacaaggagaccctggccaagatggaggagctgaagaccaaggtggagctgtttgagaacctgtctgagaagctgcagaccttcctggagaccaagacccaggccctgacagaggtggatgtgcctgggaaggatgtgacagagctgagccagtacatgcaggagagcaccagcgagttcctggagcacaagaagcacctggaggtgctgcacagcctgctgaaggagatcagcagccacggcctgcccagcgacaaggccctggtgctggagaagaccaacaacctgagcaagaagttcaaggagatggaggacaccatcaaggagaagaaggaggccgtgaccagctgccaggagcagctggatgccttccaggtgctggtgaagagcctgaagtcctggatcaaggagaccaccaagaaggtgcccatcgtgcagcccagctttggagctgaggacctgggcaagagcctggaggacaccaagaagctgcaggagaagtggagcctgaagaccccagagatccagaaggtgaacaacagcggcatcagcctgtgcaacctgatctctgctgtgaccaccccagccaaggccatcgctgctgtgaagtctggaggagctgtgctgaatggagagggcacagccaccaacacagaggagttctgggccaacaagggcctgaccagcatcaagaaggacatgacagacatcagccacggctatgaggacctgggcctgctgctgaaggacaagattgctgagctgaacaccaagctgagcaagctgcagaaggcccaggaggagagcagcgccatgatgcagtggctgcagaagatgaacaagacagccaccaagtggcagcagaccccagcccccacagacacagaggccgtgaagacccaggtggagcagaacaagagctttgaagctgagctgaagcagaatgtgaacaaggtgcaggagctgaaggacaagctgacagagctgctggaggagaacccagacaccccagaggccccccgctggaagcagatgctgacagaaattgacagcaagtggcaggagctgaaccagctgaccatcgaccggcagcagaagctggaggagagcagcaacaacctgacccagttccagacagtggaggcccagctgaagcagtggctggtggagaaggagctgatggtgtctgtgctgggccccctgagcattgaccccaacatgctgaacacccagaggcagcaggtgcagatcctgctgcaggagtttgccaccaggaagccccagtatgagcagctgacagctgctggccagggcatcctgagcaggcctggagaggaccccagcctgcggggcatcgtgaaggagcagctggccgctgtgacccagaagtgggacagcctgaccggccagctgagtgacagatgtgactggattgaccaggccatcgtgaagagcacccagtaccagagcctgctgcggagcctgagtgacaagctgagtgacctggacaacaagctgagcagcagcctggccgtgtccacccacccagatgccatgaaccagcagctggagacagcccagaagatgaagcaggagatccagcaggagaagaagcagatcaaggtggcccaggccctgtgtgaggacctgagcgccctggtgaaggaggagtacctgaaggccgagctgagccggcagctggagggcatcctgaagagcttcaaggatgtggagcagaaggcagaaaatcatgtgcagcacctgcagagcgcctgtgccagcagccaccagttccagcagatgagccgggacttccaggcctggctggacaccaagaaggaggagcagaacaagagccaccccatcagcgccaagctggatgtgctggagagcctcatcaaggaccacaaggacttcagcaagaccctgacagcccagagccacatgtatgagaagaccatcgccgagggggagaacctgctgctgaagacccagggcagcgagaaggccgccctgcagctgcagctgaacaccatcaagaccaactgggacaccttcaacaagcaggtgaaggagcgggagaacaagctgaaggagagcctggagaaggccctgaagtacaaggagcaggtggagaccctgtggccctggattgacaagtgccagaacaacctggaggagatcaagttctgcctggaccctgcagaaggagaaaattccatcgccaagctgaagagcctgcagaaggagatggaccagcacttcggcatggtggagctgctgaacaacacagccaacagcctgctgtctgtgtgtgaaattgacaaggaggtggtgacagatgagaacaagagcctcatccagaaggtggacatggtgacagagcagctgcacagcaagaagttctgcctggagaacatgacccagaagttcaaggagttccaggaggtgtccaaggagagcaagaggcagctgcagtgtgccaaggagcagctggacatccatgacagcctgggcagccaggcctacagcaacaagtacctgaccatgctgcagacccagcagaagagcctgcaggccctgaagcaccaggtggacctggccaagaggctggcccaggacctggtggtggaggccagtgacagcaagggcaccagtgatgtgctgctgcaggtggagaccatcgcccaggagcacagcaccctgagccagcaggtggatgagaagtgcagcttcctggagaccaagctgcagggcatcggccacttccagaacaccatccgggagatgttcagccagtttgctgagtttgatgatgagctggacagcatggcccctgtgggcagagatgctgagaccctgcagaagcagaaggagaccatcaaggccttcctgaagaagctggaggccctgatggccagcaatgacaatgccaacaagacctgcaagatgatgctggccacagaggagaccagcccagacctggtgggcatcaagagggacctggaggccctgagcaagcagtgcaacaagctgctggaccgggcccaggcccgggaggagcaggtggagggcaccatcaagaggctggaggagttctacagcaagctgaaggagttcagcatcctgctgcagaaggccgaggagcacgaggagagccagggccctgtgggcatggagacagagaccatcaaccagcagctgaacatgttcaaggtgttccagaaggaggagattgagcccctgcagggcaagcagcaggatgtgaactggctgggccagggcctcatccagagcgctgccaagagcaccagcacccagggcctggagcatgacctggatgatgtgaatgcccgctggaagaccctgaacaagaaggtggcccagagagctgcccagctgcaggaggccctgctgcactgcggccgcttccaggatgccctggagagcctgctgtcctggatggtggacacagaggagctggtggccaaccagaagccacccagcgctgagttcaaggtggtgaaggcccagatccaggagcagaagctgctgcagaggctgctggatgacaggaagagcacagtggaggtgatcaagcgggagggggagaagatcgccaccacagctgagcctgctgacaaggtgaagatcctgaagcagctgagcctgctggacagccgctgggaggccctgctgaacaaggccgagaccaggaaccggcagctggagggcatctctgtggtggcccagcagttccacgagaccctggagcccctgaatgagtggctgaccaccatcgagaagaggctggtgaactgtgagcccatcggcacccaggccagcaagctggaggagcagatcgcccagcacaaggccctggaggatgacatcatcaaccacaacaagcacctgcaccaggccgtgtccatcggccagagcctgaaggtgctgagcagccgggaggacaaggacatggtgcagagcaagctggacttcagccaggtgtggtacatcgagatccaggagaagagccacagccgctctgagctgctgcagcaggccctgtgcaatgccaagatctttggagaagatgaggtggagctgatgaactggctgaatgaggtgcatgacaagctgagcaagctgtctgtgcaggactacagcacagagggcctgtggaagcagcagagcgagctgcgggtgctgcaggaggacatcctgctgaggaagcagaatgtggaccaggccctgctgaatggcctggagctgctgaagcagaccactggagatgaggtgctgatcatccaggacaagctggaggccatcaaggcccgctacaaggacatcaccaagctgagcacagatgtggccaagaccctggagcaggccctgcagctggcccggcggctgcacagcacccatgaggagctgtgcacctggctggacaaggtggaggtggagctgctgtcctatgagacccaggtgctgaagggggaggaggccagccaggcccagatgaggcccaaggagctgaagaaggaggccaagaacaacaaggccctgctggacagcctgaatgaggtgagcagcgccctgctggagctggtgccctggagggcccgggagggcctggagaagatggtggccgaggacaatgaaagataccgcctggtgtctgacaccatcacccagaaggtggaggagattgatgctgccatcctgcggagccagcagtttgaccaggccgcagatgctgagctgtcctggatcacagaaacagagaagaagctgatgagcctgggggacatccggctggagcaggaccagaccagcgcccagctgcaggtgcagaagaccttcaccatggagatcctgcggcacaaggacatcattgatgacctggtgaagagcggccacaagatcatgacagcctgcagcgaggaggagaagcagagcatgaagaagaagctggacaaggtgctgaagaactatgacaccatctgccagatcaacagcgagcgctacctgcagctggagcgggcccagagcctggtgaaccagttctgggagacctatgaggagctgtggccctggctgacagagacccagagcatcatcagccagctgcctgccccagccctggagtatgagaccctgcggcagcagcaggaggagcaccggcagctgcgggagctgattgctgagcacaagccccacatcgacaagatgaacaagacaggcccccagctgctggagctgagccctggagagggcttcagcatccaggagaagtatgtggccgctgacaccctgtacagccagatcaaggaggatgtgaagaagagagctgtggccctggatgaggccatcagccagagcacccagttccatgacaagattgaccagatcctggagagcctggagcgcatcgtggagcggctgcggcagcccccatccatctctgctgaggtggagaagatcaaggagcagatcagcgagaacaagaatgtgtctgtggacatggagaagctgcagcccctgtatgagaccctgaagcagagaggagaggagatgattgcccggagcggcggcacagacaaggacatcagcgccaaggctgtgcaggacaagctggaccagatggtgttcatctgggagaacatccacaccctggtggaggagcgggaggccaagctgctggatgtgatggagctggccgagaagttctggtgtgaccacatgagcctgattgtgaccatcaaggacacccaggacttcatccgggacctggaggaccccggcatcgaccccagcgtggtgaagcagcagcaggaggccgctgagaccatccgggaggagattgatggcctgcaggaggagctggacatcgtcatcaacctgggcagcgagctgattgctgcctgtggggagccagacaagcccatcgtgaagaagagcattgatgagctgaacagcgcctgggacagcctgaacaaggcctggaaggacagaattgacaagctggaggaggccatgcaggccgctgtgcagtaccaggacggcctgcaggccgtgtttgactgggtggacattgctgggggcaagctggcctccatgagccccatcggcacagacctggagaccgtgaagcagcagatcgaggagctgaagcagttcaagtctgaggcctaccagcagcagatcgagatggagcggctgaaccaccaggccgagctgctgctgaagaaggtgacagaggagagtgacaagcacacagtgcaggaccccctgatggagctgaagctgatctgggacagcctggaggagcgcatcatcaaccggcagcacaagctggagggcgccctgctggccctgggccagttccagcacgccctggatgagctgctggcctggctgacccacacagagggcctgctgtctgagcagaagcctgtgggcggggaccccaaggccattgaaattgagctggccaagcaccacgtgctgcagaatgatgtgctggcccaccagagcacagtggaggccgtgaacaaggctggaaatgacctgattgagagcagcgctggggaggaggccagcaacctgcagaacaagctggaggtgctgaaccagcgctggcagaatgtgctggagaagacagagcagaggaagcagcagctggatggagccctgcggcaggccaagggcttccacggggagattgaggacctgcagcagtggctgacagacacagagcggcacctgctggccagcaagcccctgggcggcctgcctgagacagccaaggagcagctgaatgtgcacatggaggtgtgtgccgcctttgaggccaaggaggagacctacaagagcctgatgcagaagggccagcagatgctggcccgctgccccaagtctgctgagaccaacatcgaccaggacatcaacaacctgaaggagaagtgggagagcgtggagaccaagctgaatgaaaggaagaccaagctggaggaggccctgaacctggccatggagttccacaacagcctgcaggacttcatcaactggctgacccaggccgagcagaccctgaatgtggccagccggcccagcctcatcctggacacagtgctcttccagattgatgagcacaaggtgtttgccaatgaggtgaacagccaccgggagcagatcatcgagctggacaagacaggcacccacctgaagtacttcagccagaagcaggatgtggtgctgatcaagaacctgctgatctctgtgcagagccgctgggagaaggtggtgcagaggctggtggagcggggccgcagcctggatgatgccaggaagagggccaagcagttccacgaggcctggagcaagctgatggagtggctggaggagagcgagaagagcctggacagcgagctggagatcgccaatgaccctgacaagatcaagacccagctggcccagcacaaggagttccagaagagcctgggcgccaagcacagcgtgtatgacaccaccaacagaacaggccgcagcctgaaggagaagaccagcctggctgatgacaacctgaagctggatgacatgctgtctgagctgcgggacaagtgggacaccatctgtgggaagtctgtggagcggcagaacaagctggaggaggccctgctcttcagcggccagttcacagatgccctgcaggccctgattgactggctgtacagagtggagccccagctggccgaggaccagcctgtgcacggggacatcgacctggtgatgaacctgattgacaaccacaaggccttccagaaggagctgggcaagaggaccagctctgtgcaggccctgaagaggtctgcccgggagctgattgagggcagcagagatgacagctcctgggtgaaggtgcagatgcaggagctgagcacccgctgggagaccgtgtgtgccctgagcatcagcaagcagacccggctggaggccgccctgcggcaggccgaggagttccacagcgtggtgcacgccctgctggagtggctggccgaggccgagcagaccctgcgcttccacggcgtgctgcctgatgatgaagatgccctgcggaccctgattgaccagcacaaggagttcatgaagaagctggaggagaagagagctgagctgaacaaggccaccaccatgggagacacagtgctggccatctgccacccagacagcatcaccaccatcaagcactggatcaccatcatccgggccaggtttgaggaggtgctggcctgggccaagcagcaccagcagaggctggccagcgccctggccggcctcatcgccaagcaggagctgctggaggccctgctggcctggctgcagtgggccgagaccaccctgacagacaaggacaaggaggtgatcccccaggagattgaggaggtgaaggccctgattgctgagcaccagaccttcatggaggagatgaccaggaagcagccagatgtggacaaggtgaccaagacctacaagagaagagctgctgaccccagcagcctgcagagccacatccctgtgctggacaagggccgggccggcaggaagcgcttccctgccagcagcctgtaccccagcggcagccagacccagatcgagaccaagaacccccgggtgaacctgctggtgtccaagtggcagcaggtgtggctgctggccctggagaggaggaggaagctgaatgatgccctggaccggctggaggagctgcgggagtttgccaactttgattttgacatctggaggaagaagtacatgcgctggatgaaccacaagaagagccgggtgatggacttcttcagaagaattgacaaggaccaggacggcaagatcacccggcaggagttcattgatggcatcctgagcagcaagttccccaccagccggctggagatgtctgctgtggccgacatctttgacagagatggagatggctacatcgactactatgaatttgtggccgccctgcaccccaacaaggatgcctacaagcccatcacagatgctgacaagattgaagatgaggtgacccggcaggtggccaagtgcaagtgtgccaagcgcttccaggtggagcagatcggggacaacaagtacagagtgtccttccagagcaactttggagacagccagcagctgcggctggtgcgcatcctgcggagcacagtgatggtgcgggtgggcggcggctggatggccctggatgagttcctggtgaagaatgacccctgccgggtgcaccaccacggcagcaagatgctgcggtctgagagcaacagcagcatcaccaccacccagcccaccatcgccaagggccgcaccaacatggagctgcgggagaagttcatcctggctgatggagccagccagggcatggccgccttccggccccggggccgccgcagccggcccagcagcagaggagccagccccaacagaagcacctctgtgagcagccaggccgcccaggccgccagcccccaggtgcctgccaccaccacccccaagggcacccccatccagggcagcaagctgcggctgcccggctacctgagcggcaagggcttccacagcggggaggacagcggcctcatcaccacagctgctgcccgggtgaggacccagtttgctgacagcaagaagacccccagccggcccggcagccgggccggcagcaaggccggcagccgggccagcagcagaagaggaagtgatgccagtgactttgacatcagcgagatccagagcgtgtgcagtgatgtggagaccgtgccccagacccaccggcccaccccccgggccggcagccggcccagcacagccaagcccagcaagatccccaccccccagaggaagagccctgccagcaagctggacaagagcagcaagaggtag

SEQ ID NO: 269248 - DNA, 23253 bp, Artificial Sequence
  derived and/or modified sequence
atgatcgccgccgccttcctggtgctgctgcggccctacagcatccagtgcgctctgttcctgctgctccttctgctgggaaccatcgccacaatcgttttcttctgctgctggcaccgtaaattgcagaagggacgccatcccatgaaaagcgttttttcaggacgaagtcgaagccgcgacgcagtcctgaggtcccatcatttccgatccgagggctttcgggccagcccccgccacttgagaaggagagtcgcagcagcagctgccgcgaggcttgaggaagtcaagccagtcgttgaggtgcaccatcaaagtgaacaagagacctccgtgcgaaagagacgtatcaagaagtcatctagagtccagcctgaattttaccactccgtgcagggcgcttccatccgccgaccctcatcgggcaacgctagctatcggtgtagtatgagctcatcagcagatttctccgacgaagacgacttctctcaaaagagcggaagcgcttcccccgccccaggtgacacacttccatggaatcttcctaagcatgaaaggagcaaaaggaagattcaggggggctctgtcctggaccccgcggagcgcgccgtcctgaggatcgctgacgagagggacaaggtgcaaaagaagacctttaccaaatggatcaaccagcatttgatgaaagtgagaaaacacgtgaatgatctatatgaagacctcagagatggccacaatcttataagcctgttggaggtactctctggtgataccttaccccgggaaaaaggacgcatgagattccaccgcctgcagaatgtgcagatagccctcgactacctgaagaggcggcaggtaaaattagtgaatatccgcaacgacgatatcacagatggaaaccccaaactgaccttaggattgatctggacaatcattctccactttcagatctcagatatccacgtgacgggggagagtgaagatatgtccgctaaggagagactactgctgtggacacagcaggctactgagggttatgccggaatccgctgtgagaatttcaccacatgttggcgcgatggcaagctctttaacgccatcattcacaaatatagacccgacctaatcgacatgaacaccgtggcggtgcagtctaatctggctaacctcgagcacgcgttctacgtggcggagaagatcggggtgattaggctgctggatccagaagatgtggacgtgagcagcccagatgagaaatcagttataacttacgttagcagtctctacgatgcctttccgaaggttcctgagggaggtgagggcattggggccaatgacgtggaagtaaaatggatcgagtatcaaaatatggtcaactatcttatccaatggatcagacatcatgttaccacaatgtccgaacgtacctttcctaataatcccgtggagttgaaagctctgtataatcagtacttgcagttcaaggaaactgagatccccccaaaggagacagagaagtccaaaataaagcgcctatacaagcttttagagatttggatcgagttcgggagaatcaagcttctccaaggctaccacccaaacgacatcgaaaaagagtggggtaaactaatcattgccatgctggagcgtgagaaagctctgcgacctgaggtggaacggctcgagatgctccaacagatagcgaatagagtgcagagagatagtgtgatatgcgaagataagctcatcctagcaggcaacgctttacaatcagatagcaagcgtcttgaatctggagtgcaatttcagaacgaggcagagattgcaggatatatacttgagtgtgagaacctgctgcgccagcacgtcattgacgtgcaaatccttatcgatggcaaatactaccaggcagaccaactggtgcaacgagtcgccaagttgagggatgaaattatggcactcagaaatgagtgctcatccgtgtatagcaaagggcggattctgacaacagagcagaccaagctcatgataagtggtatcacacaaagcctgaacagcggctttgcccagacattgcatccatctttgacctcagggctgactcagtccctcactcctagcctcaccagctctagcatgacttccggactgagcagcggtatgaccagcaggctgactccctccgtgactccagcctacacaccagggtttccatctgggctagtccccaatttctcaagcggagtggagcccaattctctgcagactcttaagcttatgcaaattcgcaagccccttctcaagtcctcacttctggatcagaacctaacagaggaagaaatcaacatgaagttcgtccaggatcttctcaattgggttgacgagatgcaagtccagctagatcgtactgagtggggatctgatcttcccagtgtggagtcacacttggagaaccataaaaacgtgcaccgcgccattgaagagtttgagtctagtctgaaggaagccaaaataagtgaaatacagatgaccgctcccctgaaactgacttacgccgagaagctgcatcggctcgagagccagtacgccaagctgctgaataccagcagaaatcaggaacgacatcttgacaccctgcataatttcgtgagccgtgccacaaatgagctaatttggcttaacgaaaaggaagaggaggaggtggcctatgactggtcagagcgcaatactaacatagccagaaagaaggactatcacgccgagctgatgagagagctagatcagaaggaagagaacataaagtctgtccaagagatagccgagcaactgttgctggagaaccatccggccagattgacgatcgaagcctaccgcgcggcaatgcagacacagtggtcttggatcctgcagctgtgtcagtgtgtagaacagcatatcaaagagaacactgcatatttcgagttcttcaatgatgccaaagaggctacagattacctgagaaacctgaaggatgctattcagcgcaaatattcatgtgatcgctcctcttctatccacaagcttgaggatctggtgcaggaaagcatggaagaaaaggaggaacttttgcagtataaaagtacaatcgccaatcttatgggcaaggccaaaacaattatccaactgaagccccgcaactccgattgccccctaaaaactagcatacccatcaaagccatttgcgactatagacagattgaaatcaccatatataaagacgacgagtgcgtgttagctaacaacagccaccgagctaagtggaaggtcattagtcccactggtaacgaagccatggtcccttccgtgtgctttacagtcccacctcccaacaaagaagcggtggatcttgctaacaggattgagcagcagtaccagaacgtgctgactctctggcacgaatcacatatcaatatgaagtccgtggtgtcttggcactacctaatcaacgagatcgataggattcgggctagcaacgtggcaagtatcaagacaatgctgcctggcgagcaccagcaggtactcagtaacctgcagtctcggttcgaagattttttagaggattcacaggaatcccaggttttttcaggctctgacatcactcagctcgagaaggaagtgaacgtgtgcaagcagtactaccaggaactactgaagtccgcagaacgagaggaacaagaggagagtgtctacaacctgtacatcagcgaagttagaaacatcaggctcagacttgagaattgtgaggaccgtctaattagacagatcagaactcctctggagagggatgatttgcacgagtcggtctttaggatcacagagcaggagaagcttaagaaggagctggagcgactgaaggatgacctggggactattacaaataagtgtgaggagttcttttcgcaggctgcggccagctcttccgttcccacccttcgttctgaactgaatgtggtattgcagaatatgaatcaggtctatagtatgtcttccacttacatcgataagctgaaaaccgtgaacttagtcttgaagaatacccaagctgctgaagcgttggtcaagctgtatgaaaccaagctctgcgaagaggaagccgttatagcggacaaaaataacatcgagaatctgataagcactctgaagcaatggcggagcgaagtggacgagaaaagacaggtgtttcacgccctggaagatgagctacagaaggccaaagcaatttcagacgaaatgttcaagacctacaaggagcgtgacttagacttcgattggcataaagaaaaggccgatcagctcgtcgagaggtggcaaaatgtacacgtgcaaatagataacagactgcgcgatcttgaggggattggaaaatcgctgaaatactacagggacacttaccaccccctagacgactggatccagcaggtggagacaacacagagaaaaattcaagagaaccagccggagaattctaagacgctggctactcagctcaatcagcaaaaaatgttagtttccgagatcgaaatgaagcagagtaagatggatgagtgccagaagtacgcggaacaatactcagctactgtgaaagactacgagctgcaaacaatgacatacagagcgatggttgattcacaacagaaaagcccagtgaaaagaaggaggatgcagtccagtgctgaccttatcatacaggaattcatggatttacgcactcgatacaccgcacttgtcactctcatgacacagtacattaagtttgctggagactcgttaaaacgcctggaagaggaagaaaaaagcctggaagaggagaagaaagaacacgtggaaaaagcaaaggagctgcagaagtgggtgtccaatattagcaagacgttaaaggatgctgagaaagcaggaaaacctccattttctaagcagaaaataagtagcgaagaaatttccaccaagaaagagcagctgtccgaggcactgcaaacaatccagctgttcttggctaagcacggtgataaaatgacagatgaggagcgaaatgagttggaaaaacaggtgaagactctgcaggaatcatataatttacttttttcagaaagcctcaagcaactccaagaatcacagacaagtggcgacgtgaaagttgaagagaaactcgacaaggttattgcgggcacaattgatcagaccacaggtgaagtgctgtccgtgttccaggccgtgctgaggggattgatagattacgacaccggcattagattgttggaaacacaactgatgatctccggactcatctctcccgagctacggaaatgctttgacttgaaggatgcaaaatcccatggcctaattgatgaacagatcctctgccaattaaaggaactaagtaaagctaaagaaatcatctccgccgcctctccaaccacaattccggtcctggatgccttggctcagtctatgatcacagagtccatggcgattaaagtactcgagatactattgagcacgggcagtctggttataccagccactggagaacagctgacgctgcagaaagcctttcagcagaatctggtcagctcagccttattcagtaaagtgcttgaaaggcagaatatgtgtaaagatcttatcgatccttgtactagcgagaaagtgtccctcatagacatggtccaacgttctacactacaggagaatactggcatgtggctgctgccagtgaggcctcaggaggggggaagaatcactctgaaatgcggtaggaacatcagtatcttacgggccgcacacgagggacttatagatcgcgaaacgatgtttcgtcttctgtctgctcagctgctctccgggggactaataaactctaactccggccagagaatgactgtggaagaggcagtccgggaaggtgtcatcgatcgcgacaccgcttcatctatattgacataccaggtgcagacaggcggcattatacagtccaatccagccaagaggttaacggtggacgaggcagtccaatgcgacctgatcacatcgtcttcggctttacttgtgctagaagcccagagaggctacgtgggcctgatctggccccattccggcgaaatatttcccacaagtagtagcctccagcaagagctgattacaaatgaattggcttacaaaatcctgaacggtcgacaaaaaattgccgccctatacattcctgaatcctcacaggtgatagggctggatgcagctaaacagctgggcatcatagacaacaacactgcttctattctgaaaaatataacgttaccagataagatgccagacctgggggatctggaagcctgtaaaaacgcccgcagatggctatcattttgcaaattccagccaagcacagtccatgactatcgtcaggaggaggacgtgtttgacggagaggaacctgttacaacgcagactagtgaggagacgaaaaaattattcctttcgtacctcatgatcaatagctacatggacgccaacaccggccaacgattactcctctacgacggagatttggatgaagctgtcggcatgcttctggagggctgtcacgccgagtttgacggaaatacagccattaaagaatgtctggacgtactatcaagctctggcgtgttccttaacaacgcctctgggcgtgaaaaagacgaatgcacagccacgccttccagtttcaataaatgtcactgcggggagcccgagcacgaggaaactcctgaaaacaggaaatgtgctatcgatgaagagtttaatgagatgcgaaacacggtcatcaactctgagtttagtcaatcaggtaagctggcctcaacaatcagtattgaccccaaggttaacagttctcccagcgtgtgtgttccttctcttatatcgtacctaactcagaccgaacttgctgatatctctatgctgcgatcagacagcgagaacatactcaccaattacgagaatcaaagccgagtagaaacaaatgagcgagctaacgaatgcagtcatagtaagaatatccagaattttccttcagatctgatagaaaaccccatcatgaagtccaagatgtcaaaattttgtggggttaatgagaccgaaaatgaggataataccaatagggacagtccaatcttcgactattccccacgtctcagtgctctactgagccacgataaattaatgcactcccaagggtcttttaacgacacccataccccagagtctaatgggaataagtgcgaggcccctgccctgagcttttccgataagacgatgctctccggccaaaggataggtgaaaaatttcaggatcagttcctcgggatcgccgcaattaatatctcacttcctggcgaacagtatggccagaaatctcttaacatgataagtagtaatcctcaagtgcagtaccataacgacaaatacatcagtaacacgtcaggcgaagatgagaagacgcatccagggttccagcagatgcctgaggataaggaggatgagtcagagattgaagaatattcctgtgcagttacccccggaggtgacaccgacaatgccattgtgagtcttacatgcgccactcctctcctcgacgagaccatctctgccagtgactacgagacaagcctgctcaacgaccagcaaaacaacacaggaactgataccgattctgacgatgacttttacgatacacctctgttcgaggacgacgaccacgattctctgttactagacggagacgaccgcgattgcctccatcctgaggactacgacacattgcaagaagaaaacgatgagaccgcaagtccagcggatgtattttacgacgtttcgaaggagaatgagaactcaatggtaccccaaggggctccggtgggttctctgagcgtgaaaaataaggcccactgtctccaagacttcctgatggatgtggaaaaagacgagctggatagtggcgaaaagatccatctcaaccccgtgggttcagataaagtgaatgggcagtccctggaaacaggtagtgaacgcgagtgcacaaatatattggagggcgatgagtcggattccttgacggattacgatatagtggggggaaaagaatcctttacagccagtcttaagtttgacgattctggtagctggcggggcaggaaggaggaatatgtgactggccaggaattccacagcgacactgaccacctggattctatgcagtcggaggagagctacggtgactatatatacgatagtaatgaccaagatgatgatgacgatgatgggattgatgaggagggaggcggaattagggacgagaacggtaaacctagatgtcagaatgttgcggaagatatggacatccaattgtgtgcctccattctcaacgagaatagtgatgagaacgagaacatcaatactatgatcctcctggacaagatgcactcttgctccagtcttgaaaaacagcagcgcgtgaacgtggtgcagttggcttctccctcagagaacaatttagttactgaaaaatctaacctgcccgagtatacaaccgaaatagccggcaagtctaaagaaaacttgttaaatcacgaaatggtgctgaaggatgtgttgcctccaatcataaaggacacagagagcgaaaaaaccttcggtccagcatcgatctcccacgacaacaataacatatcttcaaccagcgagctgggtaccgatctcgccaacacgaaagttaagctcattcaggggagtgaactgcctgagctgacagattccgtgaagggaaaggatgagtatttcaagaatatgactcctaaggtcgattcatcgctggatcacatcatctgtactgagcccgacctgattgggaagccagcagaagagagccacctgagcttgatcgcgagcgtgaccgacaaagatccacagggcaacggaagtgatctgattaagggccgagacggtaagtccgacatcctcattgaggacgaaaccagcatccaaaagatgtaccttggggagggcgaggtcctagtggaaggattggtcgaggaggaaaaccgccacctgaagctgttgccaggcaagaatactcgcgattccttcaagctgattaatagccagttcccatttccccagatcacgaataacgaggagctgaatcagaagggatcactgaagaaggctacagtcacactgaaggatgagcccaataatttgcagatcatcgtgtcaaaaagtcccgttcagttcgaaaatctggaggagatattcgacaccagcgtaagcaaggagatctccgatgacattacatcagatatcactagttgggaggggaatacacactttgaggaaagcttcaccgacgggccagaaaaagagctggatctttttacatacctcaagcactgcgccaagaatataaaagcaaaagatgtcgccaagcccaatgaggacgttccttcccacgtgctgataacggctcccccgatgaaagaacacctgcagctgggagttaataatactaaggagaagagtacatcaacccagaaggacagccctctgaatgatatgattcagtccaacgatctctgttcaaaagagtctatttccggggggggcaccgaaatcagtcagtttactccagagtcaattgaagccacccttagcattctgtcccgcaagcatgtggaggatgttggaaaaaacgactttttgcaatcagagcggtgcgctaatggtctcgggaatgataactccagtaatacactgaatactgactacagttttctagagataaacaataaaaaggaacggatcgagcaacagcttccgaaggaacaggccttatctcctcggagccaggaaaaagaggtccaaattcccgaactctcacaggtgttcgtggaggacgttaaggacatcctcaaatcgaggcttaaggaggggcacatgaacccccaggaagtcgaagaaccgtccgcctgcgcggacacaaaaatcctcatacagaatctgattaaaaggatcacgacatctcagctggtgaatgaggcttcaactgtgccgagtgattcacaaatgtccgattcatcaggcgtcagtccaatgacgaattcaagcgaattaaagccagaatcaagagatgacccattttgtatcggcaatcttaaaagcgagctgcttctcaatattcttaagcaggatcagcactcgcaaaagattaccggagtatttgaactaatgagggaactaacacacatggaatacgaccttgagaaacgaggaatcactagtaaggttttacctttgcagcttgaaaacattttctataaactgctggctgatgggtactctgagaagatcgagcatgtaggcgactttaatcagaaggcctgcagcacctctgaaatgatggaggaaaaaccgcacatcctgggagatattaaatcaaaggaagggaactactattcccccaatttggaaacagtgaaagaaatcgggctggagtccagtacggtctgggcatctactctgcctcgagatgaaaagctgaaagatctgtgcaacgacttcccgtcccacctagagtgcacctcagggtctaaagagatggcatccggtgatagcagcaccgaacaattttcatctgaactacagcagtgtcttcaacacaccgaaaaaatgcacgaatacttgacactgttgcaggacatgaaacctccacttgataaccaggagagtttagacaacaaccttgaggccttaaagaatcaactcaggcagttggagacttttgagctaggtctggcaccaattgctgttattctcaggaaggacatgaagcttgccgaagaatttctgaaaagcctccctagtgatttccctagagggcacgtagaggaattatccatcagtcatcagagccttaagacggccttctccagtcttagcaacgttagctcagagaggactaagcagatcatgcttgcgatagacagtgagatgagcaagcttgctgtaagccatgaggagttcctccacaaactgaaatctttttccgattgggtgagtgagaagtccaagagcgttaaggacatcgagatcgtgaacgttcaagactcagagtatgtgaagaagagattagagtttctgaaagccaacaacgtgcttaaggatctaggacacacaaaaatgcagctggaaaccaccgcctttgacgtacagttttttatttctgagtatgctcaggacctctccccaaaccaaagcaaacagctactacgactactgaataccactcagaagtgttttttggacgtccaggagagcgtcaccacccaggtagagaggctggaaactcagttgcatcttgagcaggacctcgatgatcagaagatcgttgctgagcgccaacaggagtacaaggagaagctccagggaatatgcgacctgctgacccagaccgagaaccggcttatcggccaccaggaagccttcatgataggtgacggaaccgtggaattaaagaagtaccaaagtaaacaggaagagttgcagaaggatatgcagggatctgctcaggccctggctgaggttgtaaagaacacagagaactttttgaaggagaacggagaaaaactctctcaagaggacaaggctcttattgaacagaagctaaatgaggctaagattaaatgtgaacagctgaacctgaaggcagaacagagcaagaaggaactggacaaggtggtcactactgcaattaaggaggaaaccgaaaaggttgccgctgtgaagcagttggaagaatcgaagacaaaaattgagaatctacttgactggctgagtaacgtcgataaggacagtgaaagggccggcacaaagcacaagcaggtcattgagcagaacgggacacactttcaggaaggtgatggaaaaagcgccatcggtgaagaagacgaggtgaatgggaatttacttgagaccgacgtggacggtcaggtagggactacccaggagaacttgaaccagcagtaccagaaagtgaaggcccaacacgagaagatcatcagccagcatcaggccgttatcatcgcgactcaatctgcacaggtgctcctagagaagcagggtcagtacctgtcgcctgaagagaaggaaaagctccagaagaacatgaaggagctgaaggtccactatgaaactgctctagcggagtctgagaagaaaatgaagctaactcatagtctgcaggaggagctggaaaagttcgatgcggactataccgagtttgagcattggcttcagcagagcgaacaggagctcgagaatctcgaggccggggctgatgatattaacggcctgatgacaaagctcaagcgccaaaagtctttttccgaagatgtgatctcacataagggcgatctgcggtacatcaccatcagcggcaatcgggttctggaagctgcaaaaagctgttctaaaagagacggagggaaggtcgacacaagtgccactcatcgggaggtgcagcgcaaactggaccatgcgacagatcgtttccggagcctgtactctaaatgcaacgtcctgggaaataatctaaaagatctagttgataagtatcagcactatgaagacgcaagttgcgggctgcttgctggcttacaggcttgcgaggccaccgcctccaaacacctgtcagagccaatcgcagtagatccaaagaacctgcagaggcagctcgaggagacgaaagccctgcagggccagatatctagccagcaagtcgccgttgaaaagctgaagaaaactgcagaggttctactcgacgcccggggcagtttgctgcccgccaaaaatgacattcaaaaaacattggacgatatcgttggcagatacgaggacttatccaagagtgtcaatgagcgtaacgagaagcttcaaatcacactgactaggtcattaagcgttcaggatggcttagatgaaatgctggactggatgggtaacgtcgaaagctcactcaaggaacagggacaggttccactgaattcgaccgccttacaggacatcatatctaaaaatattatgctggagcaagacatcgccggcaggcagtcaagtatcaacgctatgaatgagaaagttaagaaattcatggagacgactgacccctctactgcttcctctctacaagcaaagatgaaagatctgtctgctcggttctcagaggcttcccacaagcacaaggagacactggcaaagatggaagaactgaaaactaaggtcgaactgtttgagaatctctcagaaaagctgcagacattcctggagacaaagacccaggctttgactgaggtcgacgtcccagggaaggacgtgacagagctgtcccagtatatgcaggaaagcacttctgagttcctcgaacacaagaagcacttagaggtgctgcactccctgcttaaagaaattagcagtcacggcctgccgagcgacaaggcgctagtgctggagaagaccaacaacctctcaaagaaattcaaggagatggaagacacaattaaggagaaaaaagaggccgtgactagctgtcaagagcagttagacgccttccaggtgctcgtgaaatccctcaaatcctggattaaggaaaccaccaaaaaagtaccaattgtgcagcctagctttggtgctgaagacctgggaaaatcactggaggatactaaaaagcttcaggagaaatggagtctaaagacacccgagattcaaaaggtgaacaattctggcatcagtttatgtaacctcattagtgccgttacgacgcctgcaaaggccattgctgcagtgaaaagcggcggggccgtcctgaatggcgagggcacagcaaccaatactgaagagttttgggccaacaaaggcctgacaagcattaaaaaagatatgaccgatatctcccacggatacgaggatctgggattgttgctcaaggacaagattgccgagctaaacacaaagctatctaagctgcagaaagcccaggaagagagctccgccatgatgcagtggctccaaaaaatgaacaaaaccgcgaccaagtggcagcaaacccccgcgccaaccgacaccgaagcagtgaagactcaagtcgagcagaataagtcatttgaggcagaactgaaacagaacgttaacaaggtccaggagctgaaggacaaactgacagagctcctcgaggagaatccagacacgcccgaggccccacgctggaaacagatgctcactgaaatagattctaagtggcaagagctgaaccagctaactattgatcgccagcaaaaacttgaagaaagctcaaacaacttgacacaattccagacagtggaagcgcagctgaaacagtggctggtcgagaaagagctgatggtatccgtcctcgggcctctttcgattgacccaaatatgctgaatacacagcggcagcaggtgcagatcttgctccaggagtttgcaactagaaagccacagtatgagcaattgacggcagccgggcagggtatactctccagacccggcgaggacccatctctgcggggtatcgttaaagagcagctggctgctgtcacacagaagtgggactctttgacaggacagctgagtgatagatgcgactggatcgaccaggccatcgtgaagtcaactcagtatcagtcccttctgcgttccctatctgacaagctgagcgacttggacaataaattgtcgagcagcctggcagtgtcaactcatcccgacgccatgaaccagcagttggagaccgctcagaaaatgaagcaggagatccagcaggagaagaaacagataaaggtcgctcaagctttatgcgaagacctttcagcactcgttaaagaagagtacctgaaggctgaactctctcgccagcttgagggtattttaaaatccttcaaagacgtagagcagaaggcggagaatcatgtgcaacacttgcagtctgcttgcgccagcagccatcaatttcagcagatgtcccgtgactttcaggcctggcttgatacaaagaaagaagaacagaacaaatctcaccctatcagcgctaaactcgatgtgctagagagcttgatcaaagaccacaaagacttttctaaaaccctaacagcccagtctcacatgtacgagaagacaattgctgagggcgaaaatctgctgctgaagacacagggatccgagaaagccgcgctccaactacagctgaacacaattaagactaactgggacaccttcaacaagcaggtcaaggaacgggaaaacaaactcaaagagagtctcgagaaagccctgaagtataaggagcaggtagaaaccctgtggccctggattgacaagtgccagaataatctcgaagaaattaaattctgtttggaccccgccgagggagaaaacagcattgccaagcttaaatctctacaaaaagagatggatcagcatttcggaatggtcgagcttctcaataataccgcaaattccttactgagcgtgtgcgagattgacaaggaggttgtgacagacgagaataagtcacttatacagaaggtggacatggtaaccgagcagctgcactctaaaaaattttgccttgagaatatgacacaaaagtttaaagaatttcaagaggtctcaaaggaatcaaaaaggcaacttcagtgcgccaaggagcaattggatattcacgacagcctggggtctcaggcttattccaataaatacttaacaatgctccagacccaacagaaatcactgcaggcccttaaacatcaggtggatctcgccaagagactggcccaagacctggtcgtggaagcatcagactcaaagggcacgtcggacgtgttactgcaggtggagactatcgcccaggaacacagcactctgagtcagcaggtagatgagaagtgtagttttctggagacaaagttgcaggggattggtcactttcagaatacaattcgggagatgttctcccagttcgctgaattcgacgacgagcttgactccatggccccagtcggacgcgatgcagaaactcttcagaaacagaaagaaacaatcaaagcgtttctgaagaagcttgaggcactgatggccagtaacgacaacgctaacaagacttgtaagatgatgctggccaccgaagaaacctcgcctgatctggtgggtattaagagagatctggaggctttgtcgaagcaatgcaataagctcctggatcgggcacaagctcgagaggaacaggtcgaaggaacaattaagcgcctggaagaattttactcaaagctgaaggaatttagcattctactgcaaaaggccgaggaacatgaggagagccaaggaccagtgggcatggaaaccgaaacaattaatcagcaactgaacatgtttaaagtgttccaaaaagaggagatagagcctctgcaggggaaacagcaggatgttaactggctggggcaaggtctcatccagtccgctgctaagtccactagtacgcaaggcctggagcatgacctcgatgacgtgaatgcccggtggaaaacgttgaacaaaaaagttgcgcagcgggctgcccaactgcaagaggcactgctgcactgtggtcgattccaagacgccctggaaagcttactaagctggatggtggatactgaagagcttgtggcaaatcagaagccaccctctgccgaattcaaggtggtgaaggcacagatccaggagcaaaagctcctgcaaaggctacttgacgatcgtaagtcgacagtcgaagttatcaaacgtgagggggagaaaatcgccacaacagcagaacccgcggataaggtgaagatccttaagcagcttagccttttagactcgcgctgggaagcgctgctgaacaaggctgagacccggaatcgccaattggagggcattagtgtggtagcacagcaatttcatgaaacactggaaccattaaacgaatggttaaccaccatcgaaaagcgactggtaaactgcgaacctatcgggacacaggcctctaaattggaggaacagatagcccagcataaggcgctggaagacgatattatcaaccacaataagcatctccaccaggcagtctcaatcgggcagagcttaaaggtgctgtctagtcgtgaagacaaggatatggtgcagtccaagctggacttctctcaggtctggtacatcgagattcaggagaagtcacacagtcgtagcgagctcctacaacaggccctctgtaacgccaagattttcggagaggacgaggtcgaattaatgaactggcttaacgaggtgcatgacaagctgagtaaactcagtgttcaggattatagcacagaagggctatggaagcagcagagcgaattgcgcgtgctacaggaagacatcctgctcagaaaacaaaacgttgaccaagctttgctaaacggactggagctgttaaaacagacgaccggagacgaggtgctgataattcaagacaagctggaggccattaaggctcggtataaagacattaccaaactctcaacggatgtcgcgaaaacgttggagcaagccttgcaacttgcccgccgcctgcactcaacacacgaagaactgtgtacctggttggacaaggttgaagtggaactgctgtcctatgaaacacaagtgttgaaaggggaagaagccagtcaggcccagatgagaccaaaggagttgaagaaggaagctaagaacaacaaagcactgctggacagcctcaacgaggttagttcagctctactcgaactggtcccttggcgggccagggagggtctggagaaaatggtcgccgaggataacgagcggtaccgtctggtcagcgacaccattactcagaaggtcgaagaaatcgatgccgctatcctccgctcacaacagtttgaccaggccgccgacgcagagctttcatggatcactgaaacagagaagaagctgatgagcttgggcgacattcgtctggagcaggaccaaacgagcgcccagttgcaggttcagaaaaccttcactatggaaatcttgcgccataaggatatcatcgacgacttagttaaatctggtcacaaaattatgacggcttgtagtgaagaagaaaaacagtccatgaaaaagaagcttgataaagttctgaaaaactacgatacaatctgtcagatcaatagtgaaaggtatctgcaactggagcgggcccagtctttggttaatcagttctgggaaacgtacgaggagctctggccatggttaacagagacccaaagtatcattagccagctcccggcccccgccctggagtacgaaaccctgagacagcagcaagaggagcaccggcagctgcgggaactgatcgccgagcacaagccgcacatagacaagatgaacaagacaggtcctcaattacttgagttatctcctggagaagggttcagtatacaagaaaaatatgtggccgctgatacactctactctcaaatcaaggaagatgtcaagaaaagagcggtggccttagacgaggctattagccagtccacccagtttcacgacaagatcgatcagatcctcgaatcactggaacggatcgtggagaggctccgccaacccccgtccatttctgcagaggtcgaaaaaattaaagagcagataagtgagaacaaaaacgtgagtgtggatatggagaagctccaacccctgtatgagacactgaaacagaggggagaggaaatgattgccaggagtggcggcacagacaaggatattagcgccaaggcggtgcaggacaagttggatcaaatggtgttcatctgggagaatatccatactctcgtggaagagcgagaggccaagcttctcgacgttatggagctggccgaaaagttctggtgcgaccatatgtcccttatcgtaactatcaaagacactcaggacttcatccgcgacctggaggacccgggcatagacccgtctgttgtgaagcagcagcaggaagctgctgagaccatcagggaagagatcgacggccttcaggaggagctcgacatcgttatcaatctgggatctgaactgatcgcagcttgtggagagcccgacaagccaattgttaaaaagagcatcgacgagctgaactcggcttgggatagccttaataaggcatggaaagatagaatcgataaattggaagaggcaatgcaggctgcagtccagtaccaggacggcctccaggctgtgttcgactgggtggacatagcgggcggcaaactcgctagcatgtcaccaatcggaacagatctcgagactgtgaaacagcagatcgaggagctcaagcagttcaagtcagaggcatatcagcagcagatcgagatggagcgcctgaaccaccaggccgagctattattgaaaaaggtaactgaggagagtgacaagcataccgttcaggatcccctcatggaactgaaactgatttgggatagtctggaagagcgcattattaataggcagcataaactggagggcgcattgctagctctaggccagttccagcacgctttggatgaactgctagcctggctcactcacactgagggcctgctgtcagaacagaaacccgtgggtggagacccaaaggccattgaaatcgaactggccaagcaccacgtgctccaaaacgatgtactcgcccaccagagtaccgtggaagcagtcaacaaggctggcaacgatttgatcgagtcttctgcaggagaggaagcatcgaacctgcagaataagcttgaggttctcaatcaaaggtggcagaatgtattggagaaaactgagcagcggaagcaacagctagacggcgctttacgccaagccaagggatttcacggcgagatcgaagacctccagcagtggctcacggacacagagcgacacctgctggcctctaagcctctgggagggctcccggagacagctaaggaacaattgaatgttcacatggaggtttgcgccgcttttgaagccaaggaagaaacttataaatctcttatgcagaagggtcagcagatgcttgccagatgtcctaagagtgctgaaacaaacattgaccaggatattaacaatctgaaagaaaaatgggagagtgtggagaccaaactaaatgagcgcaaaactaaattggaagaggctcttaaccttgccatggagttccacaacagtcttcaggacttcattaactggctgactcaggcagaacagacattgaatgtggccagccggcccagcctgatccttgatactgtgctgttccagatagacgaacataaagttttcgccaacgaagtcaatagccacagggaacagattatcgagctagataagactggcacacacttgaagtacttctcacagaaacaggatgtggttcttatcaaaaacctcttgattagcgtacagagtaggtgggagaaggtagtgcagaggctggttgaaagggggcggagtcttgatgacgcaagaaagagggcaaagcagttccatgaggcctggtccaagttaatggagtggctcgaggagtccgagaagtctttagacagtgagctcgaaatcgcgaacgaccccgacaaaattaagacacagctcgcacaacataaggaattccaaaagagcctgggcgctaaacactccgtgtacgatacaaccaatagaactggaaggagcctcaaggagaaaacatcacttgcagacgacaacctaaaactagatgatatgctgtcggagctgagagacaaatgggacacaatctgcgggaaaagcgtggagaggcaaaacaagctggaggaggctcttctgttttctggacaattcactgatgccctgcaagctttgattgactggctgtatagggtggaaccacaacttgcagaagaccaacccgttcacggagacattgatctagtgatgaatctcatagacaatcataaggcctttcagaaagaacttgggaagcggacgagctcggttcaagccctgaaacggagcgctcgcgaacttatagagggaagccgtgatgactccagttgggtaaaagtgcagatgcaggagttatctacacgctgggagacagtatgcgccctttcaatatccaaacagacccggctggaggccgcactgcgacaggccgaggagttccacagcgttgtgcatgctctcctggagtggctggctgaagcagaacagactttgcggttccacggcgttctgcccgatgacgaggatgccctccgcaccctcatagaccagcacaaggagtttatgaagaagcttgaagaaaagagagcagaattgaacaaggcaaccaccatgggcgatacagtgctcgccatctgtcatccagacagtatcactaccatcaagcactggatcactattatacgggcccggtttgaggaggttctggcttgggccaagcaacaccagcagcgactggccagcgcattagccgggctcatagcgaaacaggaattactcgaagcgctcctggcttggctgcaatgggcagagaccaccctcaccgacaaggataaggaggtaatccctcaggaaatcgaagaggtaaaggctcttatcgccgaacatcaaacatttatggaagagatgacacgaaagcagccagacgtcgataaagtgacaaagacatataaaagacgtgctgccgatccctctagtttgcaaagtcacatcccggtgcttgataaaggccgggccgggagaaagagattccctgcaagtagtctctatcccagtgggtcacaaacacagatagaaacgaagaaccctcgggtaaacctgttggtctcaaaatggcagcaggtctggctgcttgcactggagcgacggagaaagttgaacgacgcactggatagactcgaagagctgcgtgaattcgcaaacttcgacttcgatatctggaggaagaaatatatgcgctggatgaatcataaaaagagcagggtgatggatttctttagaaggatcgataaagaccaggacggtaagatcactcgacaggaatttatcgatgggatcctcagcagcaagttccccacctcccggctggagatgagcgcagtggcagacatcttcgatcgagatggcgatgggtacatcgactactatgagttcgtcgcagccctgcaccctaacaaagatgcctacaagcccatcaccgatgccgacaagatcgaggacgaggtgaccagacaggtggctaaatgcaagtgtgctaaacgcttccaagttgagcagattggcgacaataagtaccgggtgagctttcagagtaacttcggggacagtcagcagctgcgattagtacggatactgagatccaccgtaatggtacgtgtggggggtggatggatggcattagatgagttcctggtgaaaaatgacccgtgtcgcgtgcatcaccatggtagcaagatgctgcggtctgagtccaacagtagcatcactaccacccagcccacaattgcaaaaggccgtacgaatatggagctgcgagagaagtttatccttgcggacggcgctagtcaaggcatggccgccttccggcctcgcggaaggcggtctcgcccatcttcacgaggggcctcaccaaaccgaagcacgagcgtctccagccaggcagcccaggccgcatccccacaagtgccagctaccacaacgcccaagggcacacccatacagggatccaagttgaggctgcctggctacttgagtgggaaagggttccactcaggggaggattctgggctgatcaccacagccgctgcccgcgttcgtacccagttcgccgattccaaaaagacaccgtccaggccaggtagtagagctggaagcaaagctggctcccgggcatcatctcgaaggggcagtgacgcttcagattttgacattagcgagatccagagcgtgtgtagcgacgtagaaaccgtccctcagacacaccggcctaccccgcgtgcaggatctaggccaagcacggctaaaccctcaaagattccaacaccacagaggaagagcccggcttctaagcttgataaatctagtaaaagatag

SEQ ID NO: 269249 - DNA, 23253 bp, Artificial Sequence
  derived and/or modified sequence
atgattgccgctgctttcttagtgcttctgaggccctacagtatccagtgtgcactgttccttctcctgctcctgttaggcacgatagctactatcgtttttttttgctgctggcaccggaaactacagaaggggcgacacccaatgaaaagcgtgttcagtggacggtcgagatcacgtgacgctgtgttgcgctctcaccatttcagatccgagggcttcagggcaagtcccagacatcttcgtagaagagtggcagccgcagccgctgccagactggaagaagtgaaacctgtggtggaggtccaccaccagtccgaacaggaaacaagcgtcagaaagaggaggattaagaagagcagcagagtacagcccgaattttaccactctgtgcaaggcgcttcaattcggaggcccagctccggtaacgcgagttataggtgcagcatgtcgtcctctgctgattttagcgacgaggacgatttttcccagaagagtggcagcgcctccccagcaccaggcgacaccctgccctggaacctgcccaagcacgagcggtctaagcgcaaaatccagggcggttctgtgttggatcctgctgaacgagccgttttgaggattgccgatgaacgcgacaaagttcagaaaaagaccttcacaaaatggattaatcagcacctgatgaaagtgcgcaagcacgtgaacgatctctatgaagacctgagagacggtcacaacctaatctcacttctggaagtcctgtctggagacaccttgccgcgtgaaaaagggagaatgaggttccaccggctccagaacgtgcaaatcgctctagattacctgaaaaggagacaagtgaaacttgtgaatattcgcaatgacgatattacggacggcaatccaaagctgactttggggctgatctggacaattattcttcactttcagatcagcgatatccatgtcaccggggaatctgaggacatgagcgccaaggagcgcctgttgttgtggacacagcaggcaaccgaaggatatgccggtatccgatgtgagaacttcacaacatgttggagagatggaaagctttttaatgcgattattcacaaatataggcccgacttgatagacatgaacaccgttgccgtgcagagcaacctggctaatctcgagcacgccttttatgtcgctgaaaagatcggtgttatacgactgctggaccctgaagacgttgacgtgtcaagccccgatgagaaaagcgtgataacttatgtgtcaagcctgtatgatgctttccccaaggtccccgagggcggagagggtataggagctaacgacgtggaggtaaaatggatagaatatcagaatatggtaaattatctcattcaatggatccggcaccacgtgactactatgtctgagagaacttttccgaacaaccctgtggagttgaaggctctgtataaccaatacttacaattcaaagagacagagatccccccaaaagagaccgagaagagtaaaatcaaaagattgtacaaattactggagatatggatcgagtttggacggataaaactccttcaggggtaccacccaaatgacattgaaaaagaatgggggaagcttattattgcgatgttggaaagggagaaagctttacggcctgaagttgagcggctggaaatgctccaacaaattgcaaacagagtgcagcgcgacagtgtgatctgtgaggacaaactaattttagccggtaatgctctgcagagtgattcaaagcggctggagagcggggttcagttccagaacgaggccgagatcgccggttacatcctggagtgtgaaaacctgctgagacaacacgtcattgatgtacaaatactgatcgacggaaagtactaccaggccgaccagctagtccagagggttgccaagttacgtgacgagatcatggcacttagaaacgagtgctcgagcgtgtactccaagggacggattctgacgacggaacagacgaaattgatgataagtggcattacgcagagtcttaactcgggattcgcgcagacactgcacccaagtctaacaagtggactgacccagtcattgacaccgtcactgacttcctccagtatgacttcagggctgtctagtggcatgacctctcggctgactccctctgtgactcccgcttacacacctggcttcccaagcgggctggtgcctaacttttcgtctggggtggagcccaatagcctgcagacactgaaactgatgcaaattcggaagcccttgctgaaatcttctctgttggatcagaacctgacagaggaggagattaatatgaaatttgttcaggaccttttgaactgggtggacgaaatgcaggttcagttggaccgtacagagtggggatctgatctgccatcagtcgaatctcatcttgaaaaccacaagaacgtccatagagctattgaagagttcgagtcatccttgaaggaggcaaaaataagtgaaatccagatgaccgcccctctgaaactgacgtatgcggaaaaattgcaccggctggagtcacagtatgccaagctactgaatacctcacgaaaccaggagcgtcatttggacaccctgcacaacttcgtttctcgcgcaactaacgaacttatttggctgaatgaaaaagaggaggaggaagtggcctatgactggtccgaaaggaacactaacattgctcgaaaaaaggactatcacgctgagctcatgagagaactggaccaaaaggaagagaacatcaagtctgtgcaagagatcgcagaacagcttctgctcgagaatcacccagccagactgacaatagaggcctacagagctgccatgcaaacacagtggtcttggatacttcagctgtgccagtgcgtggagcagcacatcaaggagaataccgcatactttgagttcttcaatgacgctaaagaggcaaccgattacctgcgaaacctcaaggatgccatccagagaaaatactcctgtgatcgctcctcaagtatccacaagttagaggatctggtccaggagagcatggaggagaaggaagagttactgcagtacaagtccactatcgctaaccttatggggaaggctaaaacgatcatccagctgaaacccagaaattcagattgccctctgaagacgtccatcccaatcaaggccatatgcgattacaggcagatagagatcactatctacaaagatgatgaatgcgtgttggccaataactcccaccgtgccaagtggaaggtgattagcccaacgggtaatgaggccatggtcccaagcgtgtgtttcacggtgccacccccaaacaaggaggccgttgacctagccaaccgcattgaacaacagtaccagaatgtgttgaccctatggcacgagagccacatcaacatgaagtctgtagtgagctggcactaccttatcaacgagatcgatagaatccgggcttctaatgtggcttctattaagaccatgttgcccggagagcaccagcaggtgctgtctaacctgcagagccggtttgaagactttctggaagactctcaggagtcccaagtcttctccggatccgatattactcagctggagaaagaggtaaatgtgtgtaagcaatactaccaggaattgctcaaaagtgctgaacgagaggagcaggaagagtccgtttataacctttatataagtgaggtcaggaacatccgcctacgcctcgagaactgcgaagacaggctgatcaggcagataagaacaccactcgagagagatgatctgcacgagtcagtctttaggataacagagcaagagaagttgaaaaaagaactcgagagactcaaggacgacctaggaaccataactaacaaatgcgaggaattcttcagccaggcagccgcatcatctagcgtcccgaccctgaggtctgaactaaatgtcgtgctgcagaatatgaatcaagtgtactccatgtcctcgacctacattgacaagctcaagaccgtcaacctggtgctcaagaacacacaagccgcagaggcgctcgtcaagctgtacgaaactaaactgtgtgaagaggaggctgtgatcgccgacaagaacaacattgaaaacctgatctctaccctgaaacagtggcggagtgaagtagacgagaagcgccaagtcttccatgctctggaggacgaattgcagaaagcaaaggccatcagtgatgaaatgtttaagacttacaaagaaagggatctggacttcgattggcacaaggagaaagctgatcagctggtggagcgctggcagaacgtgcacgtccaaatcgacaaccggcttcgggatctggagggaatcggtaaaagcttaaagtattatagggatacctatcacccgttagatgattggatccagcaggtggaaaccacccagcgcaagatccaggaaaaccagccagagaactccaaaactctggccacccagctcaaccagcaaaagatgctggtgtcagagatcgagatgaagcagtcgaagatggatgaatgccagaagtatgccgagcagtattcggctactgtaaaagattacgaacttcagaccatgacttaccgagccatggtcgattcccagcagaaatctcccgtcaagaggcgtaggatgcaaagctcggctgatctgattatccaggagttcatggacctgcgcacacggtacactgcactggttaccttgatgactcagtacatcaagttcgccggagacagccttaagcgactggaggaggaggagaagtcgctggaggaagagaaaaaagaacacgttgagaaggcaaaagaactgcaaaagtgggtctccaatataagcaaaactctgaaggacgccgaaaaggctggaaagcccccattcagcaagcagaaaatctcatctgaagagataagcacgaagaaggaacagctgagtgaagcactgcagacgatccaactgtttctggctaaacatggcgacaagatgaccgatgaggaaaggaatgagctggaaaaacaagtcaaaaccttgcaggagtcctataatctgctgttcagcgagtccctgaaacagctgcaagagagccagacaagtggggatgtgaaggtggaggagaagctggataaagtgattgctgggaccatagaccagactaccggggaggtcctttctgtctttcaggctgtacttcgcggtctgatagactatgacacggggatccgactgctggagacacagctgatgatttcaggcctaattagccctgagcttcgcaaatgcttcgacctgaaggacgcgaagagccacggactgatagatgagcaaatcctgtgtcagctcaaggagctatctaaggccaaggaaattattagcgcagcctcccccaccactattcccgttttggacgccctcgcgcagagcatgatcacggagagtatggcaattaaagttttagagatattactgtccaccggatcactcgttatccccgctactggcgagcagctgactttgcagaaggcattccagcagaatctggtcagtagtgccctgttttctaaggtcttggaacggcaaaatatgtgtaaggatctgatcgatccctgtacctctgaaaaagtatcacttatagatatggtgcagcgctcaacgctgcaggaaaacactggcatgtggttgcttccagtgcggcctcaggaggggggtaggatcactctgaagtgtgggaggaacatctctattctcagagcagcccacgagggacttattgaccgggaaactatgtttcggctgttgtcagctcagctgctgtctggcggactgatcaattctaacagcggacaacgcatgaccgtggaagaggcggttcgagagggcgtcatcgacagggatactgccagctcaatccttacttatcaagtccagactggaggcataatacagagcaacccagccaagcgcctcaccgtggacgaagctgtccagtgcgatctaatcaccagttcgtccgctctgctggttttagaggcgcagcgcggttatgtcggccttatttggccccatagcggtgagatctttccaacatcctcctccctgcaacaagagcttattacaaatgagctagcctacaagatactgaacgggcgtcaaaaaatcgccgctctctatattccagagagctcccaggttattggactggatgcagcaaagcagctgggcataatcgacaataacactgcttctatcttgaagaacattaccctgcctgacaagatgccggacctcggcgaccttgaggcctgcaagaatgcccgacgctggttaagcttctgcaagttccaaccttcaacggtgcatgactaccgccaagaggaagatgtgttcgatggggaggaaccggtgacaacgcagacctcagaagaaacgaaaaagctgtttctctcctatctcatgatcaattcctacatggacgctaacactggacaaaggctgctgctctacgacggggatctggatgaggctgtaggtatgcttttagagggctgtcatgcagagttcgacggcaatactgctattaaggagtgtctggacgtcctgagcagcagtggggtgtttcttaacaacgcttcagggagagaaaaggacgagtgcactgcaacacctagttctttcaacaaatgtcattgcggcgagcctgagcatgaggaaaccccagaaaatagaaaatgtgctattgacgaagagttcaacgaaatgcggaacacggtaataaacagcgagttttcacagtctggtaagctcgccagtacaatcagcatcgacccgaaagtgaatagctcacccagtgtctgtgttccgtccctgatttcctatctgactcaaaccgagctggcggacatctcaatgctaaggtcggattctgagaatattctgacaaattacgagaaccaaagcagagtggagactaacgaaagagcaaacgaatgttcacactcaaagaatatccaaaattttcccagcgatctcatagaaaaccctatcatgaagtccaaaatgagcaagttctgcggagtaaatgaaaccgaaaacgaagataatactaatagggactcgcccatttttgactactcacctcgccttagtgctctgttatcccatgataaactgatgcactctcaaggaagcttcaacgatacccatactccagaatctaacggaaacaaatgtgaggcccctgccctgtctttttcagataaaaccatgctctccggacaacgtataggcgaaaagtttcaggaccaattcctgggcattgctgcaatcaacatttccctgccgggagagcagtatggccagaaaagtctgaacatgatctcgagtaatccacaggttcagtaccataatgataaatatatctcaaacacatctggcgaggacgaaaagacacacccaggtttccagcagatgccagaagataaggaggacgagtccgagatagaggagtacagctgtgccgtaaccccaggcggagatacagacaacgcaattgtgtctctgacctgcgcaactccacttctggacgaaactatctcagcaagcgactatgaaacctccctgttgaacgatcagcagaataataccggcaccgacacagattcagacgacgacttctacgatacaccactgttcgaagatgatgaccacgattccctgttactggacggagacgaccgagactgcttacatccggaggactacgacaccctgcaggaggaaaatgacgagacagcatccccagccgatgtgttttacgacgtgtcgaaagagaatgagaacagcatggtgcctcagggcgctccagtaggatcactgagcgtcaaaaataaagcccattgccttcaggacttccttatggacgtggagaaagatgagttggatagtggcgagaaaatccacctgaacccggtcggctccgataaggtgaatggtcagtcgctcgagaccggatctgaacgcgagtgcacaaatatattagaaggggatgagagcgattcactcacagattatgacattgtcggagggaaagaatcattcactgcgtccctcaaattcgacgactcaggaagctggagggggcgtaaggaggagtacgtcaccggccaggaatttcattccgatactgaccacctagactcaatgcagtcagaagaatcttacggggactatatttatgatagcaacgatcaggatgacgatgacgacgacggtattgatgaggagggtggcggtatccgcgacgaaaatggtaagcccaggtgtcagaatgtggcggaggatatggatattcaactgtgtgcaagcatcctaaatgagaactcagacgaaaacgaaaacatcaacaccatgatcctgttggataaaatgcattcctgctctagcttggagaagcagcaacgggtgaacgtagtccagctcgcctccccaagcgagaataatctcgtgacagagaaatccaacctccccgaatataccacagaaatcgcaggaaagagtaaggaaaatctgctaaaccacgaaatggttctgaaggacgtacttcccccaatcatcaaggacacagaaagtgaaaagaccttcggacctgccagtatcagccatgacaataacaacatcagtagtacaagtgagttgggcacagatctcgccaatacgaaggttaaactgatacaaggaagcgaactcccagaactgaccgactctgtcaagggtaaagatgaatacttcaaaaatatgacaccaaaagtggatagttcccttgatcatataatttgtacggagcccgatcttattggtaagccggctgaggaatcgcatctgtcactcatcgcctcagtcacagataaggacccccaggggaatggcagcgacctgattaaaggccgtgatggcaaatctgatatcctcatcgaggatgaaacaagcatccagaagatgtatctgggtgaaggcgaggtcttagtggagggcctagtggaagaggagaatcgacatttgaagctgctgcctggaaagaatacacgagactcctttaagctcatcaactcccagtttcctttcccgcagattactaacaacgaggagttgaaccagaaaggatctctgaagaaagctaccgtgaccctcaaagacgaacccaacaatcttcaaatcatagtgtccaagagtccggtccagtttgagaatctcgaagagatcttcgacacgagcgtttctaaggaaatttctgacgacatcacttctgatatcactagttgggaggggaacacacatttcgaagaatcctttactgatggacctgaaaaagagctggacctgttcacgtaccttaagcattgtgccaaaaacattaaggctaaggatgttgcaaaacctaatgaagacgtcccgagccatgtcctcattacggcgccacctatgaaggagcaccttcagctcggagtaaacaacaccaaggagaagagtaccagtactcagaaggacagccccctgaacgatatgattcaaagcaatgatctgtgtagtaaggaaagtataagcggaggtggtaccgagattagtcagtttacacccgagtctatcgaggcgacgctctccattctgtcaagaaaacacgttgaggacgtggggaagaatgattttcttcaatctgagcggtgcgcgaatggccttggaaatgataatagttcaaacacactgaacactgattacagcttcttagaaataaacaacaagaaagagcgcattgaacagcagctcccgaaagaacaggcattaagtccaaggtcgcaggagaaagaagtacaaattccagaattaagtcaggtgtttgtcgaggatgtaaaagacattcttaaatcacgtctgaaagagggccacatgaacccgcaggaggtggaagagccttccgcgtgtgccgatacaaaaattttgatccagaaccttattaagaggatcactacttcccaactggttaatgaggccagcactgtgccaagcgacagtcagatgtcggatagctcaggtgttagccctatgaccaatagctccgagttgaaacctgagtctcgtgatgatcctttctgcataggaaacctcaagagtgagcttctgcttaacatactaaagcaagaccagcacagtcagaaaataactggggttttcgaactcatgagggaattgacgcacatggaatatgatctagagaaacgcggaataaccagcaaggtgttgccactgcaactggagaacattttttataaactgctggctgacggctacagtgagaagatcgaacacgtaggcgattttaatcagaaggcatgtagcacatcagaaatgatggaagaaaagccacatatcttgggcgacattaagagtaaggaaggtaactactatagcccgaaccttgaaaccgtgaaggaaatcggactggaatctagtacagtttgggcctccaccttacccagggacgagaaattaaaagatctgtgcaatgactttcctagccaccttgaatgcacaagtggctccaaggaaatggcctctggagacagttctactgagcagtttagttccgagcttcaacagtgccttcagcacacagagaagatgcacgagtacttaacccttctgcaggatatgaaacccccactcgacaatcaggaatccctagacaacaatctcgaggcgctcaagaatcaactcaggcagctggagacctttgagttgggactcgctcccattgcagttatcctgcggaaagacatgaagctagccgaggaattcctcaagagtctgcccagtgattttcctagagggcacgtagaagaactgagcatatctcaccagtcactgaagacagccttttcctccttgtctaacgtttcctccgaaaggaccaagcagattatgctggccatagattcggaaatgtctaaactggccgttagccacgaggaattccttcacaaactgaaatctttctccgattgggtcagcgaaaagtcaaagagtgtgaaagacatcgagattgtaaatgtgcaggattcagagtatgtgaaaaaaagactggagttccttaaggcgaacaatgtcttaaaagacctcggacacaccaagatgcagttggagaccactgcttttgacgttcaattctttatttccgaatatgcccaagatctgtccccaaatcagtcaaagcagctgcttcgattgctaaacactactcagaaatgtttcctcgatgtgcaggaatcagtcacaactcaggttgagcgtctggagacccagctgcaccttgagcaggatctcgacgaccagaaaatcgttgcagagagacagcaggagtacaaggagaagctgcagggtatctgcgacttgctgacacaaacagagaaccgcttaatcggccaccaggaagcctttatgatcggggacggcacggtggaactcaaaaagtaccagtctaagcaggaggagctgcagaaagatatgcagggttctgcacaggctctcgcggaggtggttaagaacactgaaaactttctgaaggaaaacggagaaaagctgtctcaagaggacaaggccttaatcgaacagaaactgaacgaagcgaagattaaatgtgagcagttaaatctgaaagccgagcagagcaagaaagaattggataaggtggtgactactgctatcaaagaagaaaccgagaaagtggccgcagttaagcaactcgaggagagcaagaccaaaatcgagaacctcctcgactggctgtcaaacgttgacaaagatagcgagagagccggaactaaacacaagcaggtgatagagcagaatgggacccattttcaggaaggtgacggcaaatccgccatcggcgaagaggatgaggtgaatggaaacctgctggagacagatgtagatggtcaggtcggaacgactcaggagaacctcaatcagcagtatcagaaagtaaaagcccagcacgaaaaaattatttcccagcatcaggcggtgattatcgcaactcagtctgcccaggtactgctcgagaagcagggccagtatttgagccccgaagagaaagaaaagctccagaagaatatgaaggagctgaaagtgcactacgaaacggccctggctgaaagcgaaaagaaaatgaagctgacccacagcctgcaggaggaactggagaagttcgacgcggactatacagagtttgagcattggctgcaacagtccgagcaggagctggaaaacctggaggccggagcagatgatatcaatggactcatgactaagttaaagcgtcagaaatcattctcagaagatgtcatttcccacaagggggacctgcgatatattaccatttcaggaaatcgtgtgctggaggctgccaaatcttgttcaaagcgggacggcggaaaagtggataccagcgcaacccatagagaggtgcaacgaaagctggaccatgccaccgacagatttcgcagtctttactctaaatgtaatgtcctcgggaacaatctgaaggatctagtcgataaatatcagcactatgaggacgcgtcttgcggccttctggccggactgcaggcctgtgaagctacagccagcaaacacctcagtgaaccaatcgccgtcgatccaaaaaatctccagagacaactggaggaaaccaaggctcttcagggtcagatatccagtcagcaagtggccgtcgaaaagctcaaaaagacagccgaggtcctcctggatgccagaggtagcctgttacctgcaaaaaatgatatacaaaaaaccctggacgacatagttgggagatatgaggatctgtccaaatccgtgaatgagcgaaatgaaaagctacagattactttaactcggtctctatccgtacaagatggcctcgacgagatgctggactggatgggtaacgtcgagtcctctctcaaagaacaggggcaagtgcctctgaattccaccgctctccaggatattataagcaagaacattatgctggaacaagacatagcgggtcgtcaatcatcgattaatgcgatgaacgaaaaagtaaagaagttcatggagacaacagatccctccaccgcttcgtcacttcaagcaaagatgaaggacctctccgcccgttttagtgaagcttcccacaaacataaagagacacttgcgaagatggaggagctgaagaccaaggttgagcttttcgaaaacctgtccgaaaaattgcagaccttcctcgaaacaaaaacccaagctcttacggaggtggacgtgcctggcaaagacgtgaccgaattgtctcaatacatgcaagaatccaccagcgaatttttagaacataagaagcatctcgaggtcctgcactccctcttgaaagagatatcatcacacgggctgccatccgacaaggctctggtactggagaagaccaataatctcagtaaaaagtttaaggaaatggaggacactattaaggaaaaaaaagaggccgtcacctcatgccaagaacagctggatgcattccaggtcctggtcaaatcgcttaaatcgtggattaaggagactaccaagaaagtccccatagtgcagccaagctttggagccgaggaccttggcaagtccctcgaggacaccaaaaagcttcaagaaaagtggagtttgaagactccagagatccagaaggtgaacaactctggcatttctctgtgcaatctgatatctgcggtcacaacccctgctaaggcaattgctgcagtgaagagtggcggagccgtgctgaacggggaaggcaccgctacaaacacggaagaattctgggccaataagggacttacctccattaaaaaagatatgactgatataagccatggatacgaggacctgggtctgctactcaaggacaagatcgcagagttaaatacaaagctttccaagctgcagaaggcccaggaggagagtagtgccatgatgcagtggttgcagaagatgaacaagactgcgacgaaatggcagcagactcccgcacctactgataccgaagccgtgaaaacacaggtcgaacagaataagagttttgaagcagaactgaagcagaacgtgaacaaggttcaggagctgaaagataagctgacggaactgctggaagagaatcccgatacacctgaggcaccaaggtggaagcaaatgttgacggagattgatagtaagtggcaggaacttaaccagctgactattgatagacagcagaaattggaggaaagctccaataatctcacccagttccaaacagtcgaagcccagctgaaacagtggcttgttgagaaggagttgatggtgtctgtgttgggtccattatctatcgaccctaatatgctgaacactcaaaggcaacaggtacagattcttcttcaggaattcgctacacggaaaccacaatacgagcagctcacggcagcagggcaagggattctgagtaggccaggggaggacccctccctgagaggtatagtaaaggaacagcttgcagccgtgacacaaaaatgggactccctcactggccagctatccgatcggtgtgattggatcgaccaggcaatcgttaagtctactcagtatcaatcccttctgcgaagtctgtccgataaacttagcgatctcgacaacaagctcagttcgtccctcgcagtgagcacacaccccgatgccatgaaccaacaattagagacagcccagaaaatgaagcaagaaatacagcaggagaaaaagcagatcaaggtggctcaggccctctgcgaggacctgagcgcgctggtgaaggaggaatacctgaaggcagagctctccaggcaacttgaagggattttgaaaagcttcaaagacgtagagcaaaaggccgaaaatcatgttcagcacctgcagtcagcctgtgcttccagccatcagtttcagcagatgagtcgcgacttccaggcctggctcgacactaaaaaggaggagcaaaataaatctcatccgatcagcgccaaactcgatgtgttggagtccctcatcaaggatcacaaagatttttccaaaaccttgactgctcagagccatatgtacgaaaagaccatcgcggagggtgaaaacttgctcctgaagacgcagggcagtgagaaagccgcattgcagctgcagctgaatactatcaaaacaaactgggacaccttcaacaaacaggttaaagagcgcgagaacaagctcaaggagtccttagaaaaagcactaaagtacaaagaacaggtggaaaccctgtggccatggatcgacaaatgtcagaataatctggaagaaatcaaattctgccttgatcccgctgaaggggaaaacagcatcgcaaagcttaagtcgctgcaaaaggagatggaccagcatttcgggatggtcgaactactcaataataccgctaactccctgttgagtgtgtgcgaaatagataaggaagtagtaacagatgaaaacaagtctctgattcagaaggtggatatggtaacagagcaattacattccaagaaattctgtcttgaaaatatgactcaaaaatttaaggagttccaagaagtgagtaaggagtcgaagcgccaactgcagtgtgctaaggagcagctggacattcatgacagtctgggcagtcaagcctacagcaacaagtatctcaccatgctccaaacacagcagaaaagcctccaggctctgaaacaccaggtcgatctcgcgaagagactcgcacaggacttggtcgtcgaagcgagcgacagtaaagggacctcagatgtgctcttgcaggtcgagaccatcgcacaggagcattctacgctgtcccagcaggttgatgagaaatgttcgtttctggaaactaaattgcagggaataggccacttccagaacactatacgcgaaatgttttcccaatttgccgaatttgacgatgaactggacagcatggcaccagtaggacgcgacgccgagacactccagaagcaaaaggagaccattaaagcattcctgaaaaagttagaagcacttatggcctccaatgataatgccaataaaacctgtaaaatgatgcttgccacagaagaaaccagtcctgatctggtggggattaaacgcgatttagaagcactgtcgaagcagtgcaacaagctcctcgacagggcccaggctagggaggaacaggtagaaggtacaatcaagaggcttgaggagttttactccaagctgaaggagttctccatcctcctccagaaggcggaggaacatgaggagagtcagggccctgttggtatggagacagagactatcaaccaacaattgaacatgtttaaagtgttccaaaaagaagaaatcgagcctctacaaggaaagcagcaggacgttaactggcttggccaaggcctgatacaatccgcagcaaaatctaccagcactcaggggctggagcacgatctcgatgacgtaaacgctcgatggaaaaccttaaacaagaaggtagctcagcgcgctgctcagctgcaggaagcgcttcttcactgcggacgattccaggatgccttagaatcactcttatcgtggatggttgacacagaggagctggtggccaatcagaaaccccctagtgcagagtttaaagttgtcaaagcacagattcaggaacagaaactgctgcagagacttctggatgaccggaagtctaccgtcgaagtgataaaacgcgagggggaaaaaatcgctacaaccgcagagccggctgataaagtcaagatcctcaagcaactttctcttctcgattccagatgggaggctctactgaacaaagctgaaactcgcaacaggcagttagaaggaatcagcgtcgtcgcccagcagttccatgaaaccctggagcctttgaatgagtggttgaccacgatcgagaagcgcctagtaaactgtgagcccattggcacacaggcttctaagctggaggagcagattgcacaacacaaagccttagaggatgacatcataaaccacaacaagcacttacatcaggccgtctcaataggacagtcacttaaggtactctcttctagggaagacaaagatatggtgcagagcaagctggatttttctcaagtctggtacattgagattcaggagaagagccatagcagatccgagctcctccaacaggcactgtgcaacgctaagatattcggtgaggatgaagtagagctgatgaattggttgaatgaggtccacgataagctctcaaagctcagtgttcaggactacagtacagaaggcttgtggaagcagcaatccgaattacgtgttctccaagaggacatcctgttgcgcaagcaaaacgtggaccaggctttgctcaacgggctggagttattgaaacagaccactggagacgaggtactcataattcaggacaagctcgaggccattaaggccagatacaaggatattaccaagctcagcactgatgtagccaaaaccctggaacaggccctgcagcttgctcggagactccattccacacacgaggagttgtgcacatggcttgataaggtggaggtggaactcctctcctatgaaactcaggtcctgaaaggggaagaagcgagtcaagctcaaatgaggcccaaagagctgaagaaggaggccaagaacaacaaggcactacttgatagtctcaacgaagtcagttccgcgcttctcgagttggtgccttggcgtgcccgagaagggctcgaaaagatggtggcggaggacaatgaaaggtatcgtcttgtgtctgatactattactcagaaggtggaagagatcgatgcagcaatcctccgctcacaacagttcgaccaggctgctgacgcagagctcagctggataactgagaccgaaaaaaaacttatgagcctgggagatattagactagagcaggatcaaacatcggcccagttgcaagtgcagaagacattcacaatggaaattctcagacacaaagacattatcgatgatctggtgaaatcaggtcataagatcatgacagcctgctctgaagaagagaaacagtccatgaaaaagaagctagacaaggtactcaaaaactatgataccatctgtcagattaacagcgagagatatcttcaacttgaaagggcacaatctttggtaaaccagttttgggagacatacgaggagttatggccttggctcactgaaactcagagcatcattagccagctccctgcaccagccctcgaatatgaaacgctgagacagcagcaggaagagcacagacagctccgagaactaattgcagaacataaaccacacattgataaaatgaacaagacgggacctcaactgctagagctgagtccaggcgagggattttccatccaagagaaatatgtcgctgccgatacactctactcccaaatcaaagaggatgtaaagaagcgagcggtcgcacttgacgaagctatctcccaaagtacacagttccatgacaaaatagatcagatactcgaaagcttagaacgaatcgtagagcgtttgcgacagcccccatccatcagtgctgaggtagaaaagatcaaggagcaaatctccgagaataagaatgttagtgtggacatggagaaactgcaaccgctgtatgaaacattaaaacaacggggtgaagagatgattgctcggagtggaggaacagacaaagatatcagcgctaaagcagtgcaagataaacttgatcaaatggtgtttatctgggagaatattcacactctggtggaggagcgcgaggccaaactactggacgtcatggagctagctgagaaattttggtgcgaccacatgagtcttattgtaaccatcaaagatactcaggacttcatcagagacttggaggaccccggaatagaccctagtgtggtaaaacagcagcaggaggccgctgaaacgattagggaggagatcgatgggctgcaggaggagctcgatatcgtaatcaatcttggtagtgaactgattgctgcttgcggtgagcccgacaagcctatagtcaagaaatcaattgacgagctcaacagtgcctgggattctcttaataaggcatggaaggacaggatagataagctggaggaggccatgcaagctgctgtgcaataccaggatgggctgcaggccgtcttcgactgggtggacattgcgggtggcaaattggcgagtatgtccccgattggaacagatcttgagactgtgaagcagcagatagaagaactcaaacaattcaagtccgaggcctaccagcaacagatcgaaatggagaggttaaatcaccaggccgagttgctcttaaagaaggtgaccgaagaaagcgataagcacactgtgcaggacccgctgatggagctaaaactcatttgggacagcctggaggagcgcatcatcaaccggcaacataagctggagggggcactgctcgctttggggcagtttcagcacgcgttggatgaactgctagcatggctgactcacactgaaggtctcctctctgaacagaagcccgtggggggagaccctaaggccattgaaatcgaactcgccaagcaccacgtgcttcaaaacgacgtcctcgcccatcaatctacagtcgaagctgtgaataaagctgggaacgatctgatcgaaagcagcgctggagaagaagcaagtaatctgcagaataagttggaggtcctaaatcaacgctggcagaatgtgttggagaaaacggagcagagaaaacagcagctggacggcgctttgcgccaggctaaaggcttccacggggagattgaggacctgcaacagtggttgacagatactgagcggcatctcttagcaagtaagcccctcggtggtctgcccgagaccgctaaagagcagctgaacgtccatatggaagtgtgcgcagccttcgaggccaaggaagagacctataagagtctgatgcagaaggggcaacaaatgcttgctcgttgccctaagtccgccgagactaacatcgaccaagatatcaacaatctcaaagagaaatgggagagcgtggagacgaagttgaacgagcgcaaaacgaaattggaggaggctttgaaccttgcaatggagttccacaattccttgcaggactttatcaattggctgactcaagccgagcaaacccttaacgttgcgagtcggccttccctgatacttgatacagttctgtttcagattgacgaacacaaagttttcgctaacgaggtgaatagccatagagaacaaatcattgagctcgataaaaccggaacacaccttaagtattttagtcagaagcaggacgtggtccttataaaaaaccttctgatctcagtgcaaagtcggtgggaaaaagtggtgcaacgcctggtggaaaggggaagatctctggacgacgccaggaaacgggctaaacaatttcacgaagcctggtcgaaattaatggagtggctggaagagagcgagaagagcttagattcggaattggagattgcaaacgatccggataaaatcaaaactcagctggcccagcacaaggagtttcagaaaagcttgggcgctaagcattctgtgtacgacaccaccaatcgcactgggaggagcctgaaggagaagacatctttagcggacgataatttaaaactcgatgacatgctctccgagttgagggacaaatgggacaccatatgtgggaaatctgtggaacggcagaataagttggaggaggccttgctgttttctggacaattcacagatgcactgcaagccctgattgactggctataccgtgttgaacctcagctagcggaggaccaacccgtccacggcgacatcgatctggtgatgaatctgatcgataaccacaaggcctttcagaaagaattgggcaaaaggacatcctccgtgcaggctctcaagcgctcggctcgcgaactgatcgaaggctccagggatgactcgagttgggtgaaggtgcagatgcaagaactgtcaacaaggtgggagactgtgtgtgccctttctatctctaaacagacccgcctggaggcagccctccggcaggccgaggagtttcacagtgtcgtgcacgctctgctggagtggctcgctgaggccgaacagacattacgatttcatggcgtgcttcccgacgacgaagatgccttacgcactctcatcgaccagcacaaggagttcatgaagaagcttgaggagaaacgtgccgagctaaacaaggccaccacgatgggtgatactgttctggcaatttgtcaccccgatagtatcaccactatcaagcactggattactatcattcgagcgcgatttgaagaggtgttagcttgggcaaagcagcaccagcagcgcctcgcctctgcccttgcgggtttaatcgccaagcaggaattgctggaggcgctgctggcctggcttcagtgggcagagactacactaactgataaggacaaagaagtcatcccacaggagatcgaggaggtgaaagcattgatagctgaacatcaaacattcatggaagagatgactcggaagcagccagacgtcgacaaagtgaccaaaacatataaacgacgggcagctgaccccagttcacttcagtcccatatacctgttcttgacaaagggagggccggacgtaagcggtttccagccagttcattgtaccccagcggtagccagacacagatcgaaaccaaaaatcccagagtgaatctgctggtgtctaaatggcagcaggtgtggcttctggcgctcgaaaggcggcgaaagctgaatgatgccctggaccgcctggaagagctgagggaattcgccaattttgatttcgatatctggaggaagaaatacatgcgatggatgaaccacaaaaagagtcgcgtgatggactttttcagaaggatagataaggatcaagatggaaagattacccggcaggagtttatcgacgggatcttgtccagcaagtttccaactagcagactcgaaatgtccgctgtcgctgatatcttcgatagggacggcgacggctacattgattattatgaatttgtcgctgcgctgcaccctaataaggacgcttacaaacccattaccgatgccgacaaaattgaggacgaggtgaccaggcaggtagccaagtgcaagtgcgccaagagattccaagtcgagcagattggagataataagtatcgtgtatctttccagtccaactttggcgactctcaacagctgcgcttggtccgcattctaaggtcaactgtgatggtgagagtgggaggcggatggatggccctggacgaatttctggtcaagaatgacccctgtcgtgtgcaccatcatgggagcaagatgctgagaagtgagtccaattccagcatcacaacaacacagccaacaattgcaaaaggcagaaccaatatggagctgcgcgagaagttcatactggcggatggggctagccagggcatggctgccttccgacctcggggacgcaggtcacggccatcctcccggggagcaagccccaatcgttccacatccgttagctctcaggcagcacaggccgcatcgccgcaggtgcccgctactaccaccccaaaggggactcccatacagggctccaagctgcgcctgcccggttatctcagtggtaaaggctttcactcaggcgaggattcaggcctcattacaactgcggcagcgagggtgagaacccagtttgccgactccaaaaagactccatcaaggcctggcagtagagcaggtagcaaggctggctcaagagcttcttctaggcggggttccgacgcgtcggatttcgatatcagcgagatacagtccgtctgtagtgacgtcgagacggtgccacagacccacaggcctacaccacgagcgggttcaaggccttctaccgccaaaccctctaaaatccccactcctcagaggaagagccctgcgagcaaattggacaagagcagcaaaaggtag

SEQ ID NO: 269250 - DNA, 23253 bp, Artificial Sequence
  derived and/or modified sequence
atgatcgccgccgccttcctggtgctgctgagaccctacagcatccagtgcgccctgttcctgctgctgctgctgctgggcaccatcgccaccatcgtgttcttctgctgctggcacagaaagctgcagaagggcagacaccccatgaagagcgtgttcagcggcagaagcagaagcagagacgccgtgctgagaagccaccacttcagaagcgagggcttcagagccagccccagacacctgagaagaagagtggccgccgccgccgccgccagactggaggaggtgaagcccgtggtggaggtgcaccaccagagcgagcaggagaccagcgtgagaaagagaagaatcaagaagagcagcagagtgcagcccgagttctaccacagcgtgcagggcgccagcatcagaagacccagcagcggcaacgccagctacagatgcagcatgagcagcagcgccgacttcagcgacgaggacgacttcagccagaagagcggcagcgccagccccgcccccggcgacaccctgccctggaacctgcccaagcacgagagaagcaagagaaagatccagggcggcagcgtgctggaccccgccgagagagccgtgctgagaatcgccgacgagagagacaaggtgcagaagaagaccttcaccaagtggatcaaccagcacctgatgaaggtgagaaagcacgtgaacgacctgtacgaggacctgagagacggccacaacctgatcagcctgctggaggtgctgagcggcgacaccctgcccagagagaagggcagaatgagattccacagactgcagaacgtgcagatcgccctggactacctgaagagaagacaggtgaagctggtgaacatcagaaacgacgacatcaccgacggcaaccccaagctgaccctgggcctgatctggaccatcatcctgcacttccagatcagcgacatccacgtgaccggcgagagcgaggacatgagcgccaaggagagactgctgctgtggacccagcaggccaccgagggctacgccggcatcagatgcgagaacttcaccacctgctggagagacggcaagctgttcaacgccatcatccacaagtacagacccgacctgatcgacatgaacaccgtggccgtgcagagcaacctggccaacctggagcacgccttctacgtggccgagaagatcggcgtgatcagactgctggaccccgaggacgtggacgtgagcagccccgacgagaagagcgtgatcacctacgtgagcagcctgtacgacgccttccccaaggtgcccgagggcggcgagggcatcggcgccaacgacgtggaggtgaagtggatcgagtaccagaacatggtgaactacctgatccagtggatcagacaccacgtgaccaccatgagcgagagaaccttccccaacaaccccgtggagctgaaggccctgtacaaccagtacctgcagttcaaggagaccgagatcccccccaaggagaccgagaagagcaagatcaagagactgtacaagctgctggagatctggatcgagttcggcagaatcaagctgctgcagggctaccaccccaacgacatcgagaaggagtggggcaagctgatcatcgccatgctggagagagagaaggccctgagacccgaggtggagagactggagatgctgcagcagatcgccaacagagtgcagagagacagcgtgatctgcgaggacaagctgatcctggccggcaacgccctgcagagcgacagcaagagactggagagcggcgtgcagttccagaacgaggccgagatcgccggctacatcctggagtgcgagaacctgctgagacagcacgtgatcgacgtgcagatcctgatcgacggcaagtactaccaggccgaccagctggtgcagagagtggccaagctgagagacgagatcatggccctgagaaacgagtgcagcagcgtgtacagcaagggcagaatcctgaccaccgagcagaccaagctgatgatcagcggcatcacccagagcctgaacagcggcttcgcccagaccctgcaccccagcctgaccagcggcctgacccagagcctgacccccagcctgaccagcagcagcatgaccagcggcctgagcagcggcatgaccagcagactgacccccagcgtgacccccgcctacacccccggcttccccagcggcctggtgcccaacttcagcagcggcgtggagcccaacagcctgcagaccctgaagctgatgcagatcagaaagcccctgctgaagagcagcctgctggaccagaacctgaccgaggaggagatcaacatgaagttcgtgcaggacctgctgaactgggtggacgagatgcaggtgcagctggacagaaccgagtggggcagcgacctgcccagcgtggagagccacctggagaaccacaagaacgtgcacagagccatcgaggagttcgagagcagcctgaaggaggccaagatcagcgagatccagatgaccgcccccctgaagctgacctacgccgagaagctgcacagactggagagccagtacgccaagctgctgaacaccagcagaaaccaggagagacacctggacaccctgcacaacttcgtgagcagagccaccaacgagctgatctggctgaacgagaaggaggaggaggaggtggcctacgactggagcgagagaaacaccaacatcgccagaaagaaggactaccacgccgagctgatgagagagctggaccagaaggaggagaacatcaagagcgtgcaggagatcgccgagcagctgctgctggagaaccaccccgccagactgaccatcgaggcctacagagccgccatgcagacccagtggagctggatcctgcagctgtgccagtgcgtggagcagcacatcaaggagaacaccgcctacttcgagttcttcaacgacgccaaggaggccaccgactacctgagaaacctgaaggacgccatccagagaaagtacagctgcgacagaagcagcagcatccacaagctggaggacctggtgcaggagagcatggaggagaaggaggagctgctgcagtacaagagcaccatcgccaacctgatgggcaaggccaagaccatcatccagctgaagcccagaaacagcgactgccccctgaagaccagcatccccatcaaggccatctgcgactacagacagatcgagatcaccatctacaaggacgacgagtgcgtgctggccaacaacagccacagagccaagtggaaggtgatcagccccaccggcaacgaggccatggtgcccagcgtgtgcttcaccgtgcccccccccaacaaggaggccgtggacctggccaacagaatcgagcagcagtaccagaacgtgctgaccctgtggcacgagagccacatcaacatgaagagcgtggtgagctggcactacctgatcaacgagatcgacagaatcagagccagcaacgtggccagcatcaagaccatgctgcccggcgagcaccagcaggtgctgagcaacctgcagagcagattcgaggacttcctggaggacagccaggagagccaggtgttcagcggcagcgacatcacccagctggagaaggaggtgaacgtgtgcaagcagtactaccaggagctgctgaagagcgccgagagagaggagcaggaggagagcgtgtacaacctgtacatcagcgaggtgagaaacatcagactgagactggagaactgcgaggacagactgatcagacagatcagaacccccctggagagagacgacctgcacgagagcgtgttcagaatcaccgagcaggagaagctgaagaaggagctggagagactgaaggacgacctgggcaccatcaccaacaagtgcgaggagttcttcagccaggccgccgccagcagcagcgtgcccaccctgagaagcgagctgaacgtggtgctgcagaacatgaaccaggtgtacagcatgagcagcacctacatcgacaagctgaagaccgtgaacctggtgctgaagaacacccaggccgccgaggccctggtgaagctgtacgagaccaagctgtgcgaggaggaggccgtgatcgccgacaagaacaacatcgagaacctgatcagcaccctgaagcagtggagaagcgaggtggacgagaagagacaggtgttccacgccctggaggacgagctgcagaaggccaaggccatcagcgacgagatgttcaagacctacaaggagagagacctggacttcgactggcacaaggagaaggccgaccagctggtggagagatggcagaacgtgcacgtgcagatcgacaacagactgagagacctggagggcatcggcaagagcctgaagtactacagagacacctaccaccccctggacgactggatccagcaggtggagaccacccagagaaagatccaggagaaccagcccgagaacagcaagaccctggccacccagctgaaccagcagaagatgctggtgagcgagatcgagatgaagcagagcaagatggacgagtgccagaagtacgccgagcagtacagcgccaccgtgaaggactacgagctgcagaccatgacctacagagccatggtggacagccagcagaagagccccgtgaagagaagaagaatgcagagcagcgccgacctgatcatccaggagttcatggacctgagaaccagatacaccgccctggtgaccctgatgacccagtacatcaagttcgccggcgacagcctgaagagactggaggaggaggagaagagcctggaggaggagaagaaggagcacgtggagaaggccaaggagctgcagaagtgggtgagcaacatcagcaagaccctgaaggacgccgagaaggccggcaagccccccttcagcaagcagaagatcagcagcgaggagatcagcaccaagaaggagcagctgagcgaggccctgcagaccatccagctgttcctggccaagcacggcgacaagatgaccgacgaggagagaaacgagctggagaagcaggtgaagaccctgcaggagagctacaacctgctgttcagcgagagcctgaagcagctgcaggagagccagaccagcggcgacgtgaaggtggaggagaagctggacaaggtgatcgccggcaccatcgaccagaccaccggcgaggtgctgagcgtgttccaggccgtgctgagaggcctgatcgactacgacaccggcatcagactgctggagacccagctgatgatcagcggcctgatcagccccgagctgagaaagtgcttcgacctgaaggacgccaagagccacggcctgatcgacgagcagatcctgtgccagctgaaggagctgagcaaggccaaggagatcatcagcgccgccagccccaccaccatccccgtgctggacgccctggcccagagcatgatcaccgagagcatggccatcaaggtgctggagatcctgctgagcaccggcagcctggtgatccccgccaccggcgagcagctgaccctgcagaaggccttccagcagaacctggtgagcagcgccctgttcagcaaggtgctggagagacagaacatgtgcaaggacctgatcgacccctgcaccagcgagaaggtgagcctgatcgacatggtgcagagaagcaccctgcaggagaacaccggcatgtggctgctgcccgtgagaccccaggagggcggcagaatcaccctgaagtgcggcagaaacatcagcatcctgagagccgcccacgagggcctgatcgacagagagaccatgttcagactgctgagcgcccagctgctgagcggcggcctgatcaacagcaacagcggccagagaatgaccgtggaggaggccgtgagagagggcgtgatcgacagagacaccgccagcagcatcctgacctaccaggtgcagaccggcggcatcatccagagcaaccccgccaagagactgaccgtggacgaggccgtgcagtgcgacctgatcaccagcagcagcgccctgctggtgctggaggcccagagaggctacgtgggcctgatctggccccacagcggcgagatcttccccaccagcagcagcctgcagcaggagctgatcaccaacgagctggcctacaagatcctgaacggcagacagaagatcgccgccctgtacatccccgagagcagccaggtgatcggcctggacgccgccaagcagctgggcatcatcgacaacaacaccgccagcatcctgaagaacatcaccctgcccgacaagatgcccgacctgggcgacctggaggcctgcaagaacgccagaagatggctgagcttctgcaagttccagcccagcaccgtgcacgactacagacaggaggaggacgtgttcgacggcgaggagcccgtgaccacccagaccagcgaggagaccaagaagctgttcctgagctacctgatgatcaacagctacatggacgccaacaccggccagagactgctgctgtacgacggcgacctggacgaggccgtgggcatgctgctggagggctgccacgccgagttcgacggcaacaccgccatcaaggagtgcctggacgtgctgagcagcagcggcgtgttcctgaacaacgccagcggcagagagaaggacgagtgcaccgccacccccagcagcttcaacaagtgccactgcggcgagcccgagcacgaggagacccccgagaacagaaagtgcgccatcgacgaggagttcaacgagatgagaaacaccgtgatcaacagcgagttcagccagagcggcaagctggccagcaccatcagcatcgaccccaaggtgaacagcagccccagcgtgtgcgtgcccagcctgatcagctacctgacccagaccgagctggccgacatcagcatgctgagaagcgacagcgagaacatcctgaccaactacgagaaccagagcagagtggagaccaacgagagagccaacgagtgcagccacagcaagaacatccagaacttccccagcgacctgatcgagaaccccatcatgaagagcaagatgagcaagttctgcggcgtgaacgagaccgagaacgaggacaacaccaacagagacagccccatcttcgactacagccccagactgagcgccctgctgagccacgacaagctgatgcacagccagggcagcttcaacgacacccacacccccgagagcaacggcaacaagtgcgaggcccccgccctgagcttcagcgacaagaccatgctgagcggccagagaatcggcgagaagttccaggaccagttcctgggcatcgccgccatcaacatcagcctgcccggcgagcagtacggccagaagagcctgaacatgatcagcagcaacccccaggtgcagtaccacaacgacaagtacatcagcaacaccagcggcgaggacgagaagacccaccccggcttccagcagatgcccgaggacaaggaggacgagagcgagatcgaggagtacagctgcgccgtgacccccggcggcgacaccgacaacgccatcgtgagcctgacctgcgccacccccctgctggacgagaccatcagcgccagcgactacgagaccagcctgctgaacgaccagcagaacaacaccggcaccgacaccgacagcgacgacgacttctacgacacccccctgttcgaggacgacgaccacgacagcctgctgctggacggcgacgacagagactgcctgcaccccgaggactacgacaccctgcaggaggagaacgacgagaccgccagccccgccgacgtgttctacgacgtgagcaaggagaacgagaacagcatggtgccccagggcgcccccgtgggcagcctgagcgtgaagaacaaggcccactgcctgcaggacttcctgatggacgtggagaaggacgagctggacagcggcgagaagatccacctgaaccccgtgggcagcgacaaggtgaacggccagagcctggagaccggcagcgagagagagtgcaccaacatcctggagggcgacgagagcgacagcctgaccgactacgacatcgtgggcggcaaggagagcttcaccgccagcctgaagttcgacgacagcggcagctggagaggcagaaaggaggagtacgtgaccggccaggagttccacagcgacaccgaccacctggacagcatgcagagcgaggagagctacggcgactacatctacgacagcaacgaccaggacgacgacgacgacgacggcatcgacgaggagggcggcggcatcagagacgagaacggcaagcccagatgccagaacgtggccgaggacatggacatccagctgtgcgccagcatcctgaacgagaacagcgacgagaacgagaacatcaacaccatgatcctgctggacaagatgcacagctgcagcagcctggagaagcagcagagagtgaacgtggtgcagctggccagccccagcgagaacaacctggtgaccgagaagagcaacctgcccgagtacaccaccgagatcgccggcaagagcaaggagaacctgctgaaccacgagatggtgctgaaggacgtgctgccccccatcatcaaggacaccgagagcgagaagaccttcggccccgccagcatcagccacgacaacaacaacatcagcagcaccagcgagctgggcaccgacctggccaacaccaaggtgaagctgatccagggcagcgagctgcccgagctgaccgacagcgtgaagggcaaggacgagtacttcaagaacatgacccccaaggtggacagcagcctggaccacatcatctgcaccgagcccgacctgatcggcaagcccgccgaggagagccacctgagcctgatcgccagcgtgaccgacaaggacccccagggcaacggcagcgacctgatcaagggcagagacggcaagagcgacatcctgatcgaggacgagaccagcatccagaagatgtacctgggcgagggcgaggtgctggtggagggcctggtggaggaggagaacagacacctgaagctgctgcccggcaagaacaccagagacagcttcaagctgatcaacagccagttccccttcccccagatcaccaacaacgaggagctgaaccagaagggcagcctgaagaaggccaccgtgaccctgaaggacgagcccaacaacctgcagatcatcgtgagcaagagccccgtgcagttcgagaacctggaggagatcttcgacaccagcgtgagcaaggagatcagcgacgacatcaccagcgacatcaccagctgggagggcaacacccacttcgaggagagcttcaccgacggccccgagaaggagctggacctgttcacctacctgaagcactgcgccaagaacatcaaggccaaggacgtggccaagcccaacgaggacgtgcccagccacgtgctgatcaccgccccccccatgaaggagcacctgcagctgggcgtgaacaacaccaaggagaagagcaccagcacccagaaggacagccccctgaacgacatgatccagagcaacgacctgtgcagcaaggagagcatcagcggcggcggcaccgagatcagccagttcacccccgagagcatcgaggccaccctgagcatcctgagcagaaagcacgtggaggacgtgggcaagaacgacttcctgcagagcgagagatgcgccaacggcctgggcaacgacaacagcagcaacaccctgaacaccgactacagcttcctggagatcaacaacaagaaggagagaatcgagcagcagctgcccaaggagcaggccctgagccccagaagccaggagaaggaggtgcagatccccgagctgagccaggtgttcgtggaggacgtgaaggacatcctgaagagcagactgaaggagggccacatgaacccccaggaggtggaggagcccagcgcctgcgccgacaccaagatcctgatccagaacctgatcaagagaatcaccaccagccagctggtgaacgaggccagcaccgtgcccagcgacagccagatgagcgacagcagcggcgtgagccccatgaccaacagcagcgagctgaagcccgagagcagagacgaccccttctgcatcggcaacctgaagagcgagctgctgctgaacatcctgaagcaggaccagcacagccagaagatcaccggcgtgttcgagctgatgagagagctgacccacatggagtacgacctggagaagagaggcatcaccagcaaggtgctgcccctgcagctggagaacatcttctacaagctgctggccgacggctacagcgagaagatcgagcacgtgggcgacttcaaccagaaggcctgcagcaccagcgagatgatggaggagaagccccacatcctgggcgacatcaagagcaaggagggcaactactacagccccaacctggagaccgtgaaggagatcggcctggagagcagcaccgtgtgggccagcaccctgcccagagacgagaagctgaaggacctgtgcaacgacttccccagccacctggagtgcaccagcggcagcaaggagatggccagcggcgacagcagcaccgagcagttcagcagcgagctgcagcagtgcctgcagcacaccgagaagatgcacgagtacctgaccctgctgcaggacatgaagccccccctggacaaccaggagagcctggacaacaacctggaggccctgaagaaccagctgagacagctggagaccttcgagctgggcctggcccccatcgccgtgatcctgagaaaggacatgaagctggccgaggagttcctgaagagcctgcccagcgacttccccagaggccacgtggaggagctgagcatcagccaccagagcctgaagaccgccttcagcagcctgagcaacgtgagcagcgagagaaccaagcagatcatgctggccatcgacagcgagatgagcaagctggccgtgagccacgaggagttcctgcacaagctgaagagcttcagcgactgggtgagcgagaagagcaagagcgtgaaggacatcgagatcgtgaacgtgcaggacagcgagtacgtgaagaagagactggagttcctgaaggccaacaacgtgctgaaggacctgggccacaccaagatgcagctggagaccaccgccttcgacgtgcagttcttcatcagcgagtacgcccaggacctgagccccaaccagagcaagcagctgctgagactgctgaacaccacccagaagtgcttcctggacgtgcaggagagcgtgaccacccaggtggagagactggagacccagctgcacctggagcaggacctggacgaccagaagatcgtggccgagagacagcaggagtacaaggagaagctgcagggcatctgcgacctgctgacccagaccgagaacagactgatcggccaccaggaggccttcatgatcggcgacggcaccgtggagctgaagaagtaccagagcaagcaggaggagctgcagaaggacatgcagggcagcgcccaggccctggccgaggtggtgaagaacaccgagaacttcctgaaggagaacggcgagaagctgagccaggaggacaaggccctgatcgagcagaagctgaacgaggccaagatcaagtgcgagcagctgaacctgaaggccgagcagagcaagaaggagctggacaaggtggtgaccaccgccatcaaggaggagaccgagaaggtggccgccgtgaagcagctggaggagagcaagaccaagatcgagaacctgctggactggctgagcaacgtggacaaggacagcgagagagccggcaccaagcacaagcaggtgatcgagcagaacggcacccacttccaggagggcgacggcaagagcgccatcggcgaggaggacgaggtgaacggcaacctgctggagaccgacgtggacggccaggtgggcaccacccaggagaacctgaaccagcagtaccagaaggtgaaggcccagcacgagaagatcatcagccagcaccaggccgtgatcatcgccacccagagcgcccaggtgctgctggagaagcagggccagtacctgagccccgaggagaaggagaagctgcagaagaacatgaaggagctgaaggtgcactacgagaccgccctggccgagagcgagaagaagatgaagctgacccacagcctgcaggaggagctggagaagttcgacgccgactacaccgagttcgagcactggctgcagcagagcgagcaggagctggagaacctggaggccggcgccgacgacatcaacggcctgatgaccaagctgaagagacagaagagcttcagcgaggacgtgatcagccacaagggcgacctgagatacatcaccatcagcggcaacagagtgctggaggccgccaagagctgcagcaagagagacggcggcaaggtggacaccagcgccacccacagagaggtgcagagaaagctggaccacgccaccgacagattcagaagcctgtacagcaagtgcaacgtgctgggcaacaacctgaaggacctggtggacaagtaccagcactacgaggacgccagctgcggcctgctggccggcctgcaggcctgcgaggccaccgccagcaagcacctgagcgagcccatcgccgtggaccccaagaacctgcagagacagctggaggagaccaaggccctgcagggccagatcagcagccagcaggtggccgtggagaagctgaagaagaccgccgaggtgctgctggacgccagaggcagcctgctgcccgccaagaacgacatccagaagaccctggacgacatcgtgggcagatacgaggacctgagcaagagcgtgaacgagagaaacgagaagctgcagatcaccctgaccagaagcctgagcgtgcaggacggcctggacgagatgctggactggatgggcaacgtggagagcagcctgaaggagcagggccaggtgcccctgaacagcaccgccctgcaggacatcatcagcaagaacatcatgctggagcaggacatcgccggcagacagagcagcatcaacgccatgaacgagaaggtgaagaagttcatggagaccaccgaccccagcaccgccagcagcctgcaggccaagatgaaggacctgagcgccagattcagcgaggccagccacaagcacaaggagaccctggccaagatggaggagctgaagaccaaggtggagctgttcgagaacctgagcgagaagctgcagaccttcctggagaccaagacccaggccctgaccgaggtggacgtgcccggcaaggacgtgaccgagctgagccagtacatgcaggagagcaccagcgagttcctggagcacaagaagcacctggaggtgctgcacagcctgctgaaggagatcagcagccacggcctgcccagcgacaaggccctggtgctggagaagaccaacaacctgagcaagaagttcaaggagatggaggacaccatcaaggagaagaaggaggccgtgaccagctgccaggagcagctggacgccttccaggtgctggtgaagagcctgaagagctggatcaaggagaccaccaagaaggtgcccatcgtgcagcccagcttcggcgccgaggacctgggcaagagcctggaggacaccaagaagctgcaggagaagtggagcctgaagacccccgagatccagaaggtgaacaacagcggcatcagcctgtgcaacctgatcagcgccgtgaccacccccgccaaggccatcgccgccgtgaagagcggcggcgccgtgctgaacggcgagggcaccgccaccaacaccgaggagttctgggccaacaagggcctgaccagcatcaagaaggacatgaccgacatcagccacggctacgaggacctgggcctgctgctgaaggacaagatcgccgagctgaacaccaagctgagcaagctgcagaaggcccaggaggagagcagcgccatgatgcagtggctgcagaagatgaacaagaccgccaccaagtggcagcagacccccgcccccaccgacaccgaggccgtgaagacccaggtggagcagaacaagagcttcgaggccgagctgaagcagaacgtgaacaaggtgcaggagctgaaggacaagctgaccgagctgctggaggagaaccccgacacccccgaggcccccagatggaagcagatgctgaccgagatcgacagcaagtggcaggagctgaaccagctgaccatcgacagacagcagaagctggaggagagcagcaacaacctgacccagttccagaccgtggaggcccagctgaagcagtggctggtggagaaggagctgatggtgagcgtgctgggccccctgagcatcgaccccaacatgctgaacacccagagacagcaggtgcagatcctgctgcaggagttcgccaccagaaagccccagtacgagcagctgaccgccgccggccagggcatcctgagcagacccggcgaggaccccagcctgagaggcatcgtgaaggagcagctggccgccgtgacccagaagtgggacagcctgaccggccagctgagcgacagatgcgactggatcgaccaggccatcgtgaagagcacccagtaccagagcctgctgagaagcctgagcgacaagctgagcgacctggacaacaagctgagcagcagcctggccgtgagcacccaccccgacgccatgaaccagcagctggagaccgcccagaagatgaagcaggagatccagcaggagaagaagcagatcaaggtggcccaggccctgtgcgaggacctgagcgccctggtgaaggaggagtacctgaaggccgagctgagcagacagctggagggcatcctgaagagcttcaaggacgtggagcagaaggccgagaaccacgtgcagcacctgcagagcgcctgcgccagcagccaccagttccagcagatgagcagagacttccaggcctggctggacaccaagaaggaggagcagaacaagagccaccccatcagcgccaagctggacgtgctggagagcctgatcaaggaccacaaggacttcagcaagaccctgaccgcccagagccacatgtacgagaagaccatcgccgagggcgagaacctgctgctgaagacccagggcagcgagaaggccgccctgcagctgcagctgaacaccatcaagaccaactgggacaccttcaacaagcaggtgaaggagagagagaacaagctgaaggagagcctggagaaggccctgaagtacaaggagcaggtggagaccctgtggccctggatcgacaagtgccagaacaacctggaggagatcaagttctgcctggaccccgccgagggcgagaacagcatcgccaagctgaagagcctgcagaaggagatggaccagcacttcggcatggtggagctgctgaacaacaccgccaacagcctgctgagcgtgtgcgagatcgacaaggaggtggtgaccgacgagaacaagagcctgatccagaaggtggacatggtgaccgagcagctgcacagcaagaagttctgcctggagaacatgacccagaagttcaaggagttccaggaggtgagcaaggagagcaagagacagctgcagtgcgccaaggagcagctggacatccacgacagcctgggcagccaggcctacagcaacaagtacctgaccatgctgcagacccagcagaagagcctgcaggccctgaagcaccaggtggacctggccaagagactggcccaggacctggtggtggaggccagcgacagcaagggcaccagcgacgtgctgctgcaggtggagaccatcgcccaggagcacagcaccctgagccagcaggtggacgagaagtgcagcttcctggagaccaagctgcagggcatcggccacttccagaacaccatcagagagatgttcagccagttcgccgagttcgacgacgagctggacagcatggcccccgtgggcagagacgccgagaccctgcagaagcagaaggagaccatcaaggccttcctgaagaagctggaggccctgatggccagcaacgacaacgccaacaagacctgcaagatgatgctggccaccgaggagaccagccccgacctggtgggcatcaagagagacctggaggccctgagcaagcagtgcaacaagctgctggacagagcccaggccagagaggagcaggtggagggcaccatcaagagactggaggagttctacagcaagctgaaggagttcagcatcctgctgcagaaggccgaggagcacgaggagagccagggccccgtgggcatggagaccgagaccatcaaccagcagctgaacatgttcaaggtgttccagaaggaggagatcgagcccctgcagggcaagcagcaggacgtgaactggctgggccagggcctgatccagagcgccgccaagagcaccagcacccagggcctggagcacgacctggacgacgtgaacgccagatggaagaccctgaacaagaaggtggcccagagagccgcccagctgcaggaggccctgctgcactgcggcagattccaggacgccctggagagcctgctgagctggatggtggacaccgaggagctggtggccaaccagaagccccccagcgccgagttcaaggtggtgaaggcccagatccaggagcagaagctgctgcagagactgctggacgacagaaagagcaccgtggaggtgatcaagagagagggcgagaagatcgccaccaccgccgagcccgccgacaaggtgaagatcctgaagcagctgagcctgctggacagcagatgggaggccctgctgaacaaggccgagaccagaaacagacagctggagggcatcagcgtggtggcccagcagttccacgagaccctggagcccctgaacgagtggctgaccaccatcgagaagagactggtgaactgcgagcccatcggcacccaggccagcaagctggaggagcagatcgcccagcacaaggccctggaggacgacatcatcaaccacaacaagcacctgcaccaggccgtgagcatcggccagagcctgaaggtgctgagcagcagagaggacaaggacatggtgcagagcaagctggacttcagccaggtgtggtacatcgagatccaggagaagagccacagcagaagcgagctgctgcagcaggccctgtgcaacgccaagatcttcggcgaggacgaggtggagctgatgaactggctgaacgaggtgcacgacaagctgagcaagctgagcgtgcaggactacagcaccgagggcctgtggaagcagcagagcgagctgagagtgctgcaggaggacatcctgctgagaaagcagaacgtggaccaggccctgctgaacggcctggagctgctgaagcagaccaccggcgacgaggtgctgatcatccaggacaagctggaggccatcaaggccagatacaaggacatcaccaagctgagcaccgacgtggccaagaccctggagcaggccctgcagctggccagaagactgcacagcacccacgaggagctgtgcacctggctggacaaggtggaggtggagctgctgagctacgagacccaggtgctgaagggcgaggaggccagccaggcccagatgagacccaaggagctgaagaaggaggccaagaacaacaaggccctgctggacagcctgaacgaggtgagcagcgccctgctggagctggtgccctggagagccagagagggcctggagaagatggtggccgaggacaacgagagatacagactggtgagcgacaccatcacccagaaggtggaggagatcgacgccgccatcctgagaagccagcagttcgaccaggccgccgacgccgagctgagctggatcaccgagaccgagaagaagctgatgagcctgggcgacatcagactggagcaggaccagaccagcgcccagctgcaggtgcagaagaccttcaccatggagatcctgagacacaaggacatcatcgacgacctggtgaagagcggccacaagatcatgaccgcctgcagcgaggaggagaagcagagcatgaagaagaagctggacaaggtgctgaagaactacgacaccatctgccagatcaacagcgagagatacctgcagctggagagagcccagagcctggtgaaccagttctgggagacctacgaggagctgtggccctggctgaccgagacccagagcatcatcagccagctgcccgcccccgccctggagtacgagaccctgagacagcagcaggaggagcacagacagctgagagagctgatcgccgagcacaagccccacatcgacaagatgaacaagaccggcccccagctgctggagctgagccccggcgagggcttcagcatccaggagaagtacgtggccgccgacaccctgtacagccagatcaaggaggacgtgaagaagagagccgtggccctggacgaggccatcagccagagcacccagttccacgacaagatcgaccagatcctggagagcctggagagaatcgtggagagactgagacagccccccagcatcagcgccgaggtggagaagatcaaggagcagatcagcgagaacaagaacgtgagcgtggacatggagaagctgcagcccctgtacgagaccctgaagcagagaggcgaggagatgatcgccagaagcggcggcaccgacaaggacatcagcgccaaggccgtgcaggacaagctggaccagatggtgttcatctgggagaacatccacaccctggtggaggagagagaggccaagctgctggacgtgatggagctggccgagaagttctggtgcgaccacatgagcctgatcgtgaccatcaaggacacccaggacttcatcagagacctggaggaccccggcatcgaccccagcgtggtgaagcagcagcaggaggccgccgagaccatcagagaggagatcgacggcctgcaggaggagctggacatcgtgatcaacctgggcagcgagctgatcgccgcctgcggcgagcccgacaagcccatcgtgaagaagagcatcgacgagctgaacagcgcctgggacagcctgaacaaggcctggaaggacagaatcgacaagctggaggaggccatgcaggccgccgtgcagtaccaggacggcctgcaggccgtgttcgactgggtggacatcgccggcggcaagctggccagcatgagccccatcggcaccgacctggagaccgtgaagcagcagatcgaggagctgaagcagttcaagagcgaggcctaccagcagcagatcgagatggagagactgaaccaccaggccgagctgctgctgaagaaggtgaccgaggagagcgacaagcacaccgtgcaggaccccctgatggagctgaagctgatctgggacagcctggaggagagaatcatcaacagacagcacaagctggagggcgccctgctggccctgggccagttccagcacgccctggacgagctgctggcctggctgacccacaccgagggcctgctgagcgagcagaagcccgtgggcggcgaccccaaggccatcgagatcgagctggccaagcaccacgtgctgcagaacgacgtgctggcccaccagagcaccgtggaggccgtgaacaaggccggcaacgacctgatcgagagcagcgccggcgaggaggccagcaacctgcagaacaagctggaggtgctgaaccagagatggcagaacgtgctggagaagaccgagcagagaaagcagcagctggacggcgccctgagacaggccaagggcttccacggcgagatcgaggacctgcagcagtggctgaccgacaccgagagacacctgctggccagcaagcccctgggcggcctgcccgagaccgccaaggagcagctgaacgtgcacatggaggtgtgcgccgccttcgaggccaaggaggagacctacaagagcctgatgcagaagggccagcagatgctggccagatgccccaagagcgccgagaccaacatcgaccaggacatcaacaacctgaaggagaagtgggagagcgtggagaccaagctgaacgagagaaagaccaagctggaggaggccctgaacctggccatggagttccacaacagcctgcaggacttcatcaactggctgacccaggccgagcagaccctgaacgtggccagcagacccagcctgatcctggacaccgtgctgttccagatcgacgagcacaaggtgttcgccaacgaggtgaacagccacagagagcagatcatcgagctggacaagaccggcacccacctgaagtacttcagccagaagcaggacgtggtgctgatcaagaacctgctgatcagcgtgcagagcagatgggagaaggtggtgcagagactggtggagagaggcagaagcctggacgacgccagaaagagagccaagcagttccacgaggcctggagcaagctgatggagtggctggaggagagcgagaagagcctggacagcgagctggagatcgccaacgaccccgacaagatcaagacccagctggcccagcacaaggagttccagaagagcctgggcgccaagcacagcgtgtacgacaccaccaacagaaccggcagaagcctgaaggagaagaccagcctggccgacgacaacctgaagctggacgacatgctgagcgagctgagagacaagtgggacaccatctgcggcaagagcgtggagagacagaacaagctggaggaggccctgctgttcagcggccagttcaccgacgccctgcaggccctgatcgactggctgtacagagtggagccccagctggccgaggaccagcccgtgcacggcgacatcgacctggtgatgaacctgatcgacaaccacaaggccttccagaaggagctgggcaagagaaccagcagcgtgcaggccctgaagagaagcgccagagagctgatcgagggcagcagagacgacagcagctgggtgaaggtgcagatgcaggagctgagcaccagatgggagaccgtgtgcgccctgagcatcagcaagcagaccagactggaggccgccctgagacaggccgaggagttccacagcgtggtgcacgccctgctggagtggctggccgaggccgagcagaccctgagattccacggcgtgctgcccgacgacgaggacgccctgagaaccctgatcgaccagcacaaggagttcatgaagaagctggaggagaagagagccgagctgaacaaggccaccaccatgggcgacaccgtgctggccatctgccaccccgacagcatcaccaccatcaagcactggatcaccatcatcagagccagattcgaggaggtgctggcctgggccaagcagcaccagcagagactggccagcgccctggccggcctgatcgccaagcaggagctgctggaggccctgctggcctggctgcagtgggccgagaccaccctgaccgacaaggacaaggaggtgatcccccaggagatcgaggaggtgaaggccctgatcgccgagcaccagaccttcatggaggagatgaccagaaagcagcccgacgtggacaaggtgaccaagacctacaagagaagagccgccgaccccagcagcctgcagagccacatccccgtgctggacaagggcagagccggcagaaagagattccccgccagcagcctgtaccccagcggcagccagacccagatcgagaccaagaaccccagagtgaacctgctggtgagcaagtggcagcaggtgtggctgctggccctggagagaagaagaaagctgaacgacgccctggacagactggaggagctgagagagttcgccaacttcgacttcgacatctggagaaagaagtacatgagatggatgaaccacaagaagagcagagtgatggacttcttcagaagaatcgacaaggaccaggacggcaagatcaccagacaggagttcatcgacggcatcctgagcagcaagttccccaccagcagactggagatgagcgccgtggccgacatcttcgacagagacggcgacggctacatcgactactacgagttcgtggccgccctgcaccccaacaaggacgcctacaagcccatcaccgacgccgacaagatcgaggacgaggtgaccagacaggtggccaagtgcaagtgcgccaagagattccaggtggagcagatcggcgacaacaagtacagagtgagcttccagagcaacttcggcgacagccagcagctgagactggtgagaatcctgagaagcaccgtgatggtgagagtgggcggcggctggatggccctggacgagttcctggtgaagaacgacccctgcagagtgcaccaccacggcagcaagatgctgagaagcgagagcaacagcagcatcaccaccacccagcccaccatcgccaagggcagaaccaacatggagctgagagagaagttcatcctggccgacggcgccagccagggcatggccgccttcagacccagaggcagaagaagcagacccagcagcagaggcgccagccccaacagaagcaccagcgtgagcagccaggccgcccaggccgccagcccccaggtgcccgccaccaccacccccaagggcacccccatccagggcagcaagctgagactgcccggctacctgagcggcaagggcttccacagcggcgaggacagcggcctgatcaccaccgccgccgccagagtgagaacccagttcgccgacagcaagaagacccccagcagacccggcagcagagccggcagcaaggccggcagcagagccagcagcagaagaggcagcgacgccagcgacttcgacatcagcgagatccagagcgtgtgcagcgacgtggagaccgtgccccagacccacagacccacccccagagccggcagcagacccagcaccgccaagcccagcaagatccccaccccccagagaaagagccccgccagcaagctggacaagagcagcaagagatag

SEQ ID NO: 269251 - DNA, 24269 bp, Artificial Sequence
  derived and/or modified sequence
atgatcgccgcggctttcctcgtcttgctgagaccctacagcatccaatgtgccctcttcctcttgttgcttctgctgggcaccatcgccaccatcgtcttcttctgctgctggcaccgcaagctccagaaagggaggcatccgatgaaatcggtcttctcgggtcgttcaagaagccgagatgctgttttgagatcgcaccactttcgttctgagggattcagagcaagccctcggcatcttagaagacgagttgcagcggccgcagctgcccgtctggaagaagtgaagcccgtggtggaagttcaccatcagagtgagcaagaaacttcagtgaggaaacgaagaatcaagaagagcagccgagtccagccagaattttatcactctgttcaaggtgcttcaatcaggaggcctagttccgggaacgcgtcctatcgctgctctatgtcttcctctgcggatttttccgatgaggatgatttcagccagaaatctggctccgcatccccagctccgggagacaccttaccctggaatttgcctaaacatgagagatcgaaaagaaagattcaagggggctcagtgctggaccctgccgagagggcagtgcttcggatagcagatgaacgggacaaagttcagaagaaaacatttacaaaatggataaatcagcatctcatgaaggttcgaaaacatgtgaatgatctctatgaagacttaagggatggacacaatttgatttctcttttagaggttctttcaggagataccttgcccagagaaaaaggtcggatgcgttttcacagactacagaatgtacaaattgcacttgactatttgaaaagacgccaggtgaaattagtgaatattagaaatgatgacataacagatggaaatcccaaattgactttgggattaatctggacaataattttgcactttcagatatctgatatccatgttactggagagtcagaggatatgtctgcaaaagagagattgctactctggacgcagcaggcaacagagggttatgctggaattcggtgtgaaaatttcactacctgctggagagatggaaaattatttaatgccatcattcataaatacaggccggacctgatagatatgaatactgttgctgttcaaagcaaccttgcaaatttagagcatgctttttacgtagcagaaaaaattggtgttataagacttctggaccctgaagatgtcgatgtctcctcacctgatgaaaaatcagtaataacttacgtgtcatctctctatgatgcatttcctaaagtccctgaaggtggggaaggcattggtgcaaatgatgttgaagtcaaatggattgaataccagaatatggtgaactacctcatccaatggattagacaccatgtgaccacaatgtctgagagaacatttcctaataatcctgtagaactgaaggcactttataatcagtatttacagtttaaagaaacagaaattccaccaaaggagacagaaaaatcaaaaattaaacgtctatataaattattagagatttggatagaatttggacgcatcaagctccttcaaggttatcatccaaatgacatagaaaaagagtgggggaaactcattattgccatgctagagagagagaaggcccttcgtccagaagtagaaaggttagaaatgttgcaacagattgccaacagagttcagagggacagtgtcatctgtgaagacaaactgattcttgctggaaatgctcttcagtctgattctaaaagattagaatcaggagtgcagtttcagaatgaagcagaaattgctgggtatatacttgaatgtgagaaccttttacgccagcatgtaattgatgtacagattcttattgatggaaaatactaccaggcagatcaattggtacagagggttgcaaaactgcgtgacgaaattatggccttaaggaacgaatgttcttctgtgtacagcaaaggacgcatactgacaacagaacagacaaagctcatgatatcaggaatcactcaaagtttaaactcaggatttgcacagaccttacaccctagtctgacctcagggctgacccagagtttaacaccttccctaacctcttctagtatgacttctggcctgtcatcagggatgacttcccgcctgactccatctgtcactccagcttatacacctggtttcccatcaggattagttccaaatttcagttcaggagtagagccaaattcattgcaaactttgaagttgatgcagatccgaaaaccccttctaaagtcttctttgctggatcaaaatttaacagaagaagaaatcaatatgaaatttgttcaggatcttttgaattgggttgatgagatgcaggtacaactggaccgcactgagtggggctcagatttgccaagtgttgaaagccatttagaaaatcataaaaatgttcatagagctattgaagaatttgaatctagtctcaaagaagctaaaatcagtgagattcaaatgacagcacctcttaaactgacttatgcagaaaagttgcacagattagagagtcagtatgcaaaactcttgaatacatccaggaatcaagaacggcaccttgatacactccataattttgtaagtcgtgcgactaatgaacttatttggttgaatgaaaaagaagaggaggaagttgcttatgactggagtgagagaaacaccaacatagctaggaaaaaagattatcatgctgaattaatgagagaacttgatcaaaaggaagaaaatattaaatcagttcaggagatagcagagcagctacttctagaaaatcatccagcccggttaactattgaggcctacagagcggcaatgcagacgcagtggagctggatcttacagctctgccagtgtgtggagcagcacataaaggagaacacagcgtatttcgagtttttcaatgatgccaaagaagctactgattacttaaggaatctaaaagatgccattcagcggaagtacagctgtgatagatcaagcagcattcacaagctagaagaccttgttcaggaatcaatggaagagaaagaagaacttctgcagtacaaaagcactatagcaaacctaatgggaaaagcaaaaacaataattcaactgaagccaaggaattctgactgtccactcaaaacttctattccgatcaaagctatctgtgactacagacaaattgagataaccatttacaaagacgatgaatgtgttttggcgaataactctcatcgtgctaaatggaaggtcattagtcctactgggaatgaggctatggtcccatctgtgtgcttcaccgttcctccaccaaacaaagaagcggtggaccttgccaacagaattgagcaacagtatcagaatgtcctgactctttggcatgagtctcacataaacatgaagagtgtagtatcctggcattatctcatcaatgaaattgatagaattcgagctagcaatgtggcttcaataaagacaatgctacctggtgaacatcagcaagttctaagtaatctacaatctcgttttgaagattttctggaagatagccaggaatcccaagtcttttcaggctcagatataacacaactggaaaaggaggttaatgtatgtaagcagtattatcaagaacttcttaaatctgcagaaagagaggagcaagaggaatcagtttataatctctacatctctgaagttcgaaacattagacttcggttagagaactgtgaagatcggctgattagacagattcgaactcccctggaaagagatgatttgcatgaaagtgtgttcagaatcacagaacaggagaaactaaagaaagagctggaacgacttaaagatgatttgggaacaatcacaaataagtgtgaggagtttttcagtcaagcagcagcctcttcatcagtccctaccctacgatcagagcttaatgtggtccttcagaacatgaaccaagtctattctatgtcttccacttacatagataagttgaaaactgttaacttggtgttaaaaaacactcaagctgcagaagccctcgtaaaactctatgaaactaaactgtgtgaagaagaagcagttatagctgacaagaataatattgagaatctaataagtactttaaagcaatggagatctgaagtagatgaaaagagacaggtattccatgccttagaggatgagttgcagaaagctaaagccatcagtgatgaaatgtttaaaacgtataaagaacgggaccttgattttgactggcacaaagaaaaagcagatcaattagttgaaaggtggcaaaatgttcatgtgcagattgacaacaggttacgggacttagagggcattggcaaatcactgaagtactacagagacacttaccatcctttagatgattggatccagcaggttgaaactactcagagaaagattcaggaaaatcagcctgaaaatagtaaaaccctagccacacagttgaatcaacagaagatgctggtgtccgaaatagaaatgaaacagagcaaaatggacgagtgtcaaaaatatgcagaacagtactcagctacagtgaaggactatgaattacaaacaatgacctaccgggccatggtagattcacaacaaaaatctccagtgaaacgccgaagaatgcagagttcagcagatctcattattcaagagttcatggacctaaggactcgatatactgccctggtcactctcatgacacaatatattaaatttgctggtgattcattgaagaggctggaagaggaggagaagtcactggaagaagaaaagaaagaacatgttgaaaaagccaaagaattgcaaaaatgggtatcaaatatcagcaagacattgaaagatgcagagaaggctggaaaacctcccttctctaagcaaaagatttccagtgaggaaatatcaaccaagaaggaacaattatcggaagcacttcaaactatacagctttttttggcaaaacatggagacaaaatgacagatgaagaaagaaatgaattggaaaaacaagtgaaaactcttcaggaaagttataatttattattcagtgaatctctgaaacagctacaagaatcacaaacctcaggagatgtaaaggtagaggagaagctggataaagtgattgcaggcaccattgatcagacaactggagaagtcctttcagtctttcaagcagttttaagaggcctcattgactatgacacaggaattaggttgcttgagacacagctaatgatttctggtctaatttcaccagaattaagaaagtgctttgaccttaaagatgccaaaagtcatggccttattgatgaacaaattctgtgccaactcaaagaactaagtaaagctaaggagattatttctgctgcgtcacctaccacaattccagtactggatgctctagctcaaagcatgataacagaatccatggccatcaaagttcttgagatactgctttctacaggctctctggttattccagccacaggagaacagttgaccctacagaaggctttccaacagaacttggtttcctcagcattattttctaaagttctggaaaggcaaaatatgtgcaaagatcttattgacccctgcacctctgagaaggtttctttaatagatatggtacaaagaagtactttacaggaaaacacagggatgtggcttctacctgtgagaccacaagaaggaggtagaataacattaaaatgtggaagaaacataagcattttaagagcagctcatgaaggtctcatagaccgtgaaaccatgtttaggttgttaagtgcacagcttctttctggaggtctgatcaattccaactctggccaaagaatgactgttgaagaagctgtcagagaaggggtgattgacagggacactgctagcagtatcctcacatatcaggttcaaactggtggaatcatccagtcaaaccctgccaagcgtttaactgtagacgaagcagtacagtgtgatttaataacttccagcagtgctcttctggtcctggaagctcagcgaggctatgttggactcatttggccccattctggtgaaatatttcccacatcatcttccttgcagcaagaattgattacaaatgaattggcctacaaaatcctgaatggcagacaaaaaatagctgctctttatattccagaaagttctcaagtcattggtttggatgctgctaaacagctaggaattatagacaacaacacagcatcaattttaaaaaatataacactgcctgataaaatgccagatttaggagatttagaagcttgtaaaaatgccagaagatggctctctttttgtaaatttcaaccctccacagttcatgattacagacaagaagaggatgtttttgatggagaagaacctgtcactactcagacctcagaagaaactaaaaaattatttctatcttatttaatgataaatagctatatggatgcaaacacagggcaaaggcttttgctgtacgatggagacttggatgaggctgttggcatgctactggaaggctgtcatgcagaatttgatggaaacacagccataaaagaatgtctcgatgtcttaagctcatctggtgtatttcttaataatgcttcaggtagagaaaaggatgaatgtacagctacaccaagtagtttcaataaatgtcactgtggagaacctgaacatgaagagactcctgaaaatagaaagtgtgctatagatgaagaatttaatgaaatgagaaatactgttatcaatagtgaattttctcagtcaggaaaactggcaagtacaatatcaattgatcctaaagttaacagttcacccagtgtgtgtgttcccagtctcatatcatatttaacacagactgaacttgcagacattagcatgcttagaagtgactctgaaaacatacttacaaactatgaaaatcaaagccgagtggaaacaaatgaacgtgcaaatgaatgtagtcattctaaaaacattcaaaactttccaagtgatttaatagaaaatcctattatgaaatcaaaaatgagtaaattctgtggtgtgaatgaaacagagaatgaagataatacaaacagggattcacctatctttgactattcccccaggctaagtgccttgttaagtcatgataaattgatgcacagtcagggaagttttaatgatacacacaccccagagagcaatggaaataagtgtgaagccccagccttatcattcagtgacaaaaccatgttgtcaggtcaaagaataggagaaaaatttcaagaccagtttctgggaattgcagctattaacatcagtttaccaggagagcagtatggacagaaatctttaaatatgatttctagtaatcctcaagtacaatatcacaatgataaatacatttcaaatacttctggtgaggatgaaaaaacacatccaggttttcagcagatgcctgaagacaaggaagatgagtctgaaatagaagagtattcctgtgctgtgactccagggggtgatactgataatgccattgtgtctcttacttgtgctacaccattgcttgatgaaaccatcagtgctagtgactatgaaacgtcactgctgaatgatcagcagaataacacaggaacagacactgatagtgatgatgatttttatgatactcccttgtttgaagatgatgaccatgattctttgcttcttgatggtgatgatcgtgattgcctgcaccctgaggactacgacacactgcaagaggaaaatgatgagacggcttctcctgctgatgttttttatgatgtctcaaaagagaatgaaaattccatggttccccagggggcaccagttggtagcttaagtgtgaagaacaaagcacattgtcttcaggatttccttatggatgttgagaaagatgaattagattctggtgaaaaaatacatttaaatcctgttggctcagataaggtgaatggacagtcactggaaactggatcagaaagggaatgcacaaatatccttgaaggtgatgaatctgactcattgactgattatgatattgtaggaggaaaagagagcttcactgcatcattaaaatttgatgacagtggcagttggagaggaagaaaggaagagtatgtaactggacaggaatttcactccgatactgatcatttagattctatgcaaagtgaagaaagttatggggattatatatatgacagtaatgatcaggatgacgatgatgatgatggcattgatgaagaaggaggaggtataagagatgagaatggaaagcccaggtgccaaaatgtggctgaagatatggatatccagttgtgtgcctctattttaaatgaaaacagtgatgaaaatgaaaatattaatacaatgattcttctggataaaatgcacagttgtagctctttagaaaaacagcaaagggtaaatgttgtacagctagcatcacctagtgaaaataacttagttactgaaaaaagcaaccttccagaatatacaactgagattgctggaaaaagcaaagaaaatctgttgaaccatgagatggtacttaaggatgtattgccgcctatcattaaagacactgaatctgaaaaaacttttggccctgcaagtatttcacatgataataataatatcagttcaacttctgaattaggtactgatctagcaaacacaaaggttaagttgattcaagggtcagaattgccagaattgactgattctgtgaaaggtaaagatgaatattttaagaatatgacaccaaaagttgactcatctcttgatcacatcatttgtactgagcctgatttaataggaaaacctgctgaggaaagccatttgtcattgatagcctctgtaactgacaaagatcctcaaggaaatggaagcgatctcattaaagggagagatggcaaaagtgatattctaatagaagatgaaacatcaattcagaaaatgtacttgggtgaaggagaagtgcttgtagaaggtctagtagaagaagaaaataggcatctcaaacttttgcctggtaaaaatacaagggatagtttcaagttaattaatagtcagtttccatttccacaaatcacaaacaatgaagaacttaatcagaaaggaagccttaaaaaagcaactgtaactcttaaagatgaaccaaataatctacaaataatagttagtaaaagtcctgttcagtttgagaatcttgaagaaatttttgacacatcagtttccaaagagattagtgatgacattacttcagacattacatcgtgggaagggaatacacattttgaggagtcattcactgatggacctgagaaagagcttgatctgtttacttacttaaaacattgtgctaaaaatataaaagcaaaagatgtagccaaaccaaatgaagatgtcccaagccatgttttaataactgcccctcccatgaaagaacatttacaattaggagttaataatacaaaagagaagtccactagtacccaaaaagactcacctcttaatgacatgatccaaagcaatgatctttgtagtaaagaaagcatctcaggaggaggaacagaaatttctcagttcacaccagaaagtattgaagccacactttcaatattatctcgtaaacatgtagaagatgttgggaaaaatgattttctgcagtcggagcggtgtgcaaatggattaggaaatgataactccagtaacactttaaatactgactattcattcttagaaattaataataagaaagaaagaattgagcaacagctaccaaaagaacaagccttgtctccaagatcccaagaaaaggaggttcagattcctgaattgtctcaggtatttgtggaggatgtaaaggatatcttaaaaagcaggttgaaagaaggtcatatgaaccctcaagaggttgaagaaccttcagcctgtgcagacactaaaattttaattcaaaatttaattaaaaggattaccacatcacagttggtaaatgaggcatctactgtgcccagcgactctcaaatgagtgactcttctggagtttcccccatgactaactcatcagaactaaagccagaaagtagagatgatcctttctgtattggaaatcttaagtctgagcttctccttaatatattgaagcaagatcaacatagccaaaaaattacaggagtatttgaattgatgagagaattaactcatatggagtatgacctagagaaaagaggcattacgtctaaagtacttccactgcagcttgaaaatattttctacaaactgcttgctgatggatattcagagaaaatagaacatgttggagactttaatcaaaaagcatgttctacatctgagatgatggaagaaaagccacatattcttggtgatattaaaagcaaagaaggaaactactattctcctaatttagaaactgtaaaagaaattggactagaaagctctactgtgtgggcatcaacattgccaagagatgagaagctcaaggatctgtgtaatgatttcccaagccatttggaatgtacttcagggtctaaagagatggcttctggagatagctcaaccgaacaattttccagtgaattacagcagtgtttacagcacactgaaaaaatgcatgagtatttgacattgcttcaagatatgaaaccccccttagacaaccaggaatctctggataacaacttggaagctttgaagaatcaacttagacagttggagacatttgaattgggattagctccaattgctgttattttaagaaaagatatgaagttggcagaagagtttttaaagtctcttcccagtgactttcccagaggccatgttgaagaattgagtattagccaccagagtttgaagaccgccttctcttccctcagcaacgtgtcttcagaaagaacgaaacagatcatgcttgcgatcgactctgaaatgtctaaactagcagtttcccatgaagaatttctgcataaacttaagtcattctcagattgggtatcagagaagagcaaatctgtgaaggatattgagattgtgaatgttcaagattctgagtatgtaaagaaacgtttggagtttctcaaggcaaataatgtattaaaagaccttggacataccaaaatgcagctggagactactgcctttgatgtgcagttcttcatttctgaatatgcacaggatctgtctcccaaccaaagcaaacaactgctgaggctcttaaatacaactcagaagtgttttcttgatgtacaggagtcagtaactacccaggtggaacgtttagagactcagttacatctagaacaagatcttgatgatcagaagattgtagcagagcgtcagcaggagtataaagagaaactccaagggatatgtgatcttcttacccaaactgaaaaccgcctaattggtcaccaagaagccttcatgattggagatggcacagttgagttaaagaaatatcagtccaagcaagaggaattacagaaagatatgcaaggaagtgcacaggcattggctgaagtagtgaaaaacacagagaacttcttaaaagagaatggtgaaaagctgtcacaggaagataaggctttgattgaacagaaacttaatgaagctaagataaagtgtgaacagcttaatttaaaagcagaacagtctaaaaaggagctggataaagttgtgacaacagcaatcaaggaagaaactgaaaaggtagcagcagtgaagcagctggaagagagcaaaaccaaaatagaaaaccttttggactggttgtcaaatgttgacaaagactcagaaagggcagggacaaaacacaaacaggtaatcgaacagaacgggacccattttcaagaaggtgatggcaagtcagcaattggagaagaggatgaagttaatggtaacctgttggagactgatgttgatgggcaagttggaaccactcaggagaatctgaatcagcaatatcagaaagttaaggcccaacacgagaagatcatctctcagcaccaagcagtgatcatagccactcagtctgcacaagtgttgcttgagaaacagggtcagtatctctctcctgaagaaaaagagaaactgcaaaagaacatgaaggaactgaaagtgcattatgaaactgcactggctgagtcagagaagaaaatgaagttaactcactctctgcaggaagaattagaaaagtttgatgctgactataccgagtttgagcactggctacagcagtcagaacaagaacttgaaaacctggaggcaggtgcagatgacatcaatggtttaatgaccaaattgaagaggcagaagagtttctcagaagacgttatttctcacaaaggtgacttgagatacatcacaatttctggaaacagagtgttggaagctgccaaatcttgcagcaagagagacggtggcaaggttgatacttctgcaacccacagagaagtgcagcgcaagttggatcatgctactgatcggttcaggtctctctactctaagtgcaatgttcttggaaataatcttaaagatctggtggataaatatcaacactatgaagatgcttcatgtggacttcttgctggactccaggcctgtgaggccacagcgagcaaacacttatctgaacctattgcggtggaccccaaaaatcttcaaaggcaattagaagagaccaaggctttgcaaggacagatatcaagtcagcaggttgctgtagagaaactgaagaaaacggctgaagtgcttttagatgccaggggatctttacttccagccaagaatgatatccagaaaacacttgatgacattgttgggagatatgaggatctgtccaagtctgttaatgaacgaaatgaaaaactccagataaccttgacccgttcactgagtgtgcaggatggcttggatgaaatgctggactggatgggaaatgtggaaagttctctgaaagaacaaggtcaagtgcctttaaactctactgctcttcaggatattatcagtaaaaacattatgttggaacaggatattgcaggtcgtcagagcagtataaatgccatgaatgaaaaagtgaagaaatttatggaaacaacagatccatccactgcatcctcactgcaagccaaaatgaaagacttgtctgctcggttttcagaagcaagtcataaacacaaagaaactcttgccaaaatggaggagctaaaaaccaaagtagaactgtttgagaacctctcagaaaagctccagacatttttagaaacaaaaactcaggctcttactgaagtagatgtgccaggaaaagatgttactgaattgtctcagtatatgcaggaatcaacttctgaatttttagaacacaagaaacatcttgaagttttgcatagtctcttgaaggagatatccagccatggcttaccaagtgataaggctttggtccttgaaaaaacaaataatttgtcaaagaaattcaaggaaatggaggataccatcaaagaaaaaaaagaagctgtaacttcttgtcaagaacagttggatgctttccaagttcttgttaaatcattgaagtcatggataaaagaaacaacaaaaaaagttcccattgtacagccttcttttggtgcagaggatttaggaaaatctttggaagacactaagaaattacaagaaaagtggagtttaaaaacaccagagattcagaaagtaaacaacagtgggatctcactatgtaacttaataagtgctgtgaccacccctgcaaaggcaatagcagcagttaaatcaggtggagcagtattaaatggtgaaggaacagccacaaatactgaggaattttgggcaaataaaggtttaacatccattaaaaaggacatgactgacataagtcatggttatgaagatcttggcctcttactcaaggacaaaatagcggaactgaacactaaactctccaaattgcaaaaggctcaggaagaatcaagtgcaatgatgcagtggttacagaaaatgaacaaaactgcaacaaaatggcagcagacacctgcacctacagatactgaagctgtgaagactcaagttgagcagaataagtcgtttgaggcagaactgaagcagaatgtaaacaaagtacaggagttgaaagacaaattgacagagctgttggaggagaacccagatactcctgaggcccccagatggaaacagatgttgacagaaatagattctaagtggcaagaactcaatcaattaacaattgatagacaacaaaaactggaagaatcctccaataatctaacccagttccagactgtagaggcccaattgaaacagtggcttgtggaaaaagaacttatggtcagtgttcttgggcccttgtcaattgacccaaatatgctaaacacacaaaggcagcaggtgcagattttgctgcaagaattcgccactcggaaacctcaatatgaacagctgacagcagctggtcagggcattctgagcaggcctggagaagacccttctttacgtgggattgtgaaagagcaactggcagctgtgacccaaaaatgggatagcctaacagggcaattgagtgacagatgtgactggattgaccaagccattgttaaaagcacacagtatcaaagcctgctgagaagcctttctgataaactgagtgacttggataataaactcagcagcagtctggctgtgagcacgcaccctgatgctatgaaccaacagttggaaacagcccaaaaaatgaagcaggagatacagcaggaaaagaagcagataaaagtggcccaggcactctgtgaggatttgtcagcactggttaaagaagagtacttgaaagcagaacttagtaggcaactagaaggcatcttaaaatcatttaaggatgttgaacagaaagcagagaatcatgtccagcaccttcagtcggcctgtgcaagctctcatcaatttcagcaaatgtctagagattttcaggcttggctggatacaaagaaagaagagcaaaacaaatctcatccaatatctgccaaactcgatgtcttggagtcattaattaaagatcataaagactttagtaaaactttgaccgctcagtctcatatgtatgaaaaaaccattgcagaaggtgaaaatctgttattaaaaacacaagggtctgagaaggcagccttacagttacagcttaatacaattaaaaccaattgggatacatttaataagcaggtgaaagaaagagaaaacaagttaaaagagtcattggaaaaagcccttaagtataaagagcaagtagagactctctggccatggatagacaaatgccaaaacaacctggaggaaataaaattttgcttggatcctgctgaaggagagaattctattgccaagttaaagtctctgcagaaggaaatggaccaacactttggtatggtagaattactgaacaacacagccaatagcttgctcagtgtctgtgagatagataaagaagttgttacagatgagaataagtcactgatccagaaggtggacatggtcactgaacaacttcacagtaagaaattctgtctggagaacatgactcagaagtttaaagaatttcaagaagtttccaaagaatctaaaaggcagcttcagtgtgcaaaggagcagctagatatccatgattcgctgggatcccaggcttacagtaacaaatacctgaccatgttgcaaactcagcagaaatcacttcaggccttgaagcatcaggtagatttggctaaaagacttgcacaggaccttgtggtagaggcctcagactcaaagggaacctctgatgttttattacaagtggaaaccatagctcaagagcatagtacactaagtcagcaggttgatgaaaagtgttctttcttagaaaccaagcttcagggcattgggcatttccagaataccattcgagaaatgttttctcagttcgcagagtttgatgatgaactggatagcatggctccagtggggagagatgcagaaacattgcaaaagcaaaaggaaactataaaagcctttctaaagaaactagaagccctcatggcaagcaatgacaatgccaataaaacctgcaagatgatgttagccacagaagaaacctctcctgaccttgttggaatcaaaagggacttggaggccttaagcaaacaatgcaacaagttactggaccgagcccaagccagagaagagcaggttgaagggacaattaagcgccttgaagaattttacagcaaattgaaagaattttctattctgctccagaaagccgaagaacatgaagagtcacaaggtcctgttggtatggaaacggagacaattaatcagcagcttaacatgttcaaggtattccagaaagaagagattgaacccttgcaaggtaaacagcaagatgtaaactggttaggtcaaggccttattcagagtgctgccaaaagcactagcactcagggcttggagcatgacctggatgatgtcaatgcacggtggaagactctcaataagaaggtggctcagcgagcagcccagctgcaggaggccttgctgcactgtgggaggttccaggatgccctggagtccctgctcagctggatggtggacactgaggagcttgtggccaatcagaagcccccgtcggctgagttcaaagtggtaaaggcccagatacaagaacaaaagcttctccagagattgttggatgaccgaaaatctacggtggaggtaatcaaacgagaaggagaaaaaattgctacaacagcagagcccgcagataaagtgaagattttgaaacagctcagtctcttggatagcagatgggaggcattgcttaataaagctgaaacaaggaatcgtcagttggaaggtatctcggtggtagcacagcaatttcatgaaaccttagaaccactgaacgagtggcttacaaccatagaaaagaggctggtgaattgtgaacccataggaacccaagcatctaaacttgaggaacaaattgcacagcacaaagccttagaagatgacatcatcaatcacaataaacatttacaccaggctgttagcattggccagtccttaaaggttttgagctccagggaggataaagatatggtgcagagtaaattagacttctctcaagtatggtacattgagattcaagagaaaagtcacagcaggtctgagctcctccagcaggccttatgtaatgctaagatttttggggaagatgaagttgaactgatgaactggctgaatgaagtgcatgacaaactgagcaagctctcagtccaggattacagcactgaggggctatggaagcagcagtctgaacttcgggttctgcaagaggacatcttactcaggaaacaaaatgtagatcaggctttactaaatggtttagaactacttaaacaaaccacaggtgatgaagttttaataattcaagataaattggaagccattaaagcaaggtacaaagacattactaaactgagcactgatgtggccaagactctggaacaggcgctgcagcttgcaaggcggctgcactccacacacgaagagctgtgtacctggctggacaaagtggaggtggaattactttcatatgaaactcaggttctgaaaggagaagaagcaagtcaagcacaaatgagaccaaaggaactgaaaaaggaagctaagaacaacaaagccttactggactcccttaatgaagtgagcagtgctttgctggaactggtaccatggagggcaagagaaggacttgagaaaatggtagctgaggacaatgagcgctaccgattagtgagcgacaccatcactcagaaggtggaggagatcgatgcagccattctgcgatcacagcagtttgaccaagcagctgatgctgagttatcctggattactgaaacagaaaaaaaattgatgtctctgggtgacatcaggcttgagcaagaccagacttctgctcagcttcaagttcaaaagacattcaccatggagattttgagacacaaggatattattgatgaccttgttaaatctgggcataaaatcatgaccgcatgcagtgaagaggaaaagcaatcaatgaagaaaaaactggacaaggtactgaagaactatgataccatctgccagattaattcagaaaggtatctgcagctggaacgggcacagtccctggttaaccaattctgggaaacatatgaagaactttggccatggctgacagaaacacaatcaatcatctctcagcttcccgccccagcccttgaatatgaaactctaaggcagcagcaggaagaacatcggcaactgcgtgagttgatagctgaacacaagcctcatatagataagatgaacaaaactgggccacagttactggaattgagccctggggaaggcttttctatccaagagaagtatgtggcagccgacaccctttacagtcaaattaaagaagatgtcaaaaagcgtgctgtggcactggatgaagccatttctcaatcaactcagttccatgacaagatagatcagatccttgagagcctggaacgcatcgtggaacgtctgaggcagccaccctctatctctgcagaggttgagaagatcaaggaacagatcagtgaaaataagaatgtgtcagtagacatggaaaagctacagccgttgtatgaaactcttaaacagaggggagaggaaatgattgctagatctggggggactgataaagacatatctgccaaagctgttcaggataagcttgaccaaatggttttcatttgggagaacatacacacactggtggaagagagggaagccaaactactggatgtgatggagctagcagaaaagttctggtgtgatcacatgtcattgatagttaccattaaagatactcaagatttcatccgggacctggaagatcctggaattgatccttcagtagtaaaacaacagcaagaagcagcagagaccataagggaagaaatagatggactacaggaggagctggatatagttattaacctaggttctgaactcattgcggcatgtggggagcctgataaacccattgtcaagaagagtatagatgagttaaattcagcatgggattctctaaataaagcttggaaagaccggattgacaaacttgaggaggcaatgcaggctgccgttcagtaccaggatggactgcaggcggtatttgactgggtagatattgcaggtggtaaattagcttcaatgtctccaattggaacagatctcgaaactgtcaagcagcagattgaagagctaaagcaatttaagtctgaggcctatcaacagcagatagaaatggaaagactgaatcatcaagcagagcttttgctaaagaaagtaacagaagagagtgacaaacacactgttcaagacccattaatggaactgaaattgatatgggatagcctggaggagagaatcatcaacagacagcataaactggagggtgctctattagccttgggtcagttccaacatgccctggatgagctcctggcatggctgacacacaccgagggcttgctaagtgagcagaaacctgttggaggagaccctaaagccattgaaattgaacttgccaagcatcatgtgctccaaaatgatgtattagcccatcagtccacagtggaagccgttaataaagcaggaaatgatctaattgaatcaagtgcaggagaagaagcaagcaaccttcagaacaagctagaggttttaaatcaacgctggcaaaatgttttggaaaaaacagaacaaaggaagcagcagctggatggtgccttgcgccaggccaaagggttccatggcgaaattgaggatttgcagcagtggctgactgacacggagcgtcatctgttggcatctaaaccgctgggaggtttaccggaaacagccaaggagcagcttaatgtccatatggaagtctgtgctgcctttgaagctaaagaagaaacatataagagtctgatgcagaaaggccagcagatgcttgcaagatgcccaaaatctgcagagacaaatattgaccaagacataaataacttgaaagaaaaatgggaatcggtggaaaccaaactcaatgaaaggaaaactaaactggaagaggctctcaacttggcaatggagttccacaattctctccaagacttcatcaactggcttactcaggctgaacagaccctaaatgtagcttctcggccaagtctcatcttggacacagtcttatttcaaattgacgaacacaaggtttttgccaatgaagtaaattctcatcgtgagcagataatagagctggacaaaactggaacccacctaaaatattttagtcagaaacaagatgttgttctaatcaagaatctacttatcagtgtacaaagtcgatgggaaaaagtggttcaacggttggtagagagaggaagatctttggatgatgcaaggaagagagccaagcagttccatgaagcttggagtaaacttatggagtggctagaagagtcagaaaagtctttggattctgaactggaaatcgcaaatgatccagacaaaataaaaacacaacttgcacaacataaggagtttcagaaatcactcggagccaagcattctgtctacgacaccaccaacaggactggacgttctctgaaggagaaaacctccctggctgatgacaacctgaaactggatgacatgctgagtgaactcagagacaaatgggataccatatgtggaaaatctgtggaaagacaaaacaaattggaggaagccctgttattttctggacaattcacagatgccctacaggctctcattgattggttatatagagttgaaccccagctggcagaagaccagcctgttcatggagacattgatttggtgatgaatctgatcgataatcacaaggccttccaaaaagagttggggaagaggaccagcagtgtgcaggccctgaagcgctcagcccgagaactcatagaaggcagtcgggatgactcctcctgggtcaaggtccagatgcaggaattaagcacacgctgggagaccgtgtgtgcactttctatatcaaagcaaacacggttagaagcagccctgcgtcaggcagaggaattccactcggtggtacatgccctcttggagtggctggctgaggcggagcaaaccctgcgtttccatggtgtcctcccagatgatgaggatgctctccggactctcattgatcagcataaagaattcatgaagaaactggaagaaaagagagctgaactaaataaagccaccactatgggcgacaccgttttggctatctgccaccccgactccatcactaccattaagcactggataacaatcatccgggcgaggtttgaggaggtgctggcctgggcaaagcaacatcagcagagattagcaagtgctctggctgggcttattgccaaacaggaattgttggaagctttgctggcttggttgcaatgggctgaaactacacttactgataaggataaagaagtcatcccccaggagatcgaagaggtgaaagcactcattgcagaacaccagaccttcatggaggaaatgaccagaaaacagcctgatgttgataaagtaacgaagacctataagaggagagctgctgatccttcctcattacaatcccatattccagtcttggataagggacgagcaggaagaaaacgctttccagcatcaagcttgtatccctctgggtcacagacacaaattgaaaccaaaaatcctagggtaaacttactggtgagcaaatggcagcaagtctggctcctggcgttggaaagaaggaggaaactcaatgatgccttggacagactagaggagctgagggaatttgctaactttgattttgatatctggcgcaaaaaatacatgcgatggatgaatcacaagaaatctcgagtgatggacttcttcaggagaattgataaagaccaggatgggaaaataacgcggcaggaatttattgatggaattctttcctcaaagtttccaaccagtcgcttggagatgagcgcagttgcagacatctttgacagagatggcgatggatatattgactactatgaatttgtagcagcccttcacccaaataaagatgcatataaacctatcacagatgccgacaaaatcgaagatgaggtgacaaggcaggtagctaagtgtaaatgtgcaaagcgatttcaagttgagcagattggtgataataaatacagggtaagttttcaaagtaattttggagactcccagcaactgcgactggtccggatcctgcggagtactgtgatggttcgtgttggaggtggatggatggcacttgatgagttcttagtgaaaaatgatccttgcagggttcatcatcatgggagtaaaatgttacgttcggaatcaaactcttcaattactactactcagcctactatagccaaaggaaggacaaacatggaactgcgtgagaagttcattttagcagatggtgccagccagggtatggctgctttccgaccccgaggccgaagatcccggccatcatcacgaggcgcttcacccaacagatccacttctgtgtccagtcaggctgcgcaggcggcctccccacaggtccctgccaccaccacacccaagggaacgccaatacaaggaagcaagcttcgacttccaggatatttatcagggaaaggcttccactctggggaggacagtggcttgataacaactgcagctgccagagtccgaacacagtttgctgattccaagaagactcccagccgaccaggaagtcgagctggaagcaaagctggcagcagggccagcagccgccgaggcagtgatgcatcagactttgacatttcagaaatccagtccgtgtgctcagatgtggaaactgtcccccagacacacagacctacaccccgagcaggttctcggccatccacagcgaagccttcaaaaatccccacgccccagaggaaatcacctgccagcaaattggacaagtcctcaaagagatagtgcaattggttctaccaaggcccttccttgagcatttattatttaagtttgaacgatgtaaaatatggtgtagaaattcttgtgaaatattgcaagaggcgagtttaaaattctgcagatggccttatttgtgtatttgtctttttattttatctgtataattttttttgtcagatattctggggttaaagtcacatcatatgtgaggaggaaaagtttaacatgaactaacatttctgcactgtaacgtgccgggcacacactaaactcagttactgtacctacaggtaagtctacatcctctctgacagccacagcactacatcaatccctgacgttagggatacctcatgacattttcctgtttttatggaaactctgagaagctgaatgatacatgcaggggatattttttgagatgatttaaatgtaaaccaaaagatggaagacaaaaagacaaacacacccacacgcagtctttgcagtatctgacagagaactcacaggaagttacttcaagcacttgccagtactatgatattcaagtaccttgcagcatttctctgccattgctttcaatgaggccagaggcatcctggatattagacctattatactgtaagaatataagtataaagtgcgttcatatacatgtgaggttttcttttgcttgagtggacagtagcacctgtatcattgaactcattttgtatcagagcaattttgcttgcagaaagctatgaaataaaacacgtcccttaactgcattgctatggaattaattttttttccccagggaaaactagtgtatttttttatgagcaatatcaatttggagtgaccaaaagatacttaaaaatgggtttattttgatttctcatctgaaataatcatgttctggtattatatctatctatatttaataaatatatacattttaatttattatgtgtactcacatactatagaaagatattagtatgcatttaataaaacatattcacttgaatatatgg

SEQ ID NO: 269252 - protein, 4200 aa, Artificial Sequence
  derived and/or modified sequence
MAGYLSPAAYLYVEEQEYLQAYEDVLERYKDERDKVQKKTFTKWINQHLMKVRKHVNDLYEDLRDGHNLISLLEVLSGDTLPREKGRMRFHRLQNVQIALDYLKRRQVKLVNIRNDDITDGNPKLTLGLIWTIILHFQISDIHVTGESEDMSAKERLLLWTQQATEGYAGIRCENFTTCWRDGKLFNAIIHKYRPDLIDMNTVAVQSNLANLEHAFYVAEKIGVIRLLDPEDVDVSSPDEKSVITYVSSLYDAFPKVPEGGEGIGANDVEVKWIEYQNMVNYLIQWIRHHVTTMSERTFPNNPVELKALYNQYLQFKETEIPPKETEKSKIKRLYKLLEIWIEFGRIKLLQGYHPNDIEKEWGKLIIAMLEREKALRPEVERLEMLQQIANRVQRDSVICEDKLILAGNALQSDSKRLESGVQFQNEAEIAGYILECENLLRQHVIDVQILIDGKYYQADQLVQRVAKLRDEIMALRNECSSVYSKGRILTTEQTKLMISGITQSLNSGFAQTLHPSLTSGLTQSLTPSLTSSSMTSGLSSGMTSRLTPSVTPAYTPGFPSGLVPNFSSGVEPNSLQTLKLMQIRKPLLKSSLLDQNLTEEEINMKFVQDLLNWVDEMQVQLDRTEWGSDLPSVESHLENHKNVHRAIEEFESSLKEAKISEIQMTAPLKLTYAEKLHRLESQYAKLLNTSRNQERHLDTLHNFVSRATNELIWLNEKEEEEVAYDWSERNTNIARKKDYHAELMRELDQKEENIKSVQEIAEQLLLENHPARLTIEAYRAAMQTQWSWILQLCQCVEQHIKENTAYFEFFNDAKEATDYLRNLKDAIQRKYSCDRSSSIHKLEDLVQESMEEKEELLQYKSTIANLMGKAKTIIQLKPRNSDCPLKTSIPIKAICDYRQIEITIYKDDECVLANNSHRAKWKVISPTGNEAMVPSVCFTVPPPNKEAVDLANRIEQQYQNVLTLWHESHINMKSVVSWHYLINEIDRIRASNVASIKTMLPGEHQQVLSNLQSRFEDFLEDSQESQVFSGSDITQLEKEVNVCKQYYQELLKSAEREEQEESVYNLYISEVRNIRLRLENCEDRLIRQIRTPLERDDLHESVFRITEQEKLKKELERLKDDLGTITNKCEEFFSQAAASSSVPTLRSELNVVLQNMNQVYSMSSTYIDKLKTVNLVLKNTQAAEALVKLYETKLCEEEAVIADKNNIENLISTLKQWRSEVDEKRQVFHALEDELQKAKAISDEMFKTYKERDLDFDWHKEKADQLVERWQNVHVQIDNRLRDLEGIGKSLKYYRDTYHPLDDWIQQVETTQRKIQENQPENSKTLATQLNQQKMLVSEIEMKQSKMDECQKYAEQYSATVKDYELQTMTYRAMVDSQQKSPVKRRRMQSSADLIIQEFMDLRTRYTALVTLMTQYIKFAGDSLKRLEEEEKSLEEEKKEHVEKAKELQKWVSNISKTLKDAEKAGKPPFSKQKISSEEISTKKEQLSEALQTIQLFLAKHGDKMTDEERNELEKQVKTLQESYNLLFSESLKQLQESQTSGDVKVEEKLDKVIAGTIDQTTGEVLSVFQAVLRGLIDYDTGIRLLETQLMISGLISPELRKCFDLKDAKSHGLIDEQILCQLKELSKAKEIISAASPTTIPVLDALAQSMITESMAIKVLEILLSTGSLVIPATGEQLTLQKAFQQNLVSSALFSKVLERQNMCKDLIDPCTSEKVSLIDMVQRSTLQENTGMWLLPVRPQEGGRITLKCGRNISILRAAHEGLIDRETMFRLLSAQLLSGGLINSNSGQRMTVEEAVREGVIDRDTASSILTYQVQTGGIIQSNPAKRLTVDEAVQCDLITSSSALLVLEAQRGYVGLIWPHSGEIFPTSSSLQQELITNELAYKILNGRQKIAALYIPESSQVIGLDAAKQLGIIDNNTASILKNITLPDKMPDLGDLEACKNARRWLSFCKFQPSTVHDYRQEEDVFDGEEPVTTQTSEETKKLFLSYLMINSYMDANTGQRLLLYDGDLDEAVGMLLEGCHAEFDGNTAIKECLDVLSSSGVFLNNASGREKDECTATPSSFNKCHCGEPEHEETPENRKCAIDEEFNEMRNTVINSEFSQSGKLASTISIDPKVNSSPSVCVPSLISYLTQTELADISMLRSDSENILTNYENQSRVETNERANECSHSKNIQNFPSDLIENPIMKSKMSKFCGVNETENEDNTNRDSPIFDYSPRLSALLSHDKLMHSQGSFNDTHTPESNGNKCEAPALSFSDKTMLSGQRIGEKFQDQFLGIAAINISLPGEQYGQKSLNMISSNPQVQYHNDKYISNTSGEDEKTHPGFQQMPEDKEDESEIEEYSCAVTPGGDTDNAIVSLTCATPLLDETISASDYETSLLNDQQNNTGTDTDSDDDFYDTPLFEDDDHDSLLLDGDDRDCLHPEDYDTLQEENDETASPADVFYDVSKENENSMVPQGAPVGSLSVKNKAHCLQDFLMDVEKDELDSGEKIHLNPVGSDKVNGQSLETGSERECTNILEGDESDSLTDYDIVGGKESFTASLKFDDSGSWRGRKEEYVTGQEFHSDTDHLDSMQSEESYGDYIYDSNDQDDDDDDGIDEEGGGIRDENGKPRCQNVAEDMDIQLCASILNENSDENENINTMILLDKMHSCSSLEKQQRVNVVQLASPSENNLVTEKSNLPEYTTEIAGKSKENLLNHEMVLKDVLPPIIKDTESEKTFGPASISHDNNNISSTSELGTDLANTKVKLIQGSELPELTDSVKGKDEYFKNMTPKVDSSLDHIICTEPDLIGKPAEESHLSLIASVTDKDPQGNGSDLIKGRDGKSDILIEDETSIQKMYLGEGEVLVEGLVEEENRHLKLLPGKNTRDSFKLINSQFPFPQITNNEELNQKGSLKKATVTLKDEPNNLQIIVSKSPVQFENLEEIFDTSVSKEISDDITSDITSWEGNTHFEESFTDGPEKELDLFTYLKHCAKNIKAKDVAKPNEDVPSHVLITAPPMKEHLQLGVNNTKEKSTSTQKDSPLNDMIQSNDLCSKESISGGGTEISQFTPESIEATLSILSRKHVEDVGKNDFLQSERCANGLGNDNSSNTLNTDYSFLEINNKKERIEQQLPKEQALSPRSQEKEVQIPELSQVFVEDVKDILKSRLKEGHMNPQEVEEPSACADTKILIQNLIKRITTSQLVNEASTVPSDSQMSDSSGVSPMTNSSELKPESRDDPFCIGNLKSELLLNILKQDQHSQKITGVFELMRELTHMEYDLEKRGITSKVLPLQLENIFYKLLADGYSEKIEHVGDFNQKACSTSEMMEEKPHILGDIKSKEGNYYSPNLETVKEIGLESSTVWASTLPRDEKLKDLCNDFPSHLECTSGSKEMASGDSSTEQFSSELQQCLQHTEKMHEYLTLLQDMKPPLDNQESLDNNLEALKNQLRQLETFELGLAPIAVILRKDMKLAEEFLKSLPSDFPRGHVEELSISHQSLKTAFSSLSNVSSERTKQIMLAIDSEMSKLAVSHEEFLHKLKSFSDWVSEKSKSVKDIEIVNVQDSEYVKKRLEFLKNVLKDLGHTKMQLETTAFDVQFFISEYAQDLSPNQSKQLLRLLNTTQKCFLDVQESVTTQVERLETQLHLEQDLDDQKIVAERQQEYKEKLQGICDLLTQTENRLIGHQEAFMIGDGTVELKKYQSKQEELQKDMQGSAQALAEVVKNTENFLKENGEKLSQEDKALIEQKLNEAKIKCEQLNLKAEQSKKELDKVVTTAIKEETEKVAAVKQLEESKTKIENLLDWLSNVDKDSERAGTKHKQVIEQNGTHFQEGDGKSAIGEEDEVNGNLLETDVDGQVGTTQENLNQQYQKVKAQHEKIISQHQAVIIATQSAQVLLEKQGQYLSPEEKEKLQKNMKELKVHYETALAESEKKMKLTHSLQEELEKFDADYTEFEHWLQQSEQELENLEAGADDINGLMTKLKRQKSFSEDVISHKGDLRYITISGNRVLEAAKSCSKRDGGKVDTSATHREVQRKLDHATDRFRSLYSKCNVLGNNLKDLVDKYQHYEDASCGLLAGLQACEATASKHLSEPIAVDPKNLQRQLEETKALQGQISSQQVAVEKLKKTAEVLLDARGSLLPAKNDIQKTLDDIVGRYEDLSKSVNERNEKLQITLTRSLSVQDGLDEMLDWMGNVESSLKEQDVGTGYCRSSEQYKCHE

SEQ ID NO: 269253 - protein, 7572 aa, Artificial Sequence
  derived and/or modified sequence
MAGYLSPAAYLYVEEQEYLQAYEDVLERYKDERDKVQKKTFTKWINQHLMKVRKHVNDLYEDLRDGHNLISLLEVLSGDTLPREKGRMRFHRLQNVQIALDYLKRRQVKLVNIRNDDITDGNPKLTLGLIWTIILHFQISDIHVTGESEDMSAKERLLLWTQQATEGYAGIRCENFTTCWRDGKLFNAIIHKYRPDLIDMNTVAVQSNLANLEHAFYVAEKIGVIRLLDPEDVDVSSPDEKSVITYVSSLYDAFPKVPEGGEGIGANDVEVKWIEYQNMVNYLIQWIRHHVTTMSERTFPNNPVELKALYNQYLQFKETEIPPKETEKSKIKRLYKLLEIWIEFGRIKLLQGYHPNDIEKEWGKLIIAMLEREKALRPEVERLEMLQQIANRVQRDSVICEDKLILAGNALQSDSKRLESGVQFQNEAEIAGYILECENLLRQHVIDVQILIDGKYYQADQLVQRVAKLRDEIMALRNECSSVYSKGRILTTEQTKLMISGITQSLNSGFAQTLHPSLTSGLTQSLTPSLTSSSMTSGLSSGMTSRLTPSVTPAYTPGFPSGLVPNFSSGVEPNSLQTLKLMQIRKPLLKSSLLDQNLTEEEINMKFVQDLLNWVDEMQVQLDRTEWGSDLPSVESHLENHKNVHRAIEEFESSLKEAKISEIQMTAPLKLTYAEKLHRLESQYAKLLNTSRNQERHLDTLHNFVSRATNELIWLNEKEEEEVAYDWSERNTNIARKKDYHAELMRELDQKEENIKSVQEIAEQLLLENHPARLTIEAYRAAMQTQWSWILQLCQCVEQHIKENTAYFEFFNDAKEATDYLRNLKDAIQRKYSCDRSSSIHKLEDLVQESMEEKEELLQYKSTIANLMGKAKTIIQLKPRNSDCPLKTSIPIKAICDYRQIEITIYKDDECVLANNSHRAKWKVISPTGNEAMVPSVCFTVPPPNKEAVDLANRIEQQYQNVLTLWHESHINMKSVVSWHYLINEIDRIRASNVASIKTMLPGEHQQVLSNLQSRFEDFLEDSQESQVFSGSDITQLEKEVNVCKQYYQELLKSAEREEQEESVYNLYISEVRNIRLRLENCEDRLIRQIRTPLERDDLHESVFRITEQEKLKKELERLKDDLGTITNKCEEFFSQAAASSSVPTLRSELNVVLQNMNQVYSMSSTYIDKLKTVNLVLKNTQAAEALVKLYETKLCEEEAVIADKNNIENLISTLKQWRSEVDEKRQVFHALEDELQKAKAISDEMFKTYKERDLDFDWHKEKADQLVERWQNVHVQIDNRLRDLEGIGKSLKYYRDTYHPLDDWIQQVETTQRKIQENQPENSKTLATQLNQQKMLVSEIEMKQSKMDECQKYAEQYSATVKDYELQTMTYRAMVDSQQKSPVKRRRMQSSADLIIQEFMDLRTRYTALVTLMTQYIKFAGDSLKRLEEEEKSLEEEKKEHVEKAKELQKWVSNISKTLKDAEKAGKPPFSKQKISSEEISTKKEQLSEALQTIQLFLAKHGDKMTDEERNELEKQVKTLQESYNLLFSESLKQLQESQTSGDVKVEEKLDKVIAGTIDQTTGEVLSVFQAVLRGLIDYDTGIRLLETQLMISGLISPELRKCFDLKDAKSHGLIDEQILCQLKELSKAKEIISAASPTTIPVLDALAQSMITESMAIKVLEILLSTGSLVIPATGEQLTLQKAFQQNLVSSALFSKVLERQNMCKDLIDPCTSEKVSLIDMVQRSTLQENTGMWLLPVRPQEGGRITLKCGRNISILRAAHEGLIDRETMFRLLSAQLLSGGLINSNSGQRMTVEEAVREGVIDRDTASSILTYQVQTGGIIQSNPAKRLTVDEAVQCDLITSSSALLVLEAQRGYVGLIWPHSGEIFPTSSSLQQELITNELAYKILNGRQKIAALYIPESSQVIGLDAAKQLGIIDNNTASILKNITLPDKMPDLGDLEACKNARRWLSFCKFQPSTVHDYRQEEDVFDGEEPVTTQTSEETKKLFLSYLMINSYMDANTGQRLLLYDGDLDEAVGMLLEGCHAEFDGNTAIKECLDVLSSSGVFLNNASGREKDECTATPSSFNKCHCGEPEHEETPENRKCAIDEEFNEMRNTVINSEFSQSGKLASTISIDPKVNSSPSVCVPSLISYLTQTELADISMLRSDSENILTNYENQSRVETNERANECSHSKNIQNFPSDLIENPIMKSKMSKFCGVNETENEDNTNRDSPIFDYSPRLSALLSHDKLMHSQGSFNDTHTPESNGNKCEAPALSFSDKTMLSGQRIGEKFQDQFLGIAAINISLPGEQYGQKSLNMISSNPQVQYHNDKYISNTSGEDEKTHPGFQQMPEDKEDESEIEEYSCAVTPGGDTDNAIVSLTCATPLLDETISASDYETSLLNDQQNNTGTDTDSDDDFYDTPLFEDDDHDSLLLDGDDRDCLHPEDYDTLQEENDETASPADVFYDVSKENENSMVPQGAPVGSLSVKNKAHCLQDFLMDVEKDELDSGEKIHLNPVGSDKVNGQSLETGSERECTNILEGDESDSLTDYDIVGGKESFTASLKFDDSGSWRGRKEEYVTGQEFHSDTDHLDSMQSEESYGDYIYDSNDQDDDDDDGIDEEGGGIRDENGKPRCQNVAEDMDIQLCASILNENSDENENINTMILLDKMHSCSSLEKQQRVNVVQLASPSENNLVTEKSNLPEYTTEIAGKSKENLLNHEMVLKDVLPPIIKDTESEKTFGPASISHDNNNISSTSELGTDLANTKVKLIQGSELPELTDSVKGKDEYFKNMTPKVDSSLDHIICTEPDLIGKPAEESHLSLIASVTDKDPQGNGSDLIKGRDGKSDILIEDETSIQKMYLGEGEVLVEGLVEEENRHLKLLPGKNTRDSFKLINSQFPFPQITNNEELNQKGSLKKATVTLKDEPNNLQIIVSKSPVQFENLEEIFDTSVSKEISDDITSDITSWEGNTHFEESFTDGPEKELDLFTYLKHCAKNIKAKDVAKPNEDVPSHVLITAPPMKEHLQLGVNNTKEKSTSTQKDSPLNDMIQSNDLCSKESISGGGTEISQFTPESIEATLSILSRKHVEDVGKNDFLQSERCANGLGNDNSSNTLNTDYSFLEINNKKERIEQQLPKEQALSPRSQEKEVQIPELSQVFVEDVKDILKSRLKEGHMNPQEVEEPSACADTKILIQNLIKRITTSQLVNEASTVPSDSQMSDSSGVSPMTNSSELKPESRDDPFCIGNLKSELLLNILKQDQHSQKITGVFELMRELTHMEYDLEKRGITSKVLPLQLENIFYKLLADGYSEKIEHVGDFNQKACSTSEMMEEKPHILGDIKSKEGNYYSPNLETVKEIGLESSTVWASTLPRDEKLKDLCNDFPSHLECTSGSKEMASGDSSTEQFSSELQQCLQHTEKMHEYLTLLQDMKPPLDNQESLDNNLEALKNQLRQLETFELGLAPIAVILRKDMKLAEEFLKSLPSDFPRGHVEELSISHQSLKTAFSSLSNVSSERTKQIMLAIDSEMSKLAVSHEEFLHKLKSFSDWVSEKSKSVKDIEIVNVQDSEYVKKRLEFLKANNVLKDLGHTKMQLETTAFDVQFFISEYAQDLSPNQSKQLLRLLNTTQKCFLDVQESVTTQVERLETQLHLEQDLDDQKIVAERQQEYKEKLQGICDLLTQTENRLIGHQEAFMIGDGTVELKKYQSKQEELQKDMQGSAQALAEVVKNTENFLKENGEKLSQEDKALIEQKLNEAKIKCEQLNLKAEQSKKELDKVVTTAIKEETEKVAAVKQLEESKTKIENLLDWLSNVDKDSERAGTKHKQVIEQNGTHFQEGDGKSAIGEEDEVNGNLLETDVDGQVGTTQENLNQQYQKVKAQHEKIISQHQAVIIATQSAQVLLEKQGQYLSPEEKEKLQKNMKELKVHYETALAESEKKMKLTHSLQEELEKFDADYTEFEHWLQQSEQELENLEAGADDINGLMTKLKRQKSFSEDVISHKGDLRYITISGNRVLEAAKSCSKRDGGKVDTSATHREVQRKLDHATDRFRSLYSKCNVLGNNLKDLVDKYQHYEDASCGLLAGLQACEATASKHLSEPIAVDPKNLQRQLEETKALQGQISSQQVAVEKLKKTAEVLLDARGSLLPAKNDIQKTLDDIVGRYEDLSKSVNERNEKLQITLTRSLSVQDGLDEMLDWMGNVESSLKEQGQVPLNSTALQDIISKNIMLEQDIAGRQSSINAMNEKVKKFMETTDPSTASSLQAKMKDLSARFSEASHKHKETLAKMEELKTKVELFENLSEKLQTFLETKTQALTEVDVPGKDVTELSQYMQESTSEFLEHKKHLEVLHSLLKEISSHGLPSDKALVLEKTNNLSKKFKEMEDTIKEKKEAVTSCQEQLDAFQVLVKSLKSWIKETTKKVPIVQPSFGAEDLGKSLEDTKKLQEKWSLKTPEIQKVNNSGISLCNLISAVTTPAKAIAAVKSGGAVLNGEGTATNTEEFWANKGLTSIKKDMTDISHGYEDLGLLLKDKIAELNTKLSKLQKAQEESSAMMQWLQKMNKTATKWQQTPAPTDTEAVKTQVEQNKSFEAELKQNVNKVQELKDKLTELLEENPDTPEAPRWKQMLTEIDSKWQELNQLTIDRQQKLEESSNNLTQFQTVEAQLKQWLVEKELMVSVLGPLSIDPNMLNTQRQQVQILLQEFATRKPQYEQLTAAGQGILSRPGEDPSLRGIVKEQLAAVTQKWDSLTGQLSDRCDWIDQAIVKSTQYQSLLRSLSDKLSDLDNKLSSSLAVSTHPDAMNQQLETAQKMKQEIQQEKKQIKVAQALCEDLSALVKEEYLKAELSRQLEGILKSFKDVEQKAENHVQHLQSACASSHQFQQMSRDFQAWLDTKKEEQNKSHPISAKLDVLESLIKDHKDFSKTLTAQSHMYEKTIAEGENLLLKTQGSEKAALQLQLNTIKTNWDTFNKQVKERENKLKESLEKALKYKEQVETLWPWIDKCQNNLEEIKFCLDPAEGENSIAKLKSLQKEMDQHFGMVELLNNTANSLLSVCEIDKEVVTDENKSLIQKVDMVTEQLHSKKFCLENMTQKFKEFQEVSKESKRQLQCAKEQLDIHDSLGSQAYSNKYLTMLQTQQKSLQALKHQVDLAKRLAQDLVVEASDSKGTSDVLLQVETIAQEHSTLSQQVDEKCSFLETKLQGIGHFQNTIREMFSQFAEFDDELDSMAPVGRDAETLQKQKETIKAFLKKLEALMASNDNANKTCKMMLATEETSPDLVGIKRDLEALSKQCNKLLDRAQAREEQVEGTIKRLEEFYSKLKEFSILLQKAEEHEESQGPVGMETETINQQLNMFKVFQKEEIEPLQGKQQDVNWLGQGLIQSAAKSTSTQGLEHDLDDVNARWKTLNKKVAQRAAQLQEALLHCGRFQDALESLLSWMVDTEELVANQKPPSAEFKVVKAQIQEQKLLQRLLDDRKSTVEVIKREGEKIATTAEPADKVKILKQLSLLDSRWEALLNKAETRNRQLEGISVVAQQFHETLEPLNEWLTTIEKRLVNCEPIGTQASKLEEQIAQHKALEDDIINHNKHLHQAVSIGQSLKVLSSREDKDMVQSKLDFSQVWYIEIQEKSHSRSELLQQALCNAKIFGEDEVELMNWLNEVHDKLSKLSVQDYSTEGLWKQQSELRVLQEDILLRKQNVDQALLNGLELLKQTTGDEVLIIQDKLEAIKARYKDITKLSTDVAKTLEQALQLARRLHSTHEELCTWLDKVEVELLSYETQVLKGEEASQAQMRPKELKKEAKNNKALLDSLNEVSSALLELVPWRAREGLEKMVAEDNERYRLVSDTITQKVEEIDAAILRSQQFDQAADAELSWITETEKKLMSLGDIRLEQDQTSAQLQVQKTFTMEILRHKDIIDDLVKSGHKIMTACSEEEKQSMKKKLDKVLKNYDTICQINSERYLQLERAQSLVNQFWETYEELWPWLTETQSIISQLPAPALEYETLRQQQEEHRQLRELIAEHKPHIDKMNKTGPQLLELSPGEGFSIQEKYVAADTLYSQIKEDVKKRAVALDEAISQSTQFHDKIDQILESLERIVERLRQPPSISAEVEKIKEQISENKNVSVDMEKLQPLYETLKQRGEEMIARSGGTDKDISAKAVQDKLDQMVFIWENIHTLVEEREAKLLDVMELAEKFWCDHMSLIVTIKDTQDFIRDLEDPGIDPSVVKQQQEAAETIREEIDGLQEELDIVINLGSELIAACGEPDKPIVKKSIDELNSAWDSLNKAWKDRIDKLEEAMQAAVQYQDGLQAVFDWVDIAGGKLASMSPIGTDLETVKQQIEELKQFKSEAYQQQIEMERLNHQAELLLKKVTEESDKHTVQDPLMELKLIWDSLEERIINRQHKLEGALLALGQFQHALDELLAWLTHTEGLLSEQKPVGGDPKAIEIELAKHHVLQNDVLAHQSTVEAVNKAGNDLIESSAGEEASNLQNKLEVLNQRWQNVLEKTEQRKQQLDGALRQAKGFHGEIEDLQQWLTDTERHLLASKPLGGLPETAKEQLNVHMEVCAAFEAKEETYKSLMQKGQQMLARCPKSAETNIDQDINNLKEKWESVETKLNERKTKLEEALNLAMEFHNSLQDFINWLTQAEQTLNVASRPSLILDTVLFQIDEHKVFANEVNSHREQIIELDKTGTHLKYFSQKQDVVLIKNLLISVQSRWEKVVQRLVERGRSLDDARKRAKQFHEAWSKLMEWLEESEKSLDSELEIANDPDKIKTQLAQHKEFQKSLGAKHSVYDTTNRTGRSLKEKTSLADDNLKLDDMLSELRDKWDTICGKSVERQNKLEEALLFSGQFTDALQALIDWLYRVEPQLAEDQPVHGDIDLVMNLIDNHKAFQKELGKRTSSVQALKRSARELIEGSRDDSSWVKVQMQELSTRWETVCALSISKQTRLEAALRQAEEFHSVVHALLEWLAEAEQTLRFHGVLPDDEDALRTLIDQHKEFMKKLEEKRAELNKATTMGDTVLAICHPDSITTIKHWITIIRARFEEVLAWAKQHQQRLASALAGLIAKQELLEALLAWLQWAETTLTDKDKEVIPQEIEEVKALIAEHQTFMEEMTRKQPDVDKVTKTYKRRAADPSSLQSHIPVLDKGRAGRKRFPASSLYPSGSQTQIETKNPRVNLLVSKWQQVWLLALERRRKLNDALDRLEELREFANFDFDIWRKKYMRWMNHKKSRVMDFFRRIDKDQDGKITRQEFIDGILSSKFPTSRLEMSAVADIFDRDGDGYIDYYEFVAALHPNKDAYKPITDADKIEDEVTRQVAKCKCAKRFQVEQIGDNKYRVSFQSNFGDSQQLRLVRILRSTVMVRVGGGWMALDEFLVKNDPCRVHHHGSKMLRSESNSSITTTQPTIAKGRTNMELREKFILADGASQGMAAFRPRGRRSRPSSRGASPNRSTSVSSQAAQAASPQVPATTTPKGTPIQGSKLRLPGYLSGKGFHSGEDSGLITTAAARVRTQFADSKKTPSRPGSRAGSKAGSRASSRRGSDASDFDISEIQSVCSDVETVPQTHRPTPRAGSRPSTAKPSKIPTPQRKSPASKLDKSSKR

SEQ ID NO: 269254 - DNA, 22719 bp, Artificial Sequence
  derived and/or modified sequence
atggcaggctacttgtcccctgctgcatacctctacgtggaggaacaggagtacctgcaagcttacgaagacgtccttgaaagatacaaggatgaaagagataaggtgcaaaagaaaacctttactaaatggattaatcagcacctcatgaaggttagaaagcacgtaaacgatctgtatgaagacttacgggatgggcacaatctgatctctctgctcgaagtgctgtccggggataccctgccccgcgaaaagggccggatgcgtttccaccgcctgcaaaacgtacagatagccttggattaccttaagaggcgtcaagttaagcttgtcaacattcgcaatgacgacattacggacgggaatcccaagctgacattgggtctcatatggacgataatactgcattttcaaatctccgacatccatgtcactggagagtctgaagatatgtcggcaaaggaacgtctgcttctctggacacagcaagctaccgaaggttatgctggcatcaggtgcgaaaatttcacaacgtgttggagggatggcaagctgttcaacgcaatcatccacaaatatagacccgaccttattgatatgaataccgtagccgtccagagcaacctggccaatttggaacatgcattctatgttgccgaaaaaatcggtgtgattcggctccttgaccctgaagacgtggacgtcagctccccagatgaaaaaagcgtgatcacctatgtgagcagcctttatgatgcctttcctaaggtacccgaaggtggagaggggattggtgcgaacgatgtcgaggtgaaatggattgaataccaaaatatggtgaattatctgatacagtggatccgccatcacgttacaaccatgtctgagcgtacattcccaaataatcctgtcgagctcaaggctctatataaccagtaccttcagtttaaggagaccgagataccaccgaaagaaaccgaaaagtccaaaatcaagcgcctctacaaattgctggaaatttggatcgagtttgggcgaattaaacttttacagggttaccatcctaacgacatcgagaaggagtggggtaagctgatcatcgcaatgttagagcgcgaaaaagccctgagacctgaggtcgagcgcctggagatgttgcagcagattgctaacagagtgcagagggactccgtcatttgtgaagataaacttatccttgccggaaacgccctgcaatcggactccaagcgattagagtccggggtgcagtttcagaatgaggcagagattgccggttacattctcgagtgcgagaacctgctcaggcaacatgtcatcgatgtccagattctgatagacggcaagtactaccaggccgaccaactggtgcaacgcgttgccaaacttcgggacgaaatcatggcacttagaaacgagtgttcatctgtctattcaaagggtaggatcttgacgaccgaacagacaaagctgatgatttcgggcataacccagtccttgaattctggtttcgcacagaccctccatccctccctcaccagtggcctcacacagagtttgacgcccagcttgacctcttcaagcatgaccagtgggctgagcagcggcatgacaagtaggctcactccgtcagtaactcctgcgtatacacctgggtttccttcagggctcgtacccaacttctcctcaggagtagaaccaaactccctgcagacacttaaactgatgcagatcaggaagccattattgaagagcagcttgcttgatcagaacttaacagaagaggagatcaacatgaagttcgtgcaagaccttttgaactgggttgacgaaatgcaagtgcagctggataggactgagtgggggtctgacctgccgagcgtggaatcccatttagagaatcataagaatgttcatcgagccatagaggagttcgagtcgtccttgaaagaagcaaagatctccgaaatccagatgactgcacccctgaaactgacatacgccgagaaactccaccggctggagtcacagtacgctaaactgctgaatacctctcgaaaccaggagagacacctggacaccctgcacaactttgtgtcaagggccaccaacgagctgatttggctgaacgagaaagaagaggaggaagtagcctatgattggagtgaaagaaacactaacattgcaagaaaaaaagactaccacgctgaattgatgagagagttggatcagaaagaggagaatataaaatccgtacaggaaatagcagagcagcttctgctagagaatcacccagcaagactaaccatagaggcgtacagagccgccatgcagactcagtggtcgtggatacttcagctgtgtcagtgtgtagaacagcatattaaggagaacactgcctacttcgagttttttaacgacgcaaaggaagccacggactacctgcgcaacctcaaagatgctattcagaggaagtattcctgtgatcgctcgagcagtatccacaaattggaggatctagtccaagagtccatggaggagaaggaggaactgttgcaatacaagtccaccattgccaacctgatgggcaaggctaaaacaattattcagctgaagcccagaaactctgactgtccactgaagacatctatacctattaaggcaatttgtgattaccggcagattgagattacaatctataaagacgatgagtgcgtgctggccaacaattcccacagagctaaatggaaggtgatcagccccactggtaatgaagctatggtacctagcgtatgttttacagtacctcctccaaataaggaagctgtggatttggccaaccgcattgagcagcagtatcagaatgttctgactctgtggcatgagtcccacataaatatgaagagcgtcgttagctggcactatctgattaacgaaattgaccggatacgggcatccaatgtcgccagcattaagaccatgctcccaggcgaacaccagcaggtgctgtctaacttgcagagccgctttgaggatttcctcgaagattctcaggagagccaggttttctctgggagtgacataacacagctggagaaggaggtgaacgtgtgcaaacagtactaccaagaactcttgaagtccgccgaacgtgaagagcaggaagagtccgtttataacctgtacatcagtgaggtacgcaacattagacttcggttagagaattgtgaagaccgattgatacggcagatccggacccctctggaacgggatgatctgcatgagtctgtttttaggattacagagcaagaaaagcttaagaaggaactagaaaggttgaaggatgacctcggtaccatcacaaacaagtgtgaggaattcttctctcaagctgccgcttcttccagtgtgccaaccctgcgatccgaactcaatgtagttttgcagaacatgaaccaagtgtactcaatgtcctctacctatatcgacaagctgaaaactgtgaatttggtactaaagaatacccaagccgctgaagccctggtaaagctgtacgagactaagctgtgcgaggaagaagctgtcatagccgataaaaacaacatcgagaaccttatcagcacactgaaacaatggcgctccgaggtcgatgagaagcgccaggtctttcacgccctggaagatgagttgcagaaggccaaggcgatatccgatgagatgttcaagacctataaggaacgcgacctggacttcgactggcataaagaaaaggccgatcaattggttgaaaggtggcaaaatgtccatgttcaaattgataatcggttgagggacttagaaggtatcggaaaatctttaaagtactacagagacacatatcatccacttgacgattggatccaacaggtggagaccacccagagaaaaattcaggaaaatcagcccgagaatagcaaaaccctggccacccagctaaatcaacagaaaatgctcgtcagcgagattgagatgaagcagtcaaagatggatgagtgccagaaatatgccgaacaatactctgccactgtaaaagattacgaactgcagacaatgacctaccgtgcgatggtggactcacagcagaaaagtcctgtgaagaggaggaggatgcaatccagcgcagacctcattatccaagagtttatggacctccggacccgttataccgcactcgtgaccctcatgacccaatatattaagtttgcaggcgattcattgaagcgactcgaagaggaggaaaaatcgctcgaggaagagaagaaggagcacgttgagaaagctaaggagctccagaagtgggtgagcaatatctccaaaaccctgaaagatgccgagaaagcaggaaaaccaccattctccaagcagaagatctcttccgaagagatttccactaaaaaagagcagctgtcagaggctctacaaaccattcagctgttcctagccaagcacggtgataagatgacggacgaggagcgaaatgaactggaaaagcaggtgaaaaccctgcaggaaagttataatctgctgttcagcgagtccctgaagcagttgcaggagtcgcagacttcgggggacgttaaggtggaggagaaactggacaaggtgattgctggtaccattgatcaaactacaggcgaagtcctgtccgtcttccaagccgtactgcggggtctcatcgattacgatacaggcattcggctactcgagacccagctgatgatctctggcctgatttcacccgaactgcggaaatgttttgaccttaaggacgctaagagccatgggctgatcgacgagcagattctgtgccagttaaaggaactctcaaaggcaaaagagatcatttcagcagcttcccccactacaatcccagtgttggatgctctggctcagagcatgattacggagagtatggccataaaggtactggagattctgcttagtactggtagcctcgtgattccggctaccggggaacaactcaccctgcagaaggcattccaacagaatttggttagctctgctctgtttagtaaagtgttggaacgccagaacatgtgcaaggatctgattgacccttgtaccagcgaaaaagtgagtcttatcgacatggtgcagcgatctactctgcaggaaaacaccggcatgtggcttctgcccgttcgcccgcaggaaggaggaagaatcactttgaagtgcggtaggaatatttctatcttgcgggcggcacacgaagggctgatcgacagagagacaatgttccgcctgctgagcgcacagctgctgagcgggggtctaattaacagcaacagtggacaacgaatgactgtggaagaggctgtgcgggagggagtgatagaccgggatactgcaagctccatcctgacctaccaggtccaaacaggcggaatcattcagagcaacccggccaaaaggctcaccgtggatgaggcagtgcaatgtgacctgatcacatcttcaagcgccctgcttgtgcttgaggcccagcggggttatgtgggactgatctggccccactctggagaaatctttcccacgagttcttcgctgcagcaggagcttatcaccaatgagttagcatacaaaatcttgaatggtaggcagaaaatagctgcgctatatattccagagagcagccaggtgatcggactggacgcggccaagcagctggggatcatagataataataccgctagcatcttgaaaaatatcaccctcccagataaaatgcctgatctgggtgatcttgaagcgtgtaaaaacgcccggcgatggctttctttctgtaaattccaaccgagcactgtgcacgactatcggcaggaagaggatgtgttcgatggcgaggaacctgtgaccacccagacttctgaggagactaagaagctttttctcagctatctaatgattaattcctacatggacgccaacactggccaaagattattactttacgacggcgatctggatgaagcggtggggatgctgctagagggctgccacgccgagttcgatggcaatactgcaattaaagaatgcctagacgtactttcaagtagtggtgtcttccttaacaacgcctcaggacgagaaaaggatgagtgcaccgcaacacctagctcttttaacaaatgccactgcggcgaaccagaacatgaggagacaccagaaaatagaaagtgcgctatagatgaagagttcaatgagatgaggaatactgttatcaattccgaattcagtcagagtggtaaactggcttcaaccattagtatcgaccccaaagtcaattcatcaccatcagtgtgcgtgccgagcctaattagctatttgactcagactgaacttgcagacatttctatgttaaggtcagacagcgagaacattctgaccaactacgagaatcagtccagggtggaaacaaacgaacgtgccaatgagtgtagtcactcaaaaaatatacagaacttcccatctgatctgatcgagaatcccatcatgaagtcaaaaatgagtaaattctgtggtgttaacgaaacggagaacgaggacaataccaatcgagactcccccatctttgactactcccctcgactctccgcactgctgtctcacgataagctgatgcacagtcaaggatcatttaacgatacccacacacccgagagtaatggaaacaagtgcgaggctcccgcgctgagcttcagcgataaaactatgctctccgggcagaggataggcgagaagtttcaggatcagttcctcgggatcgctgccatcaacatttctctccctggggagcaatacggacagaagtcattaaacatgattagctccaacccacaagtccagtaccataatgataaatatataagcaacacaagcggcgaggatgagaagactcaccccgggttccagcagatgccggaggacaaggaggatgaaagcgagatagaagagtatagctgcgccgtgacaccaggcggcgataccgataacgccatcgtcagcctgacatgtgcaactcctctgctagacgaaactatttctgcatccgactatgagacctccctgctgaatgatcagcagaataacactgggacagacacagattctgacgatgacttctacgacactccactgttcgaggacgatgatcatgactccctccttctggatggtgatgaccgcgactgcctccaccccgaagactacgacaccctgcaggaggagaatgacgaaaccgccagccccgccgacgtgttctatgatgtctctaaagaaaacgagaactccatggtacctcagggggccccggtcgggtcgctctcagttaagaacaaagcgcactgtctgcaagacttccttatggatgtggagaaagatgaattagactccggggaaaagattcacctgaatcctgtgggatcagacaaggtgaatggacaaagcttagaaaccgggagcgaaagagagtgcactaacatcctggagggagatgaatcagatagtctcacagactatgacatagttggaggaaaggagtccttcacagcaagtctcaaatttgacgattcaggtagctggcgcggaaggaaagaggagtatgtaacgggacaggaattccatagtgacacggaccatctcgatagcatgcaatctgaggagtcctacggcgactatatctacgacagtaatgatcaggatgatgacgatgatgacgggattgacgaggagggtgggggaattagagacgagaacgggaaaccccgctgccaaaatgtagccgaggacatggatatccagctgtgtgcctctatcctcaatgagaacagtgatgaaaatgagaatatcaacaccatgattttgctcgacaaaatgcacagttgctccagtctagagaagcagcaacgggtgaatgttgtccaacttgcttccccgtctgaaaacaatctggttacagaaaagagtaacctgccggaatacaccaccgaaattgccgggaagtctaaagaaaatctgctgaatcatgaaatggtgctcaaagatgtcttaccacccatcatcaaagatactgagtctgagaagacgttcggccccgcgagtatctcacacgacaacaacaacatctccagcacatccgagctgggtaccgacctggcaaacacaaaagtgaagctgatccagggcagtgagctgcccgagctgactgactccgtcaaaggaaaggacgaatatttcaaaaacatgactcccaaggttgactccagcctcgaccatatcatatgtactgagccggatcttattggtaagcccgccgaggagtcccacttgtccctgatcgccagtgtgactgataaggatcctcaagggaatgggtcagatttgattaaaggacgtgacggcaaatctgatatccttatcgaagacgaaacttcaatccagaagatgtacttaggcgaaggggaggtgctggtggagggtctggtggaggaggagaatcgccatctgaagctcctccctggcaagaatacgagagacagctttaaactaattaattcacagttccccttcccacagatcactaataacgaggagctaaaccaaaaagggtctttgaagaaagccactgttaccctcaaagatgagcccaataatctgcagatcatagtctcaaaatcccctgttcaattcgaaaatctggaagagatatttgacacgagcgtttcaaaggagattagtgacgacattacaagtgatatcacaagttgggaaggaaacacacacttcgaagaatccttcaccgacggcccagagaaagagctggatctttttacatacctgaagcactgcgctaagaacattaaagcaaaagacgttgcgaagcccaacgaagatgtgccctcccacgtgctcatcacagcgccccctatgaaggagcacctccagctgggcgtcaacaacacgaaggaaaagtcaacctcaacacagaaggactctcccctaaatgacatgatacagagcaacgatctgtgctctaaggagagcatctctggtggtgggacggagatcagccagttcacccccgagtcgattgaggcaaccctgtccatactttctcggaaacacgtggaggacgtcggcaaaaacgattttttgcagtccgaacgttgtgcaaacgggctcggaaatgacaattcctcgaacacactcaatacagattattcctttcttgaaattaataataaaaaagagcgcattgagcagcaactgcctaaagagcaagctctctccccaaggagccaggagaaggaggtccagatccccgagctgtcacaggtgttcgtggaagacgtgaaagatattctcaagagtcgtctaaaagagggacatatgaacccgcaggaggtagaggagcctagcgcatgtgccgacaccaagatactgatacagaatttgattaaacggatcaccaccagtcaactcgtgaacgaggcgtcaacggtgcccagcgatagtcagatgtcggacagcagtggcgtgagccccatgaccaactcttcagaactgaaaccagagagcagggacgaccccttctgcattggcaatctgaagtccgagctgctcctcaacattttaaagcaagatcaacatagccaaaaaattactggtgtgttcgaactcatgcgtgaactgactcacatggaatacgatctagaaaaacgcggaattacttctaaggtgctgccgctgcagctggaaaacatcttctacaagcttcttgccgacgggtatagcgagaaaatcgagcacgttggggattttaatcaaaaagcctgcagcactagtgagatgatggaagagaagcctcacatcctgggagatatcaagtcaaaagaaggaaattattactcccccaatctggagaccgtcaaggagattggcctggaatcttccacagtttgggccagcacactgcctcgcgacgaaaaactgaaggacctgtgcaacgactttccgagccatttggagtgcacaagtggatccaaggagatggctagtggagacagttctacggagcagtttagcagtgagctgcagcagtgcctccaacacaccgaaaaaatgcacgagtacctgacattgctccaggatatgaaaccgcctcttgataatcaggaatctctagataataaccttgaagctctgaagaatcaactccgccagcttgagaccttcgaactgggtttggcacccattgccgttatcctgagaaaagatatgaaactggctgaagaatttcttaagtcactcccctctgacttcccccgcggacatgtggaggaactgagcatatcccaccagtccctaaagacagctttctcaagcctatcaaatgtgtctagcgaacgcactaaacagatcatgctggccattgattccgagatgtcaaagttagctgtttcccatgaggaattcctgcacaagttaaaatcctttagtgattgggtgtccgagaaaagcaagtccgtgaaagacatagagatcgtaaacgtgcaagactccgaatacgtgaaaaaaagactggaatttctaaaggccaacaatgtgctcaaggacctcggccataccaagatgcaactcgaaacaactgccttcgatgtgcagttcttcatcagcgagtatgcccaggatctgagccctaaccagtctaaacagttgctccggctgctgaacacaacacagaaatgttttctggacgtgcaggagtctgtaaccacacaggtcgaacgcttagagacacagctccatctggagcaggatctggatgaccaaaagattgtggccgaacgccagcaggagtacaaagaaaagctgcaagggatctgcgatctactgacacagactgagaaccgcttaataggtcaccaggaggccttcatgataggggacggcacagttgagctgaagaaatatcagagtaagcaggaggaactccaaaaagatatgcagggctccgcacaggccctcgcggaggtggtcaagaatactgagaacttcctgaaagagaatggtgagaagctgagccaagaagacaaggccctcattgagcagaagctaaatgaagctaaaataaaatgtgagcagctgaacctgaaggccgagcaatcaaagaaggagctggacaaggtagtcacaactgccatcaaagaagagacagaaaaggtggcagcggttaagcagctggaggaaagcaagacaaaaatagagaatctgctggattggctcagcaatgtggacaaagacagtgaaagggcggggaccaagcataaacaggttatcgaacaaaatggcacacacttccaggagggtgacgggaagtctgctattggcgaggaagacgaggtcaacgggaatctgctggagactgatgtggacgggcaggttggcactacacaagagaaccttaatcagcagtaccaaaaagtaaaagctcagcacgaaaagattattagtcagcaccaagcagtcattatcgcgactcagtccgcccaggtgctgctggaaaagcagggtcaatatctttctccagaggagaaagagaagctgcagaagaacatgaaagaactgaaagtccactacgaaaccgcactagctgagagcgagaagaaaatgaaattgacacactcactgcaagaagaattagagaagttcgatgcagactacacggaatttgagcactggcttcagcagtccgaacaggaactggaaaacctggaagccggggccgacgacataaacggactcatgacaaaactgaagcggcaaaagagcttctctgaggacgtcatcagtcacaagggagacttgcgatatataacaatctccggtaaccgagttctggaagctgctaagtcctgttcaaagagggatggaggtaaagtggatacatccgccactcatcgagaagttcaacgtaaattagatcacgctacggatagattccgctcactgtattctaaatgcaacgtgctgggcaacaacctgaaggacctcgtggacaaataccagcactatgaagacgcatcgtgtggactcctggcaggtttacaggcttgcgaggctaccgcttccaagcatctcagcgagcccattgctgttgaccctaagaatctgcagcgccaactggaggaaacaaaggccctccagggacaaatctcctcacagcaggtcgcagtggagaaactcaaaaagacggctgaggtgctgctggacgccagaggctccttactccctgctaagaacgacatccagaagactcttgacgatatcgtgggccggtatgaggacctctccaagtcggtgaatgaaaggaacgagaagctacaaatcaccctcactagaagcctgtcagtccaggatggactagacgagatgcttgactggatggggaatgttgagtctagcctcaaggaacagggccaagttccactgaacagcacagccctccaggacattattagcaagaacatcatgctcgagcaagacattgccggacgtcagagcagcataaacgctatgaatgagaaggtgaaaaaatttatggagactacagatccgtctactgcctcatctttgcaggccaagatgaaggatttgtctgcaagattcagcgaagcctcgcataaacataaagaaaccctggctaagatggaagagctcaaaaccaaagtcgaactgttcgaaaacttgagcgagaaactgcagacattcctggaaactaagactcaagctctaaccgaggttgatgtgccaggcaaggatgtgactgaacttagtcagtatatgcaggaaagtactagcgaatttcttgagcacaaaaagcaccttgaggttctgcacagcctcctaaaagagatcagctcccacggccttccgtctgataaagctctggtgttggagaagaccaacaacctttcaaaaaagtttaaggagatggaggataccataaaggaaaagaaggaagcagtgacatcctgtcaggaacagctcgacgcttttcaggttctcgtcaagagcctaaagtcgtggatcaaggaaaccacgaagaaagtgcccattgttcagcccagtttcggggctgaagacctgggaaaaagtctggaggacacaaagaagctgcaggagaagtggagcttaaaaacacccgaaatacagaaagtaaataattcaggcatatcgctgtgcaacctgatcagcgctgtgacaacacctgctaaggccattgcggccgtgaaatccggaggggctgtcttgaacggcgaagggaccgccaccaatacagaggagttctgggcaaataagggcctcacttctattaagaaggacatgactgatattagtcacggatatgaggatttgggtttactcctgaaagataaaatcgccgaacttaacaccaagttatccaagctacaaaaagcccaagaggagagctccgccatgatgcagtggttacagaagatgaataaaactgcgaccaagtggcagcagaccccagctcccaccgacaccgaggccgtaaagactcaagttgaacagaataagtcctttgaagcagagctgaagcaaaacgtgaacaaggtgcaagagcttaaagacaaactcacagagttgctggaggaaaaccctgatactccggaggcccctcggtggaaacaaatgctgaccgaaatcgactctaagtggcaagagcttaaccagttaaccatcgatcgccagcagaagttggaggaatcctccaataacctgacacaattccagacagtcgaggctcagctgaagcaatggctggtggagaaggaattgatggtgtctgtgttggggccactttctatcgacccaaatatgctcaacactcagaggcaacaggtgcaaatactgttacaggagtttgccactcgcaagcctcagtacgagcagttgaccgccgcagggcaaggcatactgagccgtcccggagaggacccttccctgcgagggatcgtgaaggagcaattggccgcggtgactcaaaagtgggatagcctcaccggccagctctccgaccgctgtgactggatcgatcaggcaattgtgaagtctactcaatatcagtctctcctgagatctttatcagacaagctcagcgacctagacaacaaactgtctagttcactggccgtctccacacaccccgacgcaatgaatcagcagcttgagacggcacagaaaatgaaacaagaaattcagcaggagaagaagcagataaaggtggcccaggctctgtgcgaggacctgtccgctctggtgaaagaggaatatttgaaagccgaattgtctcgtcagctggagggaatactgaagagcttcaaagacgtcgagcagaaagcagaaaatcatgttcagcatctgcaatcagcatgtgcgtcttcccatcaatttcaacagatgagtagagatttccaggcgtggcttgacactaagaaggaggagcagaataagagccaccctatcagtgctaaactggatgttctggaaagtctgatcaaagaccacaaggatttctccaaaacgctgaccgcacagagccacatgtacgagaagactattgccgagggcgagaatctgctgctcaagacgcagggcagcgaaaaggctgccttgcagctgcagctgaatacaatcaaaacaaactgggacacattcaacaaacaggtcaaggagcgtgagaacaaattgaaggaatcacttgagaaggcattaaaatacaaagaacaggtggagacactgtggccatggatcgacaagtgccagaacaacctggaggaaatcaaattttgtctggatccagcagagggtgagaactccatcgctaaactcaagtcactgcaaaaggagatggatcagcacttcggcatggttgagctgctgaataataccgccaacagtctgctatcagtgtgtgagattgataaagaggtagtcactgacgagaataaatcactcattcagaaagtggacatggttacagagcagttgcactcgaaaaagttttgcctcgaaaatatgactcagaaatttaaagagttccaggaggtcagcaaggaatctaaacgccaactgcagtgtgcgaaagagcagctggacattcatgattccctgggcagccaggcctatagcaacaagtacctcacaatgttgcagacccagcagaagtcactgcaagccctgaagcaccaggtggacctggctaaacgcctggcccaggatctggtagtggaggcatccgactccaaaggtacaagcgacgtcttgttgcaagtggagacaatcgcccaggagcacagcactcttagccagcaggtggacgaaaagtgctctttccttgagacaaagctgcagggcatcggacatttccagaatactattcgtgaaatgttctctcaattcgctgagttcgacgacgaactggattcgatggcaccagttgggagagatgctgagacattacagaagcagaaggaaactattaaggcctttctaaaaaagctggaggcgctcatggccagcaatgataacgctaataaaacctgtaagatgatgctggcaacagaggaaacgagtcccgacctagtcgggatcaagagggatctggaagctctatctaagcaatgcaataaattgttggatagagcccaggcgcgagaagaacaggtggaggggaccataaaacggctcgaagagttttactctaaattaaaggagtttagcattctgctgcagaaagcggaggaacacgaggagtctcaggggccagtgggaatggaaaccgagacaatcaatcaacagcttaacatgtttaaggttttccaaaaggaggaaatagagccattgcaggggaagcagcaggacgtaaactggctgggacagggactgatacagtccgctgccaagagcacgagtacgcaggggctggagcacgacctggatgacgtcaacgctagatggaaaactctcaacaagaaggtcgcacaacgagcggctcaactgcaagaggcgctactccactgcgggaggtttcaggatgcgctggaatcactactctcgtggatggtggatactgaagagctggtggccaatcagaaaccaccatctgccgagtttaaagttgtgaaggctcagatccaagagcaaaagctgttgcaaaggctgctggatgaccggaagagcaccgtggaagtgatcaagcgtgagggagaaaagatcgccacaaccgctgagccagccgacaaagttaagattctgaaacagttgagcctgctggacagtcgctgggaggcccttctgaacaaagcagagaccaggaacaggcagctggaagggatctccgttgtggctcagcaattccacgagacacttgagccccttaatgagtggctgactaccatcgaaaaaagattagtcaattgtgaacctatcgggacccaggcgtccaagctcgaagaacagatcgctcagcacaaagccctggaagatgacatcatcaaccataataagcacctccaccaggcggtctccattggacaaagcctgaaagttctgtcatcgcgcgaggataaggacatggtgcaatctaagctggacttctctcaggtgtggtatatcgagatccaagagaaatcccattcacgtagtgagctgcttcagcaagccctctgtaacgccaagatttttggggaagacgaggtggagctgatgaactggctaaatgaagtgcacgataaactaagcaagctgagcgtgcaggattactctaccgaagggctatggaagcagcagtccgagctgcgagtactccaggaagatatccttttaagaaaacagaacgttgatcaagcactgctgaatgggctcgagctcttgaagcagacgacaggggacgaggtactcattattcaggataaattggaggcaatcaaagcacgatacaaagacatcaccaagctgtccactgacgtggccaagactctagaacaagccctgcagcttgcacgccgcctacacagcactcacgaggaattgtgtacctggctggacaaggttgaggtggaattgctgagctatgagacccaggtgcttaagggggaagaggctagccaagctcagatgcgccccaaagagttgaagaaggaagccaagaacaacaaggccctgctggattcgttgaacgaggtgtcaagtgctctactggaactggtgccctggagagcccgggaggggctggagaaaatggtggccgaggataatgagaggtaccggctggtctcagacacaataacccagaaggtagaggaaattgatgccgccatcctaaggtctcaacagtttgatcaagcagctgacgccgaattaagttggattacggaaacggaaaaaaagctcatgtcactgggcgatatccggcttgaacaagatcaaacctcagcccagttgcaggtgcagaagactttcaccatggaaattcttaggcacaaggacattattgacgatctcgttaagtctgggcacaaaatcatgacagcctgcagcgaggaagagaaacagagcatgaagaagaaactggataaagtgttaaagaattacgacaccatatgccaaataaactcagagcggtatctccagttagaacgggcccagagcctcgtcaatcagttctgggaaacctacgaggagttgtggccttggctgaccgaaacccagagcatcatctcccagctgcccgcgcccgccttggaatacgagaccctcagacagcaacaagaggaacaccgccagctccgcgaactgatagccgagcataaaccgcatattgataagatgaacaaaacgggtccccaattgctggagctgtccccgggggagggatttagcattcaggagaagtatgtggcagctgatacactgtactcacagatcaaggaagatgtcaaaaagagagctgttgcgctggatgaagctatttcacagagtacacagtttcacgacaaaatagatcagatactggaatctctggagcggattgtggagcgtttgcgtcaacccccaagcatctcagcagaagtcgagaagatcaaagaacagatttctgaaaataagaatgtgtcagtcgacatggagaaactgcagcccctgtacgagaccctgaagcaacgaggcgaggaaatgattgcgcgttcgggcgggaccgataaagatattagcgctaaagccgtccaggataaactcgatcagatggtctttatctgggaaaacatccataccctcgtcgaagagagggaggccaagctgctcgatgtgatggaactggcagaaaagttttggtgtgatcacatgtcccttatagtcaccatcaaagacactcaagactttattagagacctggaagaccccggaattgacccatctgtagttaaacagcaacaggaggccgcagaaaccatacgcgaagagatagacggattgcaggaggaattagatattgtgatcaatctggggagcgaacttattgccgcttgtggggaacctgataagcctatagtaaagaagtccattgacgaacttaattctgcttgggacagcttaaacaaggcatggaaggataggattgataagctggaagaggcgatgcaagctgcagtacagtaccaagatggcttgcaggcagtgtttgattgggtggacattgccggcggcaaactggcaagtatgtccccaatagggaccgacctggagacggtcaagcagcagatcgaggaactcaagcagtttaagtctgaagcctatcaacaacaaatagagatggaacgcctgaatcaccaggcagagctgcttcttaagaaagtcacagaggaatctgataagcacacagttcaagatccccttatggagctcaaactcatctgggacagtctcgaggaacgcattattaaccggcaacataaactggagggcgctctgctggcattaggacagttccagcacgcacttgacgaattactcgcctggctcactcacactgagggcctgcttagtgagcaaaaacccgtgggtggagatccaaaggcaatcgagattgagctggctaagcatcacgtgctgcaaaatgacgtcttggctcatcaaagcactgtcgaggccgttaacaaagcaggaaacgatctcatcgagtcctctgccggagaagaggcatctaatcttcagaacaaactcgaggtgctcaatcagagatggcagaacgtgctagagaagactgagcagcggaaacagcagcttgatggagcactgaggcaggcaaaaggtttccatggggagatcgaggacctccaacagtggctgacggacactgaacggcacttactcgccagcaagcctctggggggccttcctgaaaccgcaaaggagcaactaaacgttcacatggaagtgtgcgccgctttcgaagccaaggaggagacctacaaatccctgatgcaaaagggtcaacagatgctggctaggtgtccaaagtccgccgagactaacatagaccaggatataaacaatctcaaggaaaagtgggagtccgttgagactaaactcaatgagcgcaagaccaaactcgaagaagctcttaacctcgcaatggagttccataatagtttacaggactttattaattggctgacacaggccgaacaaaccctgaacgtagcctcaaggccctcccttattctagatacagtgctttttcagatcgacgaacataaggtgtttgccaacgaagtcaattcccatagagaacagataatcgagttggacaaaacggggacgcaccttaaatacttcagccagaagcaggatgtggtactgatcaaaaatttgttgatctcagtgcagagcaggtgggaaaaggtcgtacagcgcctcgtcgagagaggtcgatcccttgacgacgctcgaaaaagagcgaagcagtttcatgaggcatggagcaagcttatggagtggctggaggaatccgaaaaatctcttgacagcgaactcgagattgcgaatgaccccgataagatcaaaacacagctcgcgcagcacaaggagtttcagaagtctcttggtgccaagcatagcgtttacgatacaaccaatagaacaggtcgctccctgaaggaaaagacatctctggccgacgacaacctgaaactggacgacatgctcagcgagcttcgcgacaagtgggacaccatttgtggaaaatcggtcgagagacagaacaagctggaggaagctctcttatttagtgggcaattcacagacgcccttcaggctctcatagattggctgtaccgcgtggagccccagctagctgaggaccaacctgtgcacggtgacattgaccttgtgatgaacctcatcgataatcacaaggcctttcagaaggaactgggaaagcgtacttcaagtgtacaggctctgaaaaggtctgctagggaattaattgagggctcccgggacgacagcagctgggtcaaggtgcaaatgcaagaactgagtacacgctgggagaccgtgtgtgccctgtcaattagtaagcaaacaagattagaagctgctctgagacaagctgaagagttccactccgtggtgcacgcacttcttgagtggcttgctgaagcagagcaaactttaagattccacggcgtgctacctgacgacgaggacgcacttcgaacccttattgatcagcacaaagagttcatgaaaaagctggaagagaaacgcgcagagctcaacaaagccacaaccatgggggacacagtgctggcaatctgccacccagactctatcactactattaagcactggattaccattatacgggccagatttgaggaggtcctggcctgggctaagcagcaccagcagagactggcctcagctctggcgggcttgatcgcaaagcaggaactactggaagccttgctggcatggcttcagtgggccgagaccacgctcacagacaaggataaagaggtgatcccacaggagattgaagaggtcaaggcacttattgccgaacaccagactttcatggaggagatgactcggaagcagccagacgtagacaaggtaacaaaaacgtacaaaagaagggctgccgatccttcaagcttacagtcacatataccagtgttggacaagggtcgagccggtaggaagcggtttccagccagcagcctttatccttctggctcccaaacccaaatcgagaccaagaatcctcgagtgaatcttctggtcagcaaatggcagcaggtctggttgcttgcattagagcggaggcgaaaattgaatgatgctctggaccgcctggaggagcttagagaattcgcaaatttcgacttcgatatctggcgtaagaaatacatgcgctggatgaaccataagaaaagccgggttatggacttctttaggagaatagacaaagatcaagatggaaaaatcacacgtcaggagtttattgatggcattttgtcgagcaaatttcctacatcgagactggagatgtccgccgttgcagacatatttgatcgggatggagacgggtacatcgactattacgaatttgtggccgccctacaccccaacaaggatgcctacaaaccgattaccgatgcagacaagattgaagatgaggttacccgccaggtggccaagtgtaaatgcgccaagcgctttcaggtcgaacagataggcgacaacaaatatcgcgttagcttccagagtaatttcggtgattcccaacaattaaggctcgtacgtattctcaggagtaccgtgatggtccgagttggagggggatggatggctttagatgaatttttggtcaagaatgacccttgtcgcgtccatcatcatgggtcaaagatgctccgaagtgaaagcaacagctccattactaccacccagccaacaatcgctaaaggtagaactaacatggagctgagggaaaagtttatcctggccgatggggcttcacagggtatggctgcctttcgtccccgcggacgcaggtcccgtccgtccagcaggggagcatcccccaatcgcagtacatccgtttcctcgcaggctgcccaggctgcttctcctcaagtcccagcaacaacaaccccaaagggcactccaatccaaggttctaaacttcggcttcccggatatctgtccggcaaaggtttccactccggagaggatagtgggctcatcaccacagctgcggcccgcgtgaggacgcagtttgcagactccaaaaagacaccttctcgacctggatctcgagcaggcagcaaggcgggcagcagagcgagctcacgcaggggatcggacgcttccgacttcgatatctcagagatccaaagcgtgtgcagcgacgtggaaacagtcccacaaacccaccggcccactccccgcgctggatcgagacccagcacagctaagccatccaaaattcccaccccacagaggaagtctcccgcttcgaagctagataagagctctaaaagatag

SEQ ID NO: 269255 - DNA, 22719 bp, Artificial Sequence
  derived and/or modified sequence
atggccggctacctgagccctgctgcctacctgtatgtggaggagcaggagtacctgcaggcctatgaagatgtgctggagcgctacaaggatgagcgggacaaggtgcagaagaagaccttcaccaagtggatcaaccagcacctgatgaaggtgaggaagcacgtgaatgacctgtatgaggacctgagagatggccacaacctgatcagcctgctggaggtgctgagcggggacaccctgccccgggagaagggccgcatgaggttccaccggctgcagaatgtgcagatcgccctggactacctgaagaggcggcaggtgaagctggtgaacatcagaaatgatgacatcacagatggcaaccccaagctgaccctgggcctcatctggaccatcatcctgcacttccagatcagtgacatccacgtgactggagagagcgaggacatgtctgccaaggagcggctgctgctgtggacccagcaggccacagagggctacgccggcatccgctgtgagaacttcaccacctgctggagagatggcaagctgttcaatgccatcatccacaagtacagaccagacctgattgacatgaacacagtggccgtgcagagcaacctggccaacctggagcacgccttctacgtggccgagaagattggagtcatccggctgctggaccctgaagatgtggatgtgagcagcccagatgagaagagcgtcatcacctacgtgagcagcctgtatgatgccttccccaaggtgcctgagggcggggagggcatcggggccaatgatgtggaggtgaagtggattgagtaccagaacatggtgaactacctgatccagtggatccgccaccacgtgaccaccatgtctgagaggaccttccccaacaaccctgtggagctgaaggccctgtacaaccagtacctgcagttcaaggagacagagatcccccccaaggagacagagaagagcaagatcaagaggctgtacaagctgctggagatctggattgaatttggccgcatcaagctgctgcagggctaccaccccaatgacatcgagaaggagtggggcaagctgatcatcgccatgctggagcgggagaaggccctgcggcctgaggtggagcggctggagatgctgcagcagatcgccaacagagtgcagagggacagcgtcatctgtgaggacaagctgatcctggccggaaatgccctgcagagcgacagcaagaggctggagagcggcgtgcagttccagaatgaggccgagattgctggctacatcctggagtgtgagaacctgctgcggcagcacgtgattgatgtgcagatcctgattgatggcaagtactaccaggccgaccagctggtgcagagggtggccaagctgagagatgagatcatggccctgagaaatgaatgttcttctgtgtacagcaagggccgcatcctgaccacagagcagaccaagctgatgatcagcggcatcacccagagcctgaacagcggctttgcccagaccctgcaccccagcctgaccagcggcctgacccagagcctgacccccagcctgaccagcagctccatgaccagcggcctgagcagcggcatgaccagccggctgacccccagcgtgaccccagcctacaccccaggcttccccagcggcctggtgcccaacttcagcagtggagtggagcccaacagcctgcagaccctgaagctgatgcagatcaggaagcccctgctgaagagcagcctgctggaccagaacctgacagaggaggagatcaacatgaagtttgtgcaggacctgctgaactgggtggatgagatgcaggtgcagctggacagaacagagtggggcagtgacctgcccagcgtggagagccacctggagaaccacaagaatgtgcaccgggccatcgaggagtttgagagcagcctgaaggaggccaagatcagcgagatccagatgacagcccccctgaagctgacctacgccgagaagctgcaccggctggagagccagtatgccaagctgctgaacaccagcaggaaccaggagcggcacctggacaccctgcacaactttgtgtcccgggccaccaatgagctgatctggctgaatgagaaggaggaggaggaggtggcctatgactggagcgagaggaacaccaacatcgccaggaagaaggactaccacgccgagctgatgagggagctggaccagaaggaggagaacatcaagtctgtgcaggagattgctgagcagctgctgctggagaaccacccagcccggctgaccatcgaggcctacagagctgccatgcagacccagtggagctggatcctgcagctgtgccagtgtgtggagcagcacatcaaggaaaatacagcctactttgagttcttcaatgatgccaaggaggccacagactacctgaggaacctgaaggatgccatccagaggaagtacagctgtgacaggagcagcagcatccacaagctggaggacctggtgcaggagagcatggaggagaaggaggagctgctgcagtacaagagcaccatcgccaacctgatgggcaaggccaagaccatcatccagctgaagcccaggaacagcgactgccccctgaagaccagcatccccatcaaggccatctgtgactaccggcagatcgagatcaccatctacaaggatgatgaatgtgtgctggccaacaacagccaccgggccaagtggaaggtgatcagccccactggaaatgaggccatggtgcccagcgtgtgcttcaccgtgcccccacccaacaaggaggccgtggacctggccaacagaattgagcagcagtaccagaatgtgctgaccctgtggcatgagagccacatcaacatgaagtctgtggtgtcctggcactacctgatcaatgaaattgaccgcatccgggccagcaatgtggccagcatcaagaccatgctgcccggggagcaccagcaggtgctgagcaacctgcagagcagatttgaggacttcctggaggacagccaggagagccaggtgttcagcggcagtgacatcacccagctggagaaggaggtgaatgtgtgcaagcagtactaccaggagctgctgaagtctgctgagcgggaggagcaggaggagagcgtgtacaacctgtacatcagcgaggtgaggaacatccggctgcggctggagaactgtgaagatagactcatccggcagatccgcacccccctggagagagatgacctgcacgagagcgtcttccgcatcacagagcaggagaagctgaagaaggagctggagcggctgaaggatgacctgggcaccatcaccaacaagtgtgaggagttcttcagccaggccgccgccagcagctctgtgcccaccctgcggtctgagctgaatgtggtgctgcagaacatgaaccaggtgtacagcatgagcagcacctacatcgacaagctgaagacagtgaacctggtgctgaagaacacccaggccgctgaggccctggtgaagctgtatgagaccaagctgtgtgaggaggaggccgtgattgctgacaagaacaacattgaaaatctcatcagcaccctgaagcagtggaggtctgaggtggatgagaagaggcaggtgttccacgccctggaggatgagctgcagaaggccaaggccatcagtgatgagatgttcaagacctacaaggagcgggacctggactttgactggcacaaggagaaggctgaccagctggtggagcgctggcagaatgtgcacgtgcagattgacaaccggctgcgggacctggagggcatcggcaagagcctgaagtactacagagacacctaccaccccctggatgactggatccagcaggtggagaccacccagaggaagatccaggagaaccagcctgagaacagcaagaccctggccacccagctgaaccagcagaagatgctggtgtctgaaattgagatgaagcagagcaagatggatgagtgccagaagtatgcagagcagtacagcgccaccgtgaaggactatgagctgcagaccatgacctaccgggccatggtggacagccagcagaagagccctgtgaagagaagaaggatgcagagcagcgctgacctgatcatccaggagttcatggacctgcggacccgctacacagccctggtgaccctgatgacccagtacatcaagtttgctggggacagcctgaagaggctggaggaggaggagaagagcctggaggaggagaagaaggagcacgtggagaaggccaaggagctgcagaagtgggtgagcaacatcagcaagaccctgaaggatgctgagaaggccggcaagccacccttcagcaagcagaagatcagcagcgaggagatcagcaccaagaaggagcagctgtctgaggccctgcagaccatccagctgttcctggccaagcacggggacaagatgacagatgaggagagaaatgagctggagaagcaggtgaagaccctgcaggagagctacaacctgctcttcagcgagagcctgaagcagctgcaggagagccagaccagcggagatgtgaaggtggaggagaagctggacaaggtgattgctggcaccatcgaccagaccactggagaggtgctgagcgtcttccaggccgtgctgcggggcctgattgattatgacaccggcatccggctgctggagacccagctgatgatcagcggcctcatcagccctgagctgaggaaatgttttgacctgaaggatgccaagagccacggcctgattgatgagcagatcctgtgccagctgaaggagctgagcaaggccaaggagatcatctctgctgccagccccaccaccatccctgtgctggatgccctggcccagagcatgatcacagagagcatggccatcaaggtgctggagatcctgctgagcacaggcagcctggtgatcccagccaccggggagcagctgaccctgcagaaggccttccagcagaacctggtgtcctctgccctcttcagcaaggtgctggagcggcagaacatgtgcaaggacctgattgacccctgcaccagcgagaaggtgtccctgattgacatggtgcagaggagcaccctgcaggagaacacaggcatgtggctgctgcctgtgcggccccaggagggcggccgcatcaccctgaagtgtggcaggaacatcagcatcctgcgggccgcccacgagggcctgattgaccgggagaccatgttccggctgctgagcgcccagctgctgagcggcggcctcatcaacagcaacagcggccagaggatgacagtggaggaggccgtgcgggagggcgtgattgaccgggacacagccagcagcatcctgacctaccaggtgcagacaggaggcatcatccagagcaacccagccaagaggctgactgtggatgaagctgtgcagtgtgacctgatcaccagcagcagcgccctgctggtgctggaggcccagaggggctacgtgggcctcatctggccccacagcggggagatcttccccaccagcagcagcctgcagcaggagctgatcaccaatgagctggcctacaagatcctgaatggccggcagaagattgctgccctgtacatccctgagagcagccaggtgattggcctggatgctgccaagcagctgggcatcatcgacaacaacacagccagcatcctgaagaacatcaccctgcctgacaagatgccagacctgggggacctggaggcctgcaagaatgcccggcgctggctgtccttctgcaagttccagcccagcacagtgcatgactaccggcaggaggaggatgtgtttgatggagaggagcctgtgaccacccagaccagcgaggagaccaagaagctgttcctgagctacctgatgatcaacagctacatggatgccaacacaggccagaggctgctgctgtatgatggagacctggatgaggccgtgggcatgctgctggagggctgccacgccgagtttgatggcaacacagccatcaaggagtgcctggatgtgctgagcagcagcggggtcttcctgaacaatgccagcggccgggagaaggatgagtgcacagccacccccagcagcttcaacaagtgccactgtggggagcctgagcacgaggagaccccagaaaatagaaaatgtgccattgatgaggagttcaatgagatgaggaacacagtcatcaacagcgagttcagccagagcggcaagctggccagcaccatcagcattgaccccaaggtgaacagcagccccagcgtgtgtgtgcccagcctcatctcctacctgacccagacagagctggccgacatctccatgctgcggagtgacagcgagaacatcctgaccaactatgagaaccagagccgggtggagaccaatgaaagagccaatgaatgtagccacagcaagaacatccagaacttccccagcgacctgattgagaaccccatcatgaagagcaagatgagcaagttctgtggggtgaatgaaacagaaaatgaagacaacaccaacagagacagccccatctttgactacagcccccggctgagcgccctgctgagccatgacaagctgatgcacagccagggcagcttcaatgacacccacaccccagagagcaatggaaacaagtgtgaggccccagccctgtccttcagtgacaagaccatgctgagcggccagagaattggagagaagttccaggaccagttcctgggcattgctgccatcaacatcagcctgcccggggagcagtatggccagaagagcctgaacatgatcagcagcaacccccaggtgcagtaccacaatgacaagtacatcagcaacaccagcggggaggatgagaagacccaccctggcttccagcagatgcctgaggacaaggaggatgaaagtgaaattgaggagtacagctgtgctgtgaccccaggaggagacacagacaatgccatcgtgtccctgacctgtgccacccccctgctggatgagaccatcagcgccagtgactatgagaccagcctgctgaatgaccagcagaacaacacaggaacagacacagacagtgatgatgacttctatgacacccccctgtttgaagatgatgaccatgacagcctgctgctggatggagatgaccgggactgcctgcaccctgaggactatgacaccctgcaggaggagaatgatgaaacagccagccctgcagatgtgttctatgatgtgtccaaagaaaatgaaaattccatggtgccccagggcgcccctgtgggcagcctgtctgtgaagaacaaggcccactgcctgcaggacttcctgatggatgtggagaaggatgagctggacagcggggagaagatccacctgaaccctgtgggcagtgacaaggtgaatggccagagcctggagaccggcagcgagagagaatgtaccaacatcctggagggagatgaaagtgacagcctgacagattatgacatcgtgggcggcaaggagagcttcaccgccagcctgaagtttgatgattctggctcctggaggggcaggaaggaggagtatgtgacaggccaggagttccacagcgacacagaccacctggacagcatgcagagcgaggagagctatggagactacatctatgacagcaatgaccaggatgatgatgatgatgatggcattgatgaggagggcggcggcatcagagatgaaaatggcaagccccgctgccagaatgtggccgaggacatggacatccagctgtgtgccagcatcctgaatgaaaattctgatgaaaatgaaaacatcaacaccatgatcctgctggacaagatgcacagctgcagcagcctggagaagcagcagagggtgaatgtggtgcagctggccagccccagcgagaacaacctggtgacagagaagagcaacctgcctgagtacaccacagaaattgctgggaagagcaaagaaaacctgctgaaccacgagatggtgctgaaggatgtgctgccccccatcatcaaggacacagaaagtgagaagacctttggacctgccagcatcagccatgacaacaacaacatcagcagcaccagcgagctgggcacagacctggccaacaccaaggtgaagctgatccagggcagcgagctgcctgagctgacagacagcgtgaagggcaaggatgagtacttcaagaacatgacccccaaggtggacagcagcctggaccacatcatctgcacagagccagacctgattggcaagccagctgaggagagccacctgagcctcatcgcctctgtgacagacaaggacccccagggcaatggaagtgacctgatcaagggcagagatggcaagagtgacatcctgattgaagatgagaccagcatccagaagatgtacctgggggagggggaggtgctggtggagggcctggtggaggaggagaacagacacctgaagctgctgcccgggaagaacacccgggacagcttcaagctgatcaacagccagttccccttcccccagatcaccaacaatgaggagctgaaccagaagggcagcctgaagaaggccaccgtgaccctgaaggatgagcccaacaacctgcagatcatcgtgtccaagagccctgtgcagtttgagaacctggaggagatctttgacacctctgtgtccaaggagatcagtgatgacatcaccagtgacatcacctcctgggagggcaacacccactttgaggagagcttcacagatggccctgagaaggagctggacctcttcacctacctgaagcactgtgccaagaacatcaaggccaaggatgtggccaagcccaatgaagatgtgcccagccacgtgctgatcacagccccacccatgaaggagcacctgcagctgggcgtgaacaacaccaaggagaagagcaccagcacccagaaggacagccccctgaatgacatgatccagagcaatgacctgtgcagcaaggagagcatcagcggcggcggcacagagatcagccagttcaccccagagagcattgaggccaccctgagcatcctgagcaggaagcacgtggaggatgtgggcaagaatgacttcctgcagagcgagcgctgtgccaacggcctgggcaatgacaacagcagcaacaccctgaacacagactacagcttcctggagatcaacaacaagaaggagcgcatcgagcagcagctgcccaaggagcaggccctgagccccaggagccaggagaaggaggtgcagatccctgagctgagccaggtgtttgtggaggatgtgaaggacatcctgaagagccggctgaaggagggccacatgaacccccaggaggtggaggagcccagcgcctgtgccgacaccaagatcctgatccagaacctgatcaagaggatcaccaccagccagctggtgaatgaggccagcacagtgcccagcgacagccagatgtctgacagcagcggcgtgagccccatgaccaacagcagcgagctgaagccagagagcagagatgaccccttctgcatcggcaacctgaagtctgagctgctgctgaacatcctgaagcaggaccagcacagccagaagatcaccggggtgtttgagctgatgagggagctgacccacatggagtatgacctggagaagaggggcatcaccagcaaggtgctgcccctgcagctggagaacatcttctacaagctgctggctgatggctacagcgagaagattgagcacgtgggggacttcaaccagaaggcctgcagcaccagcgagatgatggaggagaagccccacatcctgggggacatcaagagcaaggagggcaactactacagccccaacctggagaccgtgaaggagatcggcctggagagcagcacagtgtgggccagcaccctgcccagagatgagaagctgaaggacctgtgcaatgacttccccagccacctggagtgcaccagcggcagcaaggagatggccagcggggacagcagcacagagcagttcagcagcgagctgcagcagtgcctgcagcacacagagaagatgcatgagtacctgaccctgctgcaggacatgaagccacccctggacaaccaggagagcctggacaacaacctggaggccctgaagaaccagctgcggcagctggagacctttgagctgggcctggcccccatcgccgtcatcctgaggaaggacatgaagctggccgaggagttcctgaagagcctgcccagcgacttcccccggggccacgtggaggagctgagcatcagccaccagagcctgaagacagccttcagcagcctgagcaatgtgagcagcgagaggaccaagcagatcatgctggccatcgacagcgagatgagcaagctggccgtgtcccatgaggagttcctgcacaagctgaagagcttcagtgactgggtgtctgagaagagcaagtctgtgaaggacattgaaattgtgaatgtgcaggacagtgaatatgtgaagaagaggctggagttcctgaaggccaacaacgtgctgaaggacctgggccacaccaagatgcagctggagaccacagcctttgatgtgcagttcttcatcagtgaatatgcccaggacctgagccccaaccagagcaagcagctgctgcggctgctgaacaccacccagaagtgcttcctggatgtgcaggagagcgtgaccacccaggtggagcggctggagacccagctgcacctggagcaggacctggatgaccagaagatcgtggccgagcggcagcaggagtacaaggagaagctgcagggcatctgtgacctgctgacccagacagagaacagactcatcggccaccaggaggccttcatgattggagatggcaccgtggagctgaagaagtaccagagcaagcaggaggagctgcagaaggacatgcagggcagcgcccaggccctggccgaggtggtgaagaacacagagaacttcctgaaggaaaatggagagaagctgagccaggaggacaaggccctgattgagcagaagctgaatgaggccaagatcaagtgtgagcagctgaacctgaaggccgagcagagcaagaaggagctggacaaggtggtgaccacagccatcaaggaggagacagagaaggtggccgctgtgaagcagctggaggagagcaagaccaagattgagaacctgctggactggctgagcaatgtggacaaggacagcgagcgggccggcaccaagcacaagcaggtgattgagcagaatggcacccacttccaggagggagatggcaagagcgccatcggggaggaggatgaggtgaatggaaacctgctggagacagatgtggatggccaggtgggcaccacccaggagaacctgaaccagcagtaccagaaggtgaaggcccagcacgagaagatcatcagccagcaccaggccgtcatcatcgccacccagagcgcccaggtgctgctggagaagcagggccagtacctgagccctgaggagaaggagaagctgcagaagaacatgaaggagctgaaggtgcactatgaaacagccctggccgagagcgagaagaagatgaagctgacccacagcctgcaggaggagctggagaagtttgatgctgactacacagaatttgagcactggctgcagcagagcgagcaggagctggagaacctggaggccggggctgatgacatcaatggcctgatgaccaagctgaagaggcagaagagcttctctgaagatgtgatcagccacaagggggacctgcgctacatcaccatcagcggcaacagagtgctggaggccgccaagagctgcagcaagagagatggcggcaaggtggacaccagcgccacccaccgggaggtgcagaggaagctggaccacgccacagaccgcttccgcagcctgtacagcaaatgtaatgtgctgggcaacaacctgaaggacctggtggacaagtaccagcactatgaagatgccagctgtggcctgctggccggcctgcaggcctgtgaggccacagccagcaagcacctgtctgagcccatcgctgtggaccccaagaacctgcagaggcagctggaggagaccaaggccctgcagggccagatcagcagccagcaggtggccgtggagaagctgaagaagacagctgaggtgctgctggatgcccggggcagcctgctgcctgccaagaatgacatccagaagaccctggatgacatcgtgggccgctatgaggacctgagcaagtctgtgaatgaaagaaatgagaagctgcagatcaccctgaccaggagcctgtctgtgcaggacggcctggatgagatgctggactggatgggaaatgtggagagcagcctgaaggagcagggccaggtgcccctgaacagcacagccctgcaggacatcatcagcaagaacatcatgctggagcaggacattgctggccggcagagcagcatcaatgccatgaatgagaaggtgaagaagttcatggagaccacagaccccagcacagccagcagcctgcaggccaagatgaaggacctgagcgcccgcttcagcgaggccagccacaagcacaaggagaccctggccaagatggaggagctgaagaccaaggtggagctgtttgagaacctgtctgagaagctgcagaccttcctggagaccaagacccaggccctgacagaggtggatgtgcctgggaaggatgtgacagagctgagccagtacatgcaggagagcaccagcgagttcctggagcacaagaagcacctggaggtgctgcacagcctgctgaaggagatcagcagccacggcctgcccagcgacaaggccctggtgctggagaagaccaacaacctgagcaagaagttcaaggagatggaggacaccatcaaggagaagaaggaggccgtgaccagctgccaggagcagctggatgccttccaggtgctggtgaagagcctgaagtcctggatcaaggagaccaccaagaaggtgcccatcgtgcagcccagctttggagctgaggacctgggcaagagcctggaggacaccaagaagctgcaggagaagtggagcctgaagaccccagagatccagaaggtgaacaacagcggcatcagcctgtgcaacctgatctctgctgtgaccaccccagccaaggccatcgctgctgtgaagtctggaggagctgtgctgaatggagagggcacagccaccaacacagaggagttctgggccaacaagggcctgaccagcatcaagaaggacatgacagacatcagccacggctatgaggacctgggcctgctgctgaaggacaagattgctgagctgaacaccaagctgagcaagctgcagaaggcccaggaggagagcagcgccatgatgcagtggctgcagaagatgaacaagacagccaccaagtggcagcagaccccagcccccacagacacagaggccgtgaagacccaggtggagcagaacaagagctttgaagctgagctgaagcagaatgtgaacaaggtgcaggagctgaaggacaagctgacagagctgctggaggagaacccagacaccccagaggccccccgctggaagcagatgctgacagaaattgacagcaagtggcaggagctgaaccagctgaccatcgaccggcagcagaagctggaggagagcagcaacaacctgacccagttccagacagtggaggcccagctgaagcagtggctggtggagaaggagctgatggtgtctgtgctgggccccctgagcattgaccccaacatgctgaacacccagaggcagcaggtgcagatcctgctgcaggagtttgccaccaggaagccccagtatgagcagctgacagctgctggccagggcatcctgagcaggcctggagaggaccccagcctgcggggcatcgtgaaggagcagctggccgctgtgacccagaagtgggacagcctgaccggccagctgagtgacagatgtgactggattgaccaggccatcgtgaagagcacccagtaccagagcctgctgcggagcctgagtgacaagctgagtgacctggacaacaagctgagcagcagcctggccgtgtccacccacccagatgccatgaaccagcagctggagacagcccagaagatgaagcaggagatccagcaggagaagaagcagatcaaggtggcccaggccctgtgtgaggacctgagcgccctggtgaaggaggagtacctgaaggccgagctgagccggcagctggagggcatcctgaagagcttcaaggatgtggagcagaaggcagaaaatcatgtgcagcacctgcagagcgcctgtgccagcagccaccagttccagcagatgagccgggacttccaggcctggctggacaccaagaaggaggagcagaacaagagccaccccatcagcgccaagctggatgtgctggagagcctcatcaaggaccacaaggacttcagcaagaccctgacagcccagagccacatgtatgagaagaccatcgccgagggggagaacctgctgctgaagacccagggcagcgagaaggccgccctgcagctgcagctgaacaccatcaagaccaactgggacaccttcaacaagcaggtgaaggagcgggagaacaagctgaaggagagcctggagaaggccctgaagtacaaggagcaggtggagaccctgtggccctggattgacaagtgccagaacaacctggaggagatcaagttctgcctggaccctgcagaaggagaaaattccatcgccaagctgaagagcctgcagaaggagatggaccagcacttcggcatggtggagctgctgaacaacacagccaacagcctgctgtctgtgtgtgaaattgacaaggaggtggtgacagatgagaacaagagcctcatccagaaggtggacatggtgacagagcagctgcacagcaagaagttctgcctggagaacatgacccagaagttcaaggagttccaggaggtgtccaaggagagcaagaggcagctgcagtgtgccaaggagcagctggacatccatgacagcctgggcagccaggcctacagcaacaagtacctgaccatgctgcagacccagcagaagagcctgcaggccctgaagcaccaggtggacctggccaagaggctggcccaggacctggtggtggaggccagtgacagcaagggcaccagtgatgtgctgctgcaggtggagaccatcgcccaggagcacagcaccctgagccagcaggtggatgagaagtgcagcttcctggagaccaagctgcagggcatcggccacttccagaacaccatccgggagatgttcagccagtttgctgagtttgatgatgagctggacagcatggcccctgtgggcagagatgctgagaccctgcagaagcagaaggagaccatcaaggccttcctgaagaagctggaggccctgatggccagcaatgacaatgccaacaagacctgcaagatgatgctggccacagaggagaccagcccagacctggtgggcatcaagagggacctggaggccctgagcaagcagtgcaacaagctgctggaccgggcccaggcccgggaggagcaggtggagggcaccatcaagaggctggaggagttctacagcaagctgaaggagttcagcatcctgctgcagaaggccgaggagcacgaggagagccagggccctgtgggcatggagacagagaccatcaaccagcagctgaacatgttcaaggtgttccagaaggaggagattgagcccctgcagggcaagcagcaggatgtgaactggctgggccagggcctcatccagagcgctgccaagagcaccagcacccagggcctggagcatgacctggatgatgtgaatgcccgctggaagaccctgaacaagaaggtggcccagagagctgcccagctgcaggaggccctgctgcactgcggccgcttccaggatgccctggagagcctgctgtcctggatggtggacacagaggagctggtggccaaccagaagccacccagcgctgagttcaaggtggtgaaggcccagatccaggagcagaagctgctgcagaggctgctggatgacaggaagagcacagtggaggtgatcaagcgggagggggagaagatcgccaccacagctgagcctgctgacaaggtgaagatcctgaagcagctgagcctgctggacagccgctgggaggccctgctgaacaaggccgagaccaggaaccggcagctggagggcatctctgtggtggcccagcagttccacgagaccctggagcccctgaatgagtggctgaccaccatcgagaagaggctggtgaactgtgagcccatcggcacccaggccagcaagctggaggagcagatcgcccagcacaaggccctggaggatgacatcatcaaccacaacaagcacctgcaccaggccgtgtccatcggccagagcctgaaggtgctgagcagccgggaggacaaggacatggtgcagagcaagctggacttcagccaggtgtggtacatcgagatccaggagaagagccacagccgctctgagctgctgcagcaggccctgtgcaatgccaagatctttggagaagatgaggtggagctgatgaactggctgaatgaggtgcatgacaagctgagcaagctgtctgtgcaggactacagcacagagggcctgtggaagcagcagagcgagctgcgggtgctgcaggaggacatcctgctgaggaagcagaatgtggaccaggccctgctgaatggcctggagctgctgaagcagaccactggagatgaggtgctgatcatccaggacaagctggaggccatcaaggcccgctacaaggacatcaccaagctgagcacagatgtggccaagaccctggagcaggccctgcagctggcccggcggctgcacagcacccatgaggagctgtgcacctggctggacaaggtggaggtggagctgctgtcctatgagacccaggtgctgaagggggaggaggccagccaggcccagatgaggcccaaggagctgaagaaggaggccaagaacaacaaggccctgctggacagcctgaatgaggtgagcagcgccctgctggagctggtgccctggagggcccgggagggcctggagaagatggtggccgaggacaatgaaagataccgcctggtgtctgacaccatcacccagaaggtggaggagattgatgctgccatcctgcggagccagcagtttgaccaggccgcagatgctgagctgtcctggatcacagaaacagagaagaagctgatgagcctgggggacatccggctggagcaggaccagaccagcgcccagctgcaggtgcagaagaccttcaccatggagatcctgcggcacaaggacatcattgatgacctggtgaagagcggccacaagatcatgacagcctgcagcgaggaggagaagcagagcatgaagaagaagctggacaaggtgctgaagaactatgacaccatctgccagatcaacagcgagcgctacctgcagctggagcgggcccagagcctggtgaaccagttctgggagacctatgaggagctgtggccctggctgacagagacccagagcatcatcagccagctgcctgccccagccctggagtatgagaccctgcggcagcagcaggaggagcaccggcagctgcgggagctgattgctgagcacaagccccacatcgacaagatgaacaagacaggcccccagctgctggagctgagccctggagagggcttcagcatccaggagaagtatgtggccgctgacaccctgtacagccagatcaaggaggatgtgaagaagagagctgtggccctggatgaggccatcagccagagcacccagttccatgacaagattgaccagatcctggagagcctggagcgcatcgtggagcggctgcggcagcccccatccatctctgctgaggtggagaagatcaaggagcagatcagcgagaacaagaatgtgtctgtggacatggagaagctgcagcccctgtatgagaccctgaagcagagaggagaggagatgattgcccggagcggcggcacagacaaggacatcagcgccaaggctgtgcaggacaagctggaccagatggtgttcatctgggagaacatccacaccctggtggaggagcgggaggccaagctgctggatgtgatggagctggccgagaagttctggtgtgaccacatgagcctgattgtgaccatcaaggacacccaggacttcatccgggacctggaggaccccggcatcgaccccagcgtggtgaagcagcagcaggaggccgctgagaccatccgggaggagattgatggcctgcaggaggagctggacatcgtcatcaacctgggcagcgagctgattgctgcctgtggggagccagacaagcccatcgtgaagaagagcattgatgagctgaacagcgcctgggacagcctgaacaaggcctggaaggacagaattgacaagctggaggaggccatgcaggccgctgtgcagtaccaggacggcctgcaggccgtgtttgactgggtggacattgctgggggcaagctggcctccatgagccccatcggcacagacctggagaccgtgaagcagcagatcgaggagctgaagcagttcaagtctgaggcctaccagcagcagatcgagatggagcggctgaaccaccaggccgagctgctgctgaagaaggtgacagaggagagtgacaagcacacagtgcaggaccccctgatggagctgaagctgatctgggacagcctggaggagcgcatcatcaaccggcagcacaagctggagggcgccctgctggccctgggccagttccagcacgccctggatgagctgctggcctggctgacccacacagagggcctgctgtctgagcagaagcctgtgggcggggaccccaaggccattgaaattgagctggccaagcaccacgtgctgcagaatgatgtgctggcccaccagagcacagtggaggccgtgaacaaggctggaaatgacctgattgagagcagcgctggggaggaggccagcaacctgcagaacaagctggaggtgctgaaccagcgctggcagaatgtgctggagaagacagagcagaggaagcagcagctggatggagccctgcggcaggccaagggcttccacggggagattgaggacctgcagcagtggctgacagacacagagcggcacctgctggccagcaagcccctgggcggcctgcctgagacagccaaggagcagctgaatgtgcacatggaggtgtgtgccgcctttgaggccaaggaggagacctacaagagcctgatgcagaagggccagcagatgctggcccgctgccccaagtctgctgagaccaacatcgaccaggacatcaacaacctgaaggagaagtgggagagcgtggagaccaagctgaatgaaaggaagaccaagctggaggaggccctgaacctggccatggagttccacaacagcctgcaggacttcatcaactggctgacccaggccgagcagaccctgaatgtggccagccggcccagcctcatcctggacacagtgctcttccagattgatgagcacaaggtgtttgccaatgaggtgaacagccaccgggagcagatcatcgagctggacaagacaggcacccacctgaagtacttcagccagaagcaggatgtggtgctgatcaagaacctgctgatctctgtgcagagccgctgggagaaggtggtgcagaggctggtggagcggggccgcagcctggatgatgccaggaagagggccaagcagttccacgaggcctggagcaagctgatggagtggctggaggagagcgagaagagcctggacagcgagctggagatcgccaatgaccctgacaagatcaagacccagctggcccagcacaaggagttccagaagagcctgggcgccaagcacagcgtgtatgacaccaccaacagaacaggccgcagcctgaaggagaagaccagcctggctgatgacaacctgaagctggatgacatgctgtctgagctgcgggacaagtgggacaccatctgtgggaagtctgtggagcggcagaacaagctggaggaggccctgctcttcagcggccagttcacagatgccctgcaggccctgattgactggctgtacagagtggagccccagctggccgaggaccagcctgtgcacggggacatcgacctggtgatgaacctgattgacaaccacaaggccttccagaaggagctgggcaagaggaccagctctgtgcaggccctgaagaggtctgcccgggagctgattgagggcagcagagatgacagctcctgggtgaaggtgcagatgcaggagctgagcacccgctgggagaccgtgtgtgccctgagcatcagcaagcagacccggctggaggccgccctgcggcaggccgaggagttccacagcgtggtgcacgccctgctggagtggctggccgaggccgagcagaccctgcgcttccacggcgtgctgcctgatgatgaagatgccctgcggaccctgattgaccagcacaaggagttcatgaagaagctggaggagaagagagctgagctgaacaaggccaccaccatgggagacacagtgctggccatctgccacccagacagcatcaccaccatcaagcactggatcaccatcatccgggccaggtttgaggaggtgctggcctgggccaagcagcaccagcagaggctggccagcgccctggccggcctcatcgccaagcaggagctgctggaggccctgctggcctggctgcagtgggccgagaccaccctgacagacaaggacaaggaggtgatcccccaggagattgaggaggtgaaggccctgattgctgagcaccagaccttcatggaggagatgaccaggaagcagccagatgtggacaaggtgaccaagacctacaagagaagagctgctgaccccagcagcctgcagagccacatccctgtgctggacaagggccgggccggcaggaagcgcttccctgccagcagcctgtaccccagcggcagccagacccagatcgagaccaagaacccccgggtgaacctgctggtgtccaagtggcagcaggtgtggctgctggccctggagaggaggaggaagctgaatgatgccctggaccggctggaggagctgcgggagtttgccaactttgattttgacatctggaggaagaagtacatgcgctggatgaaccacaagaagagccgggtgatggacttcttcagaagaattgacaaggaccaggacggcaagatcacccggcaggagttcattgatggcatcctgagcagcaagttccccaccagccggctggagatgtctgctgtggccgacatctttgacagagatggagatggctacatcgactactatgaatttgtggccgccctgcaccccaacaaggatgcctacaagcccatcacagatgctgacaagattgaagatgaggtgacccggcaggtggccaagtgcaagtgtgccaagcgcttccaggtggagcagatcggggacaacaagtacagagtgtccttccagagcaactttggagacagccagcagctgcggctggtgcgcatcctgcggagcacagtgatggtgcgggtgggcggcggctggatggccctggatgagttcctggtgaagaatgacccctgccgggtgcaccaccacggcagcaagatgctgcggtctgagagcaacagcagcatcaccaccacccagcccaccatcgccaagggccgcaccaacatggagctgcgggagaagttcatcctggctgatggagccagccagggcatggccgccttccggccccggggccgccgcagccggcccagcagcagaggagccagccccaacagaagcacctctgtgagcagccaggccgcccaggccgccagcccccaggtgcctgccaccaccacccccaagggcacccccatccagggcagcaagctgcggctgcccggctacctgagcggcaagggcttccacagcggggaggacagcggcctcatcaccacagctgctgcccgggtgaggacccagtttgctgacagcaagaagacccccagccggcccggcagccgggccggcagcaaggccggcagccgggccagcagcagaagaggaagtgatgccagtgactttgacatcagcgagatccagagcgtgtgcagtgatgtggagaccgtgccccagacccaccggcccaccccccgggccggcagccggcccagcacagccaagcccagcaagatccccaccccccagaggaagagccctgccagcaagctggacaagagcagcaagaggtag

SEQ ID NO: 269256 - DNA, 22719 bp, Artificial Sequence
  derived and/or modified sequence
atggccggctacctgagccccgccgcctacctgtacgtggaggagcaggaatatctacaggcttatgaagatgtgctggagcggtataaagatgagagagataaagtgcagaagaagaccttcaccaagtggataaatcagcacctgatgaaggtgcgcaagcacgttaatgatctgtacgaagaccttcgggatggacacaatctgatcagccttctggaggtgttgagtggcgacaccctcccacgcgagaaagggcggatgcgttttcacaggttacagaatgtgcagatcgccctagactacctgaaaagacggcaggtgaaactggtgaatatcagaaacgacgacatcactgatggcaacccaaaacttaccctcggcctgatctggactataattcttcacttccagatttctgacatccatgtgactggggaatctgaggacatgagcgccaaagagaggctgctgctgtggactcagcaggcaaccgaggggtacgctggcatccgctgtgaaaacttcactacttgttggcgggacggcaagttgtttaacgccattattcataaatatcggcccgacctcatcgacatgaatacagtagcagtgcagagcaacctggccaacttagagcacgcattttatgtggcagagaagataggcgtgatacggctgctggaccccgaggatgtagatgtctcaagtcctgatgaaaagtctgtgattacctatgtgagttcattatacgacgcattcccaaaggtgcccgagggaggagaaggtattggcgccaacgacgtcgaggtcaagtggattgagtaccagaacatggtgaactacctcatccaatggatccgacaccacgtgacaaccatgtccgaacgcacttttcccaataatcccgtggagcttaaagcactgtacaatcagtaccttcagttcaaggagacagagatcccaccgaaagaaactgaaaagtccaagataaagcgtctgtataagctgctggagatctggatcgagtttggacggatcaaactcctgcagggttatcaccccaacgatatcgagaaagaatggggtaagctgataattgccatgcttgaaagagagaaagcgcttagacccgaggtggagaggctggaaatgctccaacagatagccaaccgcgtccagcgggactccgtcatctgtgaggacaagctgattctggccggcaatgctctacagagtgactcaaagcgcttggaatccggggttcagtttcagaacgaagccgaaattgctggctacattctagagtgcgaaaacctgcttagacagcatgttattgatgtgcagatcctaattgatggaaaatattatcaggcagaccagctggtgcagcgtgtggccaaactgagggatgaaatcatggctctgcgaaacgaatgtagctcagtatatagcaagggccggatcttgacgaccgagcagactaagttgatgatctcaggcatcactcaaagcttaaattccgggtttgctcaaacgctccacccctccttaaccagcggcctaactcagtctctcaccccctctctcacgtcctctagtatgacgagcggcctgtccagcggcatgactagtagactcacaccctccgttacccccgcatatactcctgggttcccgtctgggctggtccccaatttttctagtggtgtggaacccaattctctacagaccctcaaactaatgcagattagaaagcccctgttgaagtcatcactcctggaccaaaatctgaccgaggaggaaattaacatgaaatttgtccaagacctgttgaattgggttgacgagatgcaggttcagctggatagaaccgagtgggggtccgatctcccttcagttgagtcgcatcttgagaatcataaaaacgtgcacagggccatagaagaattcgagagctcactcaaggaagctaaaatctcggaaatccagatgactgcgcctctgaagctgacgtacgctgagaaattacatcgccttgaaagccagtatgccaagcttcttaataccagcagaaaccaagaacggcatctggacacactgcacaactttgtaagccgtgctactaatgagttgatttggcttaacgaaaaagaggaggaggaggtcgcttacgattggtctgaacgaaacaccaacattgcccggaaaaaggattaccacgcagagctgatgcgtgagctggaccaaaaggaagaaaacattaaatccgtgcaggaaatcgcagaacaactcctgctggagaaccaccccgcaaggcttaccattgaggcctaccgggccgccatgcaaactcaatggtcatggatcctgcagctgtgtcaatgcgtggaacagcacatcaaagagaacaccgcctactttgaattcttcaatgatgctaaagaggcaactgactacctcaggaacctgaaggatgctatacagcgcaaatattcgtgcgaccgaagctcttctatccataagctagaggacctggttcaggaatctatggaagaaaaagaagaactgttgcaatataagagcaccatcgccaacctcatggggaaggccaagacgatcatccagctgaaaccacggaactccgactgcccattaaagaccagcattcccataaaagccatctgcgactataggcagatagagattactatctacaaggacgacgagtgcgtgctcgctaacaactcccacagggccaagtggaaggtaatctcgcctacaggcaatgaggcaatggtccccagtgtatgcttcacagtaccccctcctaacaaagaagcagttgatcttgccaaccggatcgagcaacagtatcagaacgtcctgaccttgtggcacgaaagccacattaatatgaagagtgtggtttcctggcattacctgatcaacgagatcgatagaattcgcgcaagtaatgtcgccagcattaagaccatgctgccaggtgaacaccagcaggtattaagcaatctgcagtctcggttcgaggactttttagaggactcacaagaaagccaggtgtttagtgggtctgacatcacccagttagagaaggaggtcaatgtgtgcaagcagtactaccaggagctgctgaagagcgcggaacgagaagagcaggaggagagcgtatataatctctatattagcgaggtacgcaatataaggctgcgcctggaaaactgtgaagataggctcatccgccagattaggactcccttagaaagggacgatctccacgagtccgtctttaggattaccgagcaagaaaagttgaagaaggaacttgagaggctgaaggatgatcttggaacgatcaccaacaagtgcgaggaatttttttcacaggcagccgcgtcctcctcggtacctacactgaggagtgagctgaatgttgtgttgcagaacatgaatcaggtgtattccatgagctctacatacattgacaagttaaagaccgtgaacctcgtgctgaagaacacccaggctgccgaggcccttgtcaagttgtacgagactaaactctgcgaagaggaggcggtgattgccgacaaaaacaacattgagaacctcatcagcacccttaaacagtggcggagcgaggttgacgagaagagacaggtgttccacgcattggaggatgagctacagaaagcaaaagcgatatccgatgagatgttcaaaacctataaggaacgtgacttggactttgactggcacaaagaaaaggcagaccagctggttgagcggtggcagaacgtacacgtacagattgacaaccgactccgtgacctggaagggattgggaagtcactgaagtattatcgcgatacgtatcacccgcttgacgactggatacagcaagtcgagaccactcagagaaagatccaggaaaaccagcctgagaattccaagactctggccacacaactcaaccaacagaaaatgctggtgagcgaaatcgaaatgaagcagagcaagatggatgagtgccagaaatatgcggagcagtatagcgctaccgtgaaggattatgagctgcagaccatgacctatcgggccatggtggatagtcaacagaagagccccgtcaagaggcgaagaatgcagagctcagcggacctgatcatccaagagttcatggacctgcgaacccgctatacggctttagtcactctgatgactcagtacattaagttcgccggggattccctgaagcggctcgaggaagaggagaagtcacttgaggaagagaaaaaggagcacgtcgagaaggcaaaggaactgcaaaaatgggtgagcaacatcagcaaaacacttaaggacgctgagaaggctggaaaaccgcccttcagcaaacagaaaattagttctgaagaaatatccactaagaaggagcagctgtcagaggcactgcagaccatccagctgtttctggcaaagcacggagataagatgaccgatgaggagagaaacgaattggagaagcaggttaagacgctgcaggaatcttataatctgttgttttctgaatcgctgaagcaattacaggagtctcagactagcggcgacgtgaaggtcgaggaaaagttggataaggtgatcgccggaacgatagatcaaactactggtgaggtcctgagtgtgttccaggccgttctgcggggtctaatcgattacgatacgggaattaggttgctggagactcaactgatgatttcaggcctgatctcacctgaattgcgaaaatgttttgacctgaaggatgcaaagagccatgggctgatcgacgagcagatcctctgccaactgaaggagctgagcaaggctaaggaaatcatctccgctgcttcaccaacaaccatccctgtcttggacgctctcgcacaatcaatgatcactgaatctatggccatcaaggtgctcgagatcctgctgagtaccgggagcctggtaatcccagcaactggggagcagctgaccctccagaaggcctttcagcagaatctggttagctcagcactgttttccaaggtgctggaacgccagaacatgtgtaaggacttgatcgacccttgtacctctgagaaagtcagcctgatcgacatggttcaaagatccacactgcaggagaacacagggatgtggctgctcccagtcaggccacaggagggaggtcgcatcacattaaagtgcggccgcaacattagcatcttacgcgctgcccacgagggactaatcgaccgggagactatgtttcgcctgttaagcgctcagctgctctccgggggcttaattaactccaactcgggtcaaaggatgactgtcgaggaagcggtgcgcgagggcgtgatcgaccgagacaccgcctcctccatcctcacataccaagtgcagaccgggggaatcattcaaagtaacccagccaaaagactgacagtggacgaggctgtccagtgcgatctgataactagcagttctgctctgctcgtgttggaggcccagagaggctatgtaggtctcatatggccacactccggtgagatcttccccacatcttcatccctccagcaggaactgattaccaacgagttggcatacaaaatccttaacggacgtcaaaagattgcagccctgtacattccggagagctcccaggtcatcggtctggacgctgccaaacagctggggatcatcgataacaataccgcgtccatcttaaaaaacattaccttacccgataagatgcccgatttgggggatctagaggcctgcaagaacgcccgcaggtggttgtccttctgcaaattccaaccttctacagtgcatgactacagacaggaggaagacgtgttcgatggagaggagcctgtgacaacccaaacaagcgaggagactaaaaagctgttcctgagttacctgatgattaactcctacatggacgcaaacaccgggcaacgactactgctatacgacggcgaccttgatgaggccgtgggtatgctgctcgagggctgtcacgcagaatttgatggcaatacagcaatcaaggagtgtctggatgtcctgtcatcctccggtgtcttcctgaataacgccagcggcagagaaaaggacgagtgcaccgccaccccgagttccttcaacaagtgccattgtggcgagcccgagcatgaggaaacacctgagaatcgcaaatgtgccatcgatgaggaatttaacgagatgaggaacactgtcatcaactccgagttcagccagtcagggaaattggctagtaccatttctatcgatccaaaggtgaactcatcccccagcgtttgcgtgccatcactgatttcatacctcactcagaccgaattagcagatatctcaatgttacgctccgactccgaaaacatcctgactaactacgaaaatcagtccagggttgaaacaaatgaaagagcgaacgaatgttctcattcaaaaaatatccagaacttcccaagcgacttgatcgaaaaccctatcatgaagagcaagatgtctaagttctgtggcgtcaacgagactgaaaacgaagacaatacaaatagggattccccaatttttgactactctcctcggctgagtgcccttttgagccacgacaagctcatgcactcgcagggctcttttaatgacactcatacaccagaatcaaacggaaataagtgtgaggccccagcactgtccttttctgataaaaccatgcttagtgggcagcggatcggggagaaattccaggaccagtttctgggcatcgcagccattaatatctctcttccgggcgagcagtacgggcaaaaatccctgaacatgatctcaagcaatccacaggtgcagtatcataatgacaaatacatctcgaacaccagcggcgaagatgagaaaacacatccagggtttcaacagatgcccgaggacaaggaggatgagagtgagattgaggagtattcatgcgctgtcacacccggcggtgataccgacaacgccatagtttctctgacctgtgcgacccctctgctcgacgagacaatatcagcatctgattacgagacctctcttttaaacgatcaacagaacaacacgggcacagatacagatagcgatgacgatttctatgatactcctttgttcgaggatgatgaccacgacagtctgcttctggacggagatgatagagactgcctgcatcccgaggactacgacacattacaggaggagaacgacgagactgccagtccagctgacgtcttttacgacgtgtcaaaggaaaacgagaatagcatggtgccacagggagcacctgtgggatctctttccgttaagaacaaggcacactgtttgcaagatttccttatggacgtcgagaaggacgagctggatagtggcgaaaagattcatttgaatcccgttgggtccgacaaagtaaacggccagtcgcttgaaaccggatccgagcgcgagtgcactaacattctggagggcgacgaatctgacagcctgaccgattacgacatagtgggcggaaaagaaagtttcacagctagcctgaagtttgatgatagcgggtcatggcgggggcgcaaagaagagtacgttactggccaggaattccactcggacacagatcacctggattctatgcagtctgaagaatcttatggtgactatatttacgacagcaacgaccaggatgatgacgatgacgatggaattgacgaggaaggaggcggcataagggacgaaaacggtaaaccacgatgccagaacgtggcggaggatatggacatacagctgtgcgccagtatacttaacgagaactccgatgaaaacgagaacattaatacaatgatactgctggataagatgcatagctgttcctctcttgagaagcagcagcgagttaacgttgtgcagttggcatccccatctgaaaacaacctggttacagagaaaagcaacctacccgaatacaccacggaaatcgccggcaaatctaaagaaaatttgctgaatcatgaaatggtgcttaaggacgttctgcctcccatcatcaaggatacagagtccgagaagacttttgggccagctagtatatcacatgacaataataacattagctccacatctgagctaggcactgacctagccaatacaaaggtcaaactgattcagggtagtgaactgcctgagctgacagattcagtcaaaggcaaagacgagtactttaagaacatgactccgaaggtggattcgagccttgatcacattatctgtaccgagcccgacctcattggtaaacccgcagaggaaagtcacctgagtttgatcgcctcggtgaccgacaaggacccccaaggtaatggctccgatctgatcaaaggacgtgacggaaagtccgacattctgatcgaggacgagacgtccatccaaaagatgtacctcggtgaaggcgaggtgctggtcgaggggcttgttgaagaggagaatcgtcatctcaagctgctgcctggcaagaacacgagagactcttttaaactgatcaattcccagtttccttttccacaaattacgaataacgaggagttaaaccagaagggttcactgaagaaggccacagtcactctcaaagacgagcctaataacctacagattattgttagtaagagccccgttcagtttgagaatctagaggagatttttgacacctccgtcagcaaagaaatatctgacgatattacatcagatattaccagctgggaaggtaacacccactttgaagaaagcttcaccgatggtcccgagaaagaactcgacctctttacttatctgaagcattgtgctaagaatattaaagcgaaagacgtggccaaaccaaacgaggatgttcccagtcacgtcctgatcacagccccacctatgaaggaacacttgcaactgggggtaaacaacactaaagagaaatcaacttcaactcagaaggactcaccattgaacgatatgatccagagcaacgatttatgcagtaaggaatctatatcaggcgggggcacggagatctcacagttcacacctgagtcaattgaggccacgctgagtatccttagccgtaaacatgtcgaagacgtgggtaagaacgatttcctgcaaagcgagcgctgcgcgaacggattaggcaatgataatagctctaatacattgaacaccgactatagctttttggagatcaacaataaaaaggagaggatcgagcagcagcttcctaaggaacaggcgctgagcccccgctctcaagagaaggaagtgcagatccccgagctatcacaggtcttcgtcgaggatgttaaggacattctcaaaagtagactgaaagagggacacatgaacccccaggaagtggaggaaccatcggcttgcgccgacacaaagattctgattcaaaatctcattaagagaatcaccacaagccagctggtgaatgaggcctccaccgtcccctctgactcgcagatgtcggactcctcaggggtgtcacccatgaccaattccagcgagttgaagccagagtcaagggatgaccctttttgtatagggaatctgaagtcggagctgcttctcaatatcctaaaacaggaccagcacagccagaaaatcactggagtgtttgaacttatgagagagttgacccacatggagtatgacctggagaaacggggcataaccagcaaagtgctcccactgcagctggaaaatattttctataaacttctggctgacgggtacagtgagaagatcgagcatgtgggtgatttcaatcagaaggcatgtagcacaagcgagatgatggaagagaagccgcatattcttggggatattaaatccaaggaaggtaattactactctcccaacctcgaaactgtcaaggagattggtctggaatccagcacggtatgggccagtacattgcctagggatgaaaagttgaaggatctgtgtaatgacttcccatcccatctcgagtgtacatccgggtcgaaagaaatggcctctggggattcatctactgagcaatttagcagcgagctgcagcaatgcttacagcacaccgaaaagatgcacgagtatctgacactgctacaggatatgaagccacctttggataaccaggaatcactggataacaacctggaggcattgaagaaccagctcaggcagcttgagacctttgagcttgggctcgctcccattgctgtaatactgagaaaggatatgaaactggctgaggaattcctgaagtctctccctagcgattttcccaggggacatgtcgaggaactgagcatcagccaccagtcccttaaaaccgccttttctagcctgtctaacgtctcctctgagcgcacaaaacagatcatgttagctatcgactctgaaatgtcaaaactggcagtgtcacacgaagagttcctgcataagctaaagagtttttccgactgggtatccgagaagtctaagagcgtgaaggatattgagattgtgaatgtgcaggatagcgagtatgttaaaaaacgtctcgaatttctgaaggctaataatgttcttaaggatctgggacatacaaagatgcagctcgaaaccactgccttcgatgtacagtttttcatttctgagtatgcacaggacctgtcacccaatcaaagtaagcagttattacggctgctcaatactacccaaaaatgtttcctggatgtgcaagagagcgtgactactcaggtcgagaggctggagacacagcttcacctggagcaggatctagacgatcagaagatagtcgccgaaaggcagcaggagtacaaggagaagttgcaggggatatgcgatcttttaacgcagacagaaaaccgcctgatcgggcatcaagaggcctttatgatcggtgatggaacagtcgaactgaaaaagtatcagagtaaacaggaggaactgcagaaagatatgcaggggtcagctcaggccctagctgaggtggtgaagaataccgaaaatttcctgaaagagaacggcgagaagttgagtcaagaggataaagccttaatagaacagaagctgaacgaggccaagattaagtgtgagcagttaaacctgaaagcagaacagtctaaaaaagagttagacaaggtcgtaaccacggctattaaggaagagaccgaaaaggtagccgcagtgaagcagctggaggaatcgaagacaaagattgagaacctgctcgattggttgtcaaacgtcgacaaggacagtgagcgagctggcacaaaacacaaacaagtcattgagcagaatggcacccacttccaggagggcgacggcaaatcagcaattggcgaggaagacgaggtgaatggaaacttactggagactgacgtggacgggcaggtaggaaccacccaggaaaatctcaaccaacaatatcagaaagtgaaagctcagcatgaaaagataatctctcagcatcaggcagtgattattgctacacagtccgctcaggtgcttctagaaaaacagggacagtacctttctccagaggagaaagaaaagctgcagaagaatatgaaggaattaaaggtgcactacgagaccgcccttgctgaaagtgaaaaaaaaatgaagctgacccattcacttcaggaagagctggaaaagtttgatgccgactataccgagttcgagcactggcttcaacagtccgaacaggagctggaaaacctggaagcgggcgccgatgacatcaatggcctgatgaccaaactgaaacgccaaaagagcttctctgaagatgtgataagccacaagggggatctcaggtacatcaccatctccggcaatagagtgctggaggcagccaagagttgtagcaagagagacgggggaaaggttgacaccagcgccactcaccgcgaagtgcaacggaagctcgaccatgctactgaccgctttcgcagcttgtattccaaatgtaatgttcttgggaataatcttaaagatctggttgataagtaccagcactatgaggatgctagctgtggtttgctggctggcctgcaagcatgtgaagcaactgccagcaaacacctgtccgaacccattgctgtagaccctaagaatctgcagaggcagttagaggaaactaaggccttacagggacagatctcaagccagcaggttgccgtcgaaaagttgaagaagacggccgaggtattgctcgatgctagaggctctctcctaccagctaagaatgatatccagaagaccctggacgacattgtgggccgctacgaggacttaagcaagtcagtgaatgagagaaacgagaaactccagatcacgctaacccgcagtctgtccgtgcaggatggtttggatgagatgctggactggatgggtaatgttgaatctagcctcaaagagcagggtcaggtgcccctgaatagtaccgcattgcaagacattatatccaagaacattatgctggagcaagacattgcaggccgtcaaagcagtatcaacgccatgaatgagaaagtgaagaaatttatggagaccaccgacccaagcacggcaagcagcctccaggccaagatgaaggatttaagcgcacgatttagtgaggcgagccacaagcataaagagacactggcaaaaatggaagagctcaagaccaaagttgagctcttcgagaatctgagcgaaaagcttcaaacttttttagagactaagacacaagctcttactgaagtggatgtgcccggcaaggacgtgaccgaactgagccagtacatgcaagagtcaacatctgaatttctggaacacaaaaaacatctagaagttttgcactcccttctgaaggaaatatcttctcatggactcccgagcgacaaggcattagttttagaaaaaacaaataacctgtcaaagaagtttaaagaaatggaagatactatcaaggagaaaaaagaggcagttacctcctgccaggagcagcttgacgctttccaggtgctggttaagtcgctgaaaagttggattaaagaaaccacaaagaaggtcccaattgtccagccgtccttcggcgcggaagatcttggaaagtccctcgaagacacaaaaaaactgcaggaaaagtggtcacttaaaacacccgaaatccagaaggtgaacaacagcggaattagcttatgcaacttgatttctgccgtgacaacgcctgcaaaggcaattgccgccgtgaagtccgggggagctgtgctaaacggagaggggaccgcgacaaatacagaggagttttgggctaacaagggccttacttccattaaaaaggatatgaccgacatctcccacgggtatgaggacctcggcttactgctgaaagacaaaattgcggaactaaatactaagctgagtaagctacagaaggctcaagaggaaagctccgcaatgatgcagtggctgcagaaaatgaacaagaccgcaacaaagtggcagcagacaccggcgccgacagataccgaagctgttaaaacccaggttgagcagaacaagagcttcgaggcagaattaaagcagaatgtgaacaaagtccaagagcttaaggacaagctaaccgagctactagaggagaacccagacaccccagaggcaccacgttggaaacagatgttaactgagatcgattccaagtggcaggagcttaatcagctgaccatcgataggcagcagaagctagaagaatcgtcaaacaaccttactcagtttcagaccgtggaggcacagttgaaacaatggttggtggagaaagaacttatggtttctgtgttgggtccattatcgatcgacccaaatatgttgaatactcagagacaacaggtacagattctgctacaggagtttgctacgcgaaagcctcagtacgaacaattaacagcagctggacaaggcatcctctcccgacccggcgaggacccatcgctcagaggtatcgtgaaggagcagctcgctgcggtgactcaaaagtgggacagtctgaccggtcagctaagcgatcgatgtgattggatagaccaagcaatcgtgaaatctacacagtaccagtctcttctgcgctcattgtctgataaactgtcagatttggacaacaagctctcttcatcccttgccgttagcactcatcctgatgccatgaaccagcaactggaaaccgctcagaagatgaaacaagagattcaacaagaaaagaaacagataaaagtcgcccaagcactctgtgaggatctttcggctctcgtgaaagaagagtacctaaaggcagaactttctcgccagttggagggaatacttaagtccttcaaagacgtggagcaaaaggccgagaaccatgttcagcacctacagtccgcctgcgcctctagtcaccaatttcagcagatgagccgagactttcaggcttggctggataccaagaaggaggagcagaacaagtctcacccaatatcagcaaaactggacgttttggagagcttgattaaggaccacaaggacttctcaaaaactctgaccgctcaaagtcacatgtacgagaagaccatcgctgagggagagaacctcttactgaagacccagggcagtgagaaagccgccttacaattacagctcaatactattaaaaccaactgggataccttcaataaacaagtgaaggaaagggaaaacaaactcaaggagtcattggagaaggcattgaagtacaaagagcaggttgagacactgtggccatggattgacaagtgccaaaacaacttggaagaaatcaagttctgtctggacccagctgagggcgagaactcgatcgcaaaactcaagtctctccagaaggagatggatcagcacttcggcatggttgagctgcttaataacaccgctaactctttgctctcagtgtgtgagatcgacaaggaggtggtaacagacgagaataagtccctcatccagaaagtggatatggtgacagaacagttacactcaaagaagttttgcttggaaaacatgactcagaagttcaaggagttccaggaggtgtcaaaggaaagtaagaggcagctccagtgcgccaaggaacagctagacattcatgacagcctcggatcacaggcctattcaaataaatacttgacaatgctgcagacccagcagaagtcgcttcaagctttaaagcaccaggtcgatttggcaaaacgactagctcaggacctcgtggtggaagctagtgacagcaagggtacaagcgacgtcctgctgcaggtggagaccatagcgcaagagcacagcacactctctcagcaagtcgatgagaagtgttccttcctcgaaactaagctccagggcatcggtcactttcaaaacacgattcgcgagatgttcagccagtttgccgagttcgacgacgaactagactctatggcgcccgtgggaagagatgcagagacactgcagaaacagaaggagacgatcaaagctttcctgaaaaaactggaggctctgatggccagtaacgataacgccaataagacgtgcaagatgatgctcgctactgaggagacatccccggatctggttggcattaagcgggacctagaggctctatccaagcagtgcaacaagttactcgatagagctcaagcccgcgaagagcaagttgaaggcacaattaaacgattggaggagttttatagcaagctgaaggaatttagcattctattgcagaaagcagaggagcatgaggaaagccaaggacccgtcggcatggaaacggaaaccattaaccagcagctgaatatgtttaaggtgtttcaaaaagaagaaatcgagcctctccagggcaaacagcaggatgtaaactggctgggtcaggggctcatccagtctgccgctaagtcaacctccacgcaaggccttgagcatgatttggatgacgtgaacgcaagatggaagactctaaacaagaaggtggcccaacgtgcagcacaactgcaagaagccctgctgcactgtgggagattccaagacgccctggagtcactgctcagctggatggtggatacagaagaactcgtggcaaatcagaagcccccttctgccgagttcaaagtcgttaaagcgcagatccaggagcagaaattgttacagcgactcctggacgacaggaagtccactgtggaggtcatcaaacgggaaggagaaaagatagcaacaactgctgagccagccgacaaagttaaaatcttgaagcagctttcccttctggatagtaggtgggaggcattgctgaataaagccgagacgcggaaccggcaacttgaaggaatttctgtggtggctcagcagtttcacgagactttagagcctctcaacgaatggttgacgacgattgagaagcggctggtaaactgcgagccaattgggacccaagcgagcaagctggaagagcagatcgctcagcataaagccctcgaagacgacataatcaatcataataaacacctgcatcaggctgtttctataggccagagcctgaaagtgcttagcagccgggaggacaaagatatggtccagagcaagctggatttctcacaggtgtggtatatcgaaatacaggagaagtcgcactcccggagtgagttactgcagcaggccctgtgcaatgcgaaaattttcggcgaggacgaagtggaactcatgaattggctgaacgaagtgcacgacaagctgagcaagctgtccgtgcaggactactcaacggagggactgtggaagcaacagagtgagctacgggtgctgcaggaggacattctgctgcggaaacagaacgtagatcaagctctgctaaacggtctggagctcctgaagcagacgactggagacgaagttctgatcatccaggacaagctggaagcaattaaagccaggtacaaagacatcaccaagctgagcaccgacgtggccaaaacactggaacaggcactccagctggcacgcagattacacagtactcatgaagaactgtgtacatggttggacaaggttgaggtggagctcctctcatacgagacccaagttttaaagggtgaggaagcttctcaagcacaaatgagacctaaggaactgaagaaggaggcgaagaataataaggcgctactagattctctgaacgaggtcagcagcgctctgctggagctggtgccatggcgagctcgggagggcctcgagaaaatggtggccgaggataatgaacgatatcgcctagtgtctgatactataacccagaaagtggaagagatcgacgccgccattctgcgaagtcagcagttcgatcaggctgcagacgcagaactgtcctggataactgaaaccgaaaaaaagctgatgagtctaggcgacatcaggttagagcaggatcaaacgagtgcccaactgcaggttcaaaagaccttcaccatggagatcctgcgacataaagacatcattgatgacttggtgaagagtggccacaaaataatgaccgcttgcagtgaggaagaaaaacagtcgatgaagaagaaattggataaagtgctaaagaattacgataccatctgccagatcaatagtgaacgatatcttcagctggagcgagcccaatcattagttaatcagttctgggaaacttacgaagaactatggccatggctcacagaaacgcagtctatcataagccagctgccggctcccgctctagaatatgaaacactgcgtcagcaacaggaggaacaccggcagctgcgcgagctcatagccgagcacaagccccacattgacaagatgaataagaccggccctcagctcctggagctgtccccaggcgagggcttttcaattcaggagaagtatgttgccgccgacaccctgtatagtcagattaaggaggacgtgaagaaaagggcggttgcactggatgaagctatcagccagtccactcaattccacgataagatagatcaaattcttgaaagcctggaacgcatcgtggagcgactgaggcagcctccttcaatttccgcggaggtggagaagattaaggaacagatttcggagaataaaaacgtatccgtagatatggaaaagttacagccactgtacgaaacgctgaagcagcgcggagaggaaatgatagcgcgttcgggagggacagacaaggacatatccgctaaagccgtccaggataagctggaccagatggtgtttatctgggaaaacatccacacccttgtggaggagcgcgaggcgaagcttctggatgtgatggaactggccgaaaaattttggtgtgaccacatgtcactcatcgtgacaattaaggacacacaggattttattagggacctcgaggaccctggcatcgacccatcggtggttaaacaacagcaggaagctgctgagaccattcgcgaggagattgacggtctgcaagaggagctggatattgttatcaatctggggtcagaactgatcgctgcatgcggagaacccgacaagcccatcgtcaaaaagtccatagatgagctgaactctgcctgggacagcttgaacaaagcatggaaggaccgcatcgacaagctggaggaggccatgcaagcagccgtccagtaccaggatgggctgcaggcagtgttcgactgggttgacatagcgggtggcaagcttgctagcatgtcccccatagggaccgacctcgaaactgtcaaacagcagattgaggagctcaagcagttcaagtccgaggcctaccagcagcagatcgaaatggagcgtctcaaccaccaggctgagctgctcctaaaaaaagtgaccgaggagtcagacaaacacacagtccaggatcctcttatggagctcaagttaatctgggactcactggaggagagaattatcaataggcagcacaagctggaaggcgcccttcttgctctgggtcagtttcagcacgcactcgatgagctcctggcgtggctgacccacaccgaggggcttcttagcgaacaaaaacctgtagggggagatccaaaggcaatcgagatcgagcttgcaaaacatcatgtgcttcagaacgacgttctggctcaccaaagcacagtggaggcagtgaacaaagctggcaacgacctgatcgagtcctctgccggagaggaggcatcaaatctgcagaataagttagaagtcctcaaccaaagatggcaaaacgtgttggagaaaactgagcagcgcaaacagcagctggatggggccctgaggcaagctaagggatttcacggagagatcgaggatctccagcagtggctgacggataccgaacggcatctgttagccagcaaacctctgggtggactgcccgaaactgcgaaggaacagttgaatgttcatatggaggtctgcgccgcttttgaggctaaggaggagacttataagagccttatgcagaaaggccaacagatgcttgcacgatgtccaaagtccgccgagactaatatcgatcaggatatcaataacctcaaggagaaatgggagtcggtggagaccaagctcaatgaacggaagacaaagctcgaagaggcccttaatctggctatggaattccacaacagtctgcaggattttatcaactggctgacacaagcagaacagaccttaaatgtggctagtagaccgagcctgattttggataccgtactgtttcaaattgacgaacacaaagtctttgccaacgaggtgaactcacaccgggaacagattatcgagcttgataaaacaggaacccatctgaaatatttctcccagaagcaggacgttgtgctcattaagaatctgctgataagtgtgcaatctcggtgggaaaaagtcgtgcagagattggtggagaggggtaggtctttggatgacgcccggaaaagagcaaaacagtttcacgaggcgtggagcaagctgatggaatggttagaagagtccgaaaaatccctggatagcgagctagagatcgccaatgatcctgataagataaagactcagcttgctcaacacaaggaatttcagaaatcccttggagctaaacactcagtctacgatacaacaaacaggaccggaagatcccttaaggaaaagacatctctagccgacgacaacctgaaacttgacgacatgctcagcgaactgagagacaagtgggataccatttgcgggaagtctgtggaacggcagaataaactcgaggaagcccttttattctctggacaatttactgatgcattacaggctttaatcgactggctttaccgcgtcgaaccccagctcgctgaagatcagccagtccacggcgacattgacttagtgatgaaccttatagataaccataaggcctttcagaaagaactggggaaacggaccagcagtgtccaggccctgaagcgcagcgcccgggagctcatagagggcagccgcgatgacagttcctgggtcaaggtgcagatgcaggagctgtccacccggtgggaaacagtgtgcgccctgagcatctctaagcagactagactggaagctgctctgaggcaagccgaagagttccattccgtggtccatgccctgctggagtggctggccgaagctgagcagacattacgcttccatggggtgctccccgatgatgaggatgctctgaggacactcatcgaccagcacaaggagtttatgaaaaaattggaggaaaagagagccgagctgaataaggccacaactatgggcgacaccgtcctggccatctgtcaccccgattctatcacaacgattaagcattggatcaccataattcgggccagattcgaagaagtcctcgcctgggctaagcagcaccagcagcgcctcgcatcggccctcgcaggtctaatcgctaaacaggaactactggaggcacttcttgcttggcttcagtgggcagagacaacactgaccgataaggacaaggaagtcataccccaagagatagaggaggttaaggccctgatagccgagcaccagaccttcatggaagaaatgacccgcaaacagcctgacgtggataaagttactaagacctacaagcggcgggccgctgatccatcctctctgcagtcccacattcctgtgctcgataaggggcgcgctgggcgaaagcgatttcctgcaagcagcctgtatccaagtggaagccagacgcaaattgagacaaaaaacccacgcgtcaatctactggtgtctaaatggcagcaggtctggctgctcgccctcgagagaaggcgaaaactcaatgacgcccttgatcggctcgaagaattgagagaattcgctaatttcgatttcgatatatggcgtaaaaagtacatgaggtggatgaatcacaagaagagccgcgtgatggactttttcagacgcatcgataaggaccaagacgggaagattaccagacaggagttcatcgatgggatcctttccagcaagttcccaaccagccggctcgagatgagtgctgtcgccgacattttcgatcgtgatggggacggatacattgactattatgagtttgtggctgcactgcaccctaataaggatgcctacaagccaattaccgacgccgacaagatcgaagacgaagttactcgccaggtggctaaatgtaaatgcgcgaaaagatttcaggtggagcaaatcggtgacaataagtacagagtgtccttccagagtaattttggtgactcccagcagctccgactagtgcgcatcctcagatcaacagtaatggttagggtgggaggagggtggatggccctcgatgaatttcttgtcaaaaatgatccttgtcgcgtacaccatcacggaagtaagatgcttagaagtgagtcaaactcgagtattaccacaactcagcctaccatcgcgaaggggcgcaccaatatggagctaagagaaaagttcatcctcgccgatggcgcgagccaaggcatggcagccttccggcccagagggcgccgctcccgcccaagctccaggggcgcctcaccaaacagaagtacttcggtgagctctcaggctgcccaggccgcttctccacaggtgcccgctacaacaactccgaagggtactccgatacagggctctaagcttcgccttccggggtacctgagcggcaagggcttccattcaggtgaagattcggggttgattaccacagctgcagcccgcgttaggacgcagttcgcggactcaaagaagaccccctcaagaccaggctcgcgcgctggctcaaaagccggaagccgcgcaagctcacgaagaggcagcgacgcaagcgattttgacatctccgaaatccagtccgtgtgtagcgacgtcgagactgtcccacaaacccaccggcctactccaagggccgggagccggccatcaaccgccaagccctccaagattcctacccctcagcgcaaatcccccgccagcaagctcgacaaatcttctaagcggtag

SEQ ID NO: 269257 - DNA, 22719 bp, Artificial Sequence
  derived and/or modified sequence
atggccggatatctttcaccagcggcatacctgtacgtcgaggaacaggagtacctccaagcatacgaggacgtgcttgagagatataaggatgagagagacaaagtgcagaagaaaactttcacgaaatggatcaaccaacacctgatgaaggtaagaaaacatgtgaatgatctgtacgaggatctcagggatggacacaatttaatcagcctgctggaagtgctgtcaggagataccctgccccgagagaagggtaggatgcgcttccatcgcctgcaaaacgtgcagattgccttagactacttgaagaggaggcaggtcaaactggtgaatatcagaaatgacgatattaccgatgggaacccgaagctcaccctaggactgatttggaccatcatcctgcactttcagattagtgatatacacgtgacaggcgagtccgaagatatgtcggctaaggagcgactgctgctgtggacccagcaggcaacagagggatacgccggaatacgatgcgagaatttcactacatgttggagagacggtaaactctttaacgcgattatccataagtaccggccagatctcatcgatatgaacactgtcgcagtgcaatcaaacctcgcgaatctcgaacatgcattttatgttgccgaaaagataggagttatccgattgctggatcctgaagacgtggacgtcagctctcccgacgagaagtcagtgataacatatgtatcatccctgtacgatgcttttccaaaggtgcccgaagggggtgagggcataggcgctaatgatgtcgaggtgaagtggatcgagtaccagaatatggtgaactatctgatccagtggatccgccaccacgtgacaacaatgtcagagcggacattccctaataaccccgtcgaacttaaagccctgtacaaccaatatctccagttcaaggagactgagatccccccaaaagagacagagaaatcaaaaatcaagcgactgtataaactgctggaaatatggatagagttcggtagaatcaaattactgcagggctaccaccccaatgatattgaaaaggagtgggggaaactgattattgctatgctagaacgggagaaggccctcaggcccgaagtggaacgccttgagatgctgcaacagattgcaaaccgtgtccagagagactcagtcatctgcgaagataagctcatcctggctgggaatgctctccagtccgattcaaagcggctagagtccggagtacagttccagaacgaagccgagatcgccggatatatcctggaatgtgagaatctgcttagacagcacgtcattgatgtccaaatcctgattgatggaaaatactaccaagctgatcaactagtacaacgcgtcgccaaactgcgcgacgaaataatggcgctccgaaacgagtgttcctcagtttacagtaagggacggattctaactaccgagcagactaagcttatgatcagcggaattactcagtctctgaactccggcttcgcccaaaccctgcacccgagcctgacttccggcctgacacagagcctgacaccaagcctgacctccagctctatgacgtccggattaagtagcggaatgacatctcgccttactccctccgtcaccccagcttacacacccggttttccctctggtctggtgcccaacttttctagtggggttgaaccgaatagcctacagacattaaaattaatgcagattcgcaagcccctgctgaaaagttctctgctggaccagaatctgacggaggaagagattaacatgaaattcgtgcaggacttgttgaattgggtcgacgaaatgcaggttcagctcgatagaacagaatgggggtcagacctcccctcagtggagtcccatctcgaaaatcacaagaacgtgcaccgcgctatagaagaattcgaaagcagcctcaaagaagccaagattagcgagatacagatgaccgcccctctgaagctcacttatgcagagaagctgcatagacttgaatcccagtacgccaaactgctcaataccagtagaaatcaggaacggcatctcgacactctgcacaacttcgtgagtcgcgcaacgaatgaattaatctggctcaatgaaaaggaagaggaggaggtagcatacgattggtctgagaggaacacgaacatcgctcgcaaaaaagactatcacgcggaactgatgagggagctggatcagaaagaagaaaatataaaaagtgtgcaggagatcgccgagcagctcttattggaaaatcacccagccagactgacaattgaggcctacagggctgccatgcagacccagtggtcttggattctgcagttatgtcaatgcgttgagcagcacatcaaagaaaacaccgcctatttcgagttcttcaatgatgctaaggaggccacggattaccttagaaacctgaaggacgccatccagcgcaagtactcatgtgataggtcaagcagtatccacaaactggaggacctggtgcaggaatctatggaggagaaggaggagctgctgcaatacaaaagcacgattgccaatctgatgggcaaggcgaaaaccataattcagctgaagcctagaaactccgattgccctttgaaaacctccatacccatcaaagctatttgtgattacagacagatcgagataacgatttacaaggacgacgagtgtgttcttgccaacaacagtcaccgtgccaagtggaaagtgataagccccaccgggaacgaagctatggttccttcagtctgctttaccgtccccccacccaataaagaggctgtcgacctcgcgaaccgaatcgaacagcagtatcagaatgtgttaaccctgtggcacgagtcccatatcaatatgaaaagcgtcgttagctggcactaccttattaacgagatagaccgaattcgcgcaagtaatgttgcctctattaagaccatgttgccaggggagcatcagcaagtgctcagcaatcttcagagcagattcgaagattttttggaagacagccaggagtctcaggttttttcaggcagtgacattactcagctcgagaaggaagttaatgtgtgcaaacaatactatcaggaacttttaaaaagtgcagaaagagaggagcaggaagagagcgtgtacaacttgtatatttctgaagttcggaatatccgcctgaggctggagaactgcgaggatagactgataagacagattcgtacccccctcgagagggatgatttgcatgagagcgtcttccggatcaccgaacaggagaaactgaaaaaggaactcgaaagattgaaggatgatcttggaactataacaaataagtgcgaagaattcttctcgcaagctgcggcatcctcctctgtacccaccctaagatccgagcttaatgtggtgcttcagaacatgaatcaggtgtacagcatgtccagcacctacatagataaactgaaaaccgtcaacctggttctcaagaacacccaggctgcagaagccctggtaaagctatatgagactaagctgtgcgaggaggaggctgtaatcgccgataagaacaatatcgaaaatttgattagcaccttaaaacagtggcggtccgaagtcgatgagaagcggcaggtgtttcacgcattggaggatgagttacaaaaggctaaggcaattagtgatgaaatgtttaagacttacaaagagagagaccttgattttgactggcacaaagagaaagccgatcagctcgttgaacgatggcagaatgtgcatgtccagattgacaacaggcttagagatctcgaagggatcgggaagtctttgaagtattacagggatacataccaccctctggatgattggattcagcaggtggagacgacccagcgcaagattcaggaaaatcagcctgagaactctaagacgctggccacccaactgaaccagcaaaaaatgcttgtcagcgaaattgagatgaaacagtccaagatggatgagtgtcagaagtatgctgagcagtacagtgccactgtgaaggactacgaacttcagacaatgacctaccgcgctatggtagactcacagcagaagagtccggtgaagcgtaggcggatgcagtcaagcgcagatttgattattcaggaatttatggacctgcggactcgatacaccgccttagtgacgctgatgactcagtacatcaagttcgccggagacagccttaaaaggctggaggaagaagagaagagcttagaagaggagaagaaagagcacgtggaaaaagccaaggaactgcagaaatgggtctcaaacatctccaaaactctgaaagacgccgagaaagcgggaaagccgccatttagtaagcagaagattagcagcgaggagatcagtaccaagaaggagcagctctccgaggcacttcagacaatacaactgttcctggctaagcacggagacaaaatgaccgacgaggagcggaacgagttagagaagcaggttaaaactctccaggagtcatataatctgcttttctcagaatccttgaaacagcttcaggagtctcaaactagcggcgacgtgaaagtcgaagaaaaactcgacaaggtcattgctggcacgattgaccagactacgggcgaggtgctatccgtgttccaggccgttctgaggggcctgattgattacgatacagggattagactgcttgagacacaattaatgatctctggcctcatttctccagagctgcgcaaatgttttgatttgaaggatgcaaaatctcatggtctgatcgatgagcagattctctgtcaactgaaggagctcagcaaagccaaagaaatcataagcgccgcttcacccactacaatacccgtcctggacgccctagctcagagcatgatcaccgaatcaatggctattaaggtgctcgaaatcctcctgtcaacaggcagcttggtgatcccagcgactggggagcagctgaccctccagaaagcctttcagcagaacctcgtcagctccgcactcttcagtaaggtgctggagaggcagaatatgtgcaaagatttaatagacccgtgcacgtccgaaaaggttagcttaatagatatggtgcagaggtccacactccaagaaaatactggaatgtggctgctcccagtccgtccccaagagggcggtaggattaccctcaaatgtggtcggaatataagcattctgagagctgcccacgaggggctcatcgaccgggagaccatgtttcggctgctttctgctcaactgctttcaggaggtctaataaactcaaacagcggccagaggatgactgtggaggaggctgtgagagaaggagttatcgatagggataccgcttcttccatactcacttaccaggtacaaacaggtggaataattcagagtaatcccgctaaacgcctgaccgttgatgaggccgtgcagtgcgatttaatcacttcctcttctgcattgcttgttctggaagcccagagagggtacgtgggcctgatctggcctcactcaggcgaaattttccctacaagttccagtttacaacaagagcttataacgaacgagctggcgtacaagattttaaatggcagacagaagattgcggcactgtatatacctgagtccagccaggtgatcggcctggacgccgcaaaacagctcggaattattgacaataatactgcgagcatcctcaaaaatattaccctcccggataagatgccagaccttggcgatctcgaggcttgtaaaaatgcgcgtcggtggcttagcttctgtaagtttcagcctagtacggtccacgattaccggcaggaggaagatgttttcgatggcgaggagcctgtgaccacccagacctccgaagaaactaaaaagttattcctgtcataccttatgattaatagctacatggacgccaacacaggccagcgtctcttattgtacgatggagacctcgatgaggctgtggggatgctcctggagggatgccatgcagagttcgatggtaacacagcgatcaaagagtgtctagatgtgctaagttcttcgggggtttttctaaataacgcttcgggcagagagaaggacgagtgtactgctacacctagcagcttcaacaagtgtcactgtggcgagcccgaacacgaggaaacacccgagaatcgaaagtgcgccatcgacgaggagttcaacgagatgcgcaacacggtcatcaattctgaattttctcaatcgggaaagctggcaagtacaattagtatcgaccctaaagttaactctagtccttccgtctgtgtgccgtctctgatttcctacctgacacagactgagctggccgatatatccatgttgcggtccgatagcgaaaatattctgacaaattacgaaaaccagtcacgggttgaaactaacgaacgggctaatgagtgctctcattcaaaaaacatacagaatttcccttctgacctcatcgaaaacccgattatgaaaagtaaaatgtcaaagttttgcggcgttaatgagaccgagaacgaggacaataccaatcgggacagcccaatatttgactattcacccaggctgtccgcgcttctaagccacgataagctgatgcactcacaaggaagctttaacgacactcacacacccgaatctaatggaaacaaatgcgaggcaccggcactatcgtttagcgataaaacaatgctgtctgggcaaagaattggcgaaaagttccaggatcaatttctggggattgccgctataaacatcagtcttcccggtgagcaatatgggcagaagagtctgaatatgattagtagcaatcctcaggtccagtatcacaacgataaatacatcagtaatacatccggagaagatgaaaaaacccatccaggtttccaacagatgcccgaagacaaggaggatgagtccgagatcgaagaatacagctgcgctgtgacacctggcggagataccgataacgccattgtatccttaacttgtgctactcccctcctagacgaaacgatctcagcaagtgactacgagacaagccttctcaatgatcaacagaacaacaccggtacagacaccgactcagacgacgatttctacgatacgccactgtttgaagacgatgatcatgatagtctattactcgatggtgacgatagagactgcctgcaccccgaggactacgacaccctgcaggaggaaaatgatgagacagcctcgccagccgacgtattctacgatgtgagtaaagaaaacgagaacagtatggtacctcagggtgccccagtgggctcattgagtgtgaagaacaaagcgcactgcttgcaggactttttaatggacgttgaaaaggacgagctcgatagcggagagaagatacatttaaaccctgtcggcagcgacaaagtgaatggacagagtctcgagaccgggtctgaaagggaatgcaccaacattctggagggggacgagtctgattccctgactgactacgatatagtgggtggcaaagaaagcttcaccgcatcactgaagtttgatgatagcggcagctggcggggacgcaaagaggagtatgttacggggcaggaattccattctgatacggatcaccttgattcaatgcagagcgaagagtcctatggcgactacatctacgactccaatgatcaagacgatgatgatgacgatgggatcgacgaggaaggaggtggcattcgcgacgagaatggaaaacctagatgccagaatgtagcagaggatatggatatccagttgtgtgcctccatactgaacgagaacagcgatgagaacgaaaacatcaataccatgatcctgttggataagatgcactcctgttcctccctcgaaaagcagcaaagggttaatgtggtacagctcgcttcgccatccgagaacaacctcgtcactgaaaagtcaaacctgcccgaatacaccacagagatcgcgggtaagagtaaggaaaatctgctgaatcacgagatggtgttgaaagacgtcttgcctccaattattaaagatacagagtcagaaaaaaccttcggaccagcctcaatcagccacgacaacaacaacattagcagcacatccgaactgggtaccgaccttgctaacactaaagtaaagttgattcaggggtctgaactgcccgagttgactgacagcgttaagggcaaggatgaatacttcaagaacatgactcctaaggtggattcttccttggatcatattatctgcacggagccagacctgattggaaagccagcggaagagtcacacttatccttgatagcttccgttactgataaggacccacaaggtaatggttccgacctgatcaaaggcagagatggcaaatccgacatcctcatcgaagatgagacctcaattcaaaaaatgtacttaggagagggggaagtgctggtcgaggggttggtggaggaggagaatcgtcacctcaaactgctacccggaaagaacacaagggactcatttaaactgattaattcccagttcccttttcctcagatcaccaataatgaggagctgaaccagaaagggtctctcaagaaggccaccgtgacactgaaagacgagcctaataatctacagattattgtctcaaagtcccctgtgcagtttgagaatcttgaggagatttttgacacgagcgtcagcaaagaaatttctgatgacattacttcagacattaccagctgggaaggcaacacccattttgaagaatctttcaccgacggaccagagaaagaactggatctcttcacctacctcaagcactgtgctaaaaacatcaaagccaaagatgtggccaaacctaatgaggacgtgccatcacatgtattaatcacagcccctcctatgaaagaacatctgcagttaggagtcaacaatacaaaggaaaaaagtacgtctacccagaaggacagccccttaaacgacatgattcagtcaaatgacttatgcagtaaagagagcatcagcggcggagggacagagattagtcaatttactccggagtccatagaagcaacactgagcattttgtccagaaaacatgtggaggacgtaggtaagaacgatttcctacagtctgagcgctgcgcgaacgggctggggaacgacaactcgtcaaacactctaaatactgattactcctttctagagataaataacaagaaggagagaatcgagcagcagctgccaaaggaacaggctctgtctccaaggtcacaggagaaggaggtgcaaatccctgagctgtcccaggtgtttgtggaagatgtaaaggatatcctgaagagtcggctgaaagaaggccacatgaacccacaggaggtcgaagagccatcagcatgtgcggacacgaaaattctcattcaaaatctcattaaaaggataaccacctctcagcttgtgaatgaggcttccaccgtgccatccgatagtcagatgtccgattcaagtggggtttcacccatgaccaactcctctgagctcaagcccgagagtagggatgatccattttgcatcggcaacctgaagagcgagctcctcctaaatatcctgaagcaagaccaacactctcagaagatcacaggggtctttgaactgatgcgtgagctgacacacatggaatatgatctcgaaaagcggggaatcacctctaaggtgctgccactgcagttggagaacattttctacaagcttttagccgacggatattcagaaaaaatcgaacacgtgggcgatttcaaccagaaggcatgttcaacgagcgaaatgatggaggagaagccccatatccttggcgatataaagtctaaggagggaaactattattcacccaacctcgaaacagtgaaagaaattggcctggagagttctactgtgtgggcctccactctccccagggatgagaaattgaaggatttgtgcaatgacttcccctcccatctggaatgtacttctgggagcaaggagatggcatcaggcgatagctccacagagcaattctcatctgaactccagcaatgtctgcagcatactgagaaaatgcatgagtatctgactctgctgcaggatatgaaacctccactggataatcaagaatccctggataataatctggaagcccttaagaaccaattacggcaactcgagacttttgagctggggttagcccctatcgccgtgatccttaggaaagacatgaagctggccgaggaatttctcaagagcctgcctagcgacttccctaggggccacgtggaggaactcagcatatcccatcaatccttaaagacagcattcagtagccttagtaacgtgagttcagaaaggactaaacagattatgctagccatcgattctgaaatgagcaagctggctgtgagccacgaggagtttctacataagctgaagagcttcagtgactgggtgagcgagaaaagcaagtccgtgaaggacatcgagatcgtcaacgtgcaggattccgagtacgtgaaaaagcgactagagtttttaaaagccaacaatgtgctcaaagatctgggacacaccaaaatgcaacttgaaaccaccgccttcgatgtccagttctttatatccgaatacgcccaggatctctctccaaatcagagcaagcagctcctgaggctgttgaacaccactcagaagtgttttctggatgtgcaagagtcagtcactacccaggttgagaggctcgagacccagctccacttggagcaggatctggacgatcagaagattgtcgccgagcgccaacaggagtataaggaaaaattacagggcatctgcgaccttttgacgcagacagagaaccggttaatcgggcaccaggaagcatttatgattggagatggcactgtagagttgaaaaagtaccagtccaagcaggaggagctccaaaaagacatgcaaggctcggcacaggccctggctgaagtagtgaagaataccgagaattttctgaaggaaaatggggagaaactgtcacaggaggacaaagccctaatcgagcagaagctcaatgaggctaaaatcaagtgtgagcaactgaacttgaaggccgaacagtcaaaaaaggagctcgacaaagtggtgaccactgctatcaaggaggagaccgaaaaggtggcagccgtcaagcagcttgaggagagtaagacgaaaattgagaatttactggattggctctctaatgtggataaggatagtgaaagagcgggaaccaagcataaacaggtcatcgagcagaacggtactcactttcaggaaggtgatgggaagtccgcgatcggcgaggaggatgaggtgaacgggaatctgcttgagacagacgttgatggtcaagtcgggacaacccaagagaatctgaatcagcaataccagaaggtaaaggcccagcacgaaaagattatatcccagcatcaggcggtgattatcgctacccagtctgcgcaggtcctccttgagaagcagggccagtacttaagccctgaggaaaaagagaaacttcagaaaaacatgaaggagttgaaagttcactatgagaccgcgttggcggagtcggaaaagaagatgaagctgacgcactctctacaagaggaactggaaaagttcgacgcggactacacagagttcgagcactggctgcagcagagcgaacaggagcttgagaatttagaggctggagccgacgatatcaacggtctcatgaccaagctcaaaaggcagaagtccttcagcgaagacgtcatctctcacaagggcgatctgcgctatattaccatttctggaaatagggtgctcgaggccgctaagtcgtgttcaaaacgcgatggaggtaaagtagacactagcgcaacacacagggaggtccagaggaagctggatcacgcaacggacaggtttagaagtctatacagcaaatgtaatgtgctcggaaataacctgaaggatctcgtagacaaataccaacattacgaggatgcgagttgcgggttgttggccggtctacaagcgtgcgaagcgactgcatccaagcatctgagcgaacctatagcagtggatcccaaaaacctgcaacggcaattagaagaaactaaggccttgcagggacaaatctcgagccagcaagtagcagttgaaaaattaaaaaaaacagccgaggtcctgctcgacgccaggggtagcctgttaccagccaaaaacgatatccaaaagactttggatgacattgtcggtcggtacgaagatctgtctaagagtgttaatgaacgcaacgagaaacttcagataaccctcacgaggagcctcagcgtccaggacggcctcgatgagatgcttgattggatgggcaacgtggaatctagtctcaaggagcagggacaggtgccactcaactccacagccttgcaggatatcatatcgaagaacatcatgcttgaacaggacatagccggtaggcaatccagtatcaatgcaatgaacgagaaagtcaaaaagttcatggagactacagacccatctacagcctccagccttcaggcaaagatgaaggatttgtccgctaggttttcagaggcttctcacaagcataaagaaacgttggcgaagatggaggaattaaaaacaaaagttgaactctttgaaaacctgtctgaaaagttgcagacatttctggaaacaaaaacccaggcgctgaccgaagtagatgtgcccggaaaggacgtaacagagctctctcagtacatgcaggagagcacttcagagttcttagagcacaagaaacacctggaagttctgcacagcctgctcaaggagataagcagtcacggcttacccagcgacaaggccttggttctagagaagaccaacaaccttagtaaaaagtttaaggagatggaagacactatcaaggagaagaaggaagctgtcacaagttgtcaggaacaacttgacgcgttccaggtgctagtcaagtcgctcaaaagttggatcaaggagacgacgaagaaggtgccaattgtccagcccagcttcggcgctgaggatctgggcaaatccctggaggacacaaagaaactgcaggaaaagtggtcactgaagacacccgaaatacagaaggtgaacaactccggaatctccctctgtaacttgattagtgccgtcaccaccccagcaaaggccatcgcggctgtgaagagcggaggagccgtcttgaacggcgaggggacagcaaccaacactgaagagttttgggcaaacaagggccttacctctatcaagaaagatatgactgatatttcccatggctatgaggatctcgggctgctgctcaaagataagattgctgaacttaacacaaagctgtccaaactgcagaaggcccaagaggagtcctccgccatgatgcagtggctgcagaaaatgaacaaaacagccactaagtggcaacagacccctgcacctacggacaccgaagccgtgaagacacaggtggagcagaacaagagcttcgaggcagagctgaaacagaatgtgaacaaggtgcaggaactcaaagacaagttgacagaactattagaagagaaccccgatacccccgaggccccacggtggaaacagatgttgaccgaaattgattcaaagtggcaggagttgaaccaattgaccatcgatcgacagcaaaagttggaggagagttctaacaacctcactcaatttcagacggtcgaggcacagctgaaacagtggttagtcgagaaagagctaatggtcagcgtgcttggccctctaagtattgaccctaatatgcttaacacccaacggcagcaggtgcagattctgcttcaagagtttgccacaaggaagccccagtacgaacaattgactgcagccggacagggcatattatcaagaccgggtgaggatcctagtctgcggggaatcgtgaaagagcagcttgccgctgttacgcagaagtgggattccctgaccggacagttgtcagacagatgtgactggattgatcaagctatcgtcaaaagcacccagtaccagtcactgctccgttcactgtccgataagctaagtgacctggataataagctttccagcagcctggccgtgtccactcacccagacgctatgaatcagcagcttgaaaccgcacagaaaatgaagcaggaaattcaacaggagaaaaagcagattaaagtggcccaagccctctgtgaagatctgtccgcacttgtgaaagaggagtacttgaaggcagaactgtcacggcagctggaggggatactgaagagttttaaggatgtggagcagaaggcagaaaatcacgtgcaacacttacaaagtgcatgtgccagctcacaccaattccaacagatgtctcgtgattttcaggcatggctagatacaaaaaaagaggagcagaacaaatctcatccaatatcagccaagttagacgttctagagagtctcataaaagatcataaggacttctctaagactcttaccgcccagtcacacatgtacgagaagaccatagctgagggagagaacctgctgctcaaaacgcaaggaagcgagaaagcagcactccaactccagctgaatactatcaaaaccaactgggatacgtttaacaaacaggtgaaggagcgggagaacaagctcaaggagtcgctggagaaagcgctcaaatacaaagaacaggtagaaaccctctggccctggattgacaagtgccaaaataatctcgaggaaatcaagttttgtctggacccagccgagggggaaaactccatagcaaaactgaaatctctgcagaaggaaatggaccagcattttggcatggtggagcttctgaacaataccgcaaacagcctgttgtcagtttgcgagattgacaaagaggttgtgacggacgaaaacaagtctcttatccagaaggtggatatggtgaccgaacagctgcacagcaaaaagttttgtttagaaaatatgacccagaaattcaaggaatttcaggaggtatcaaaagaatccaagcggcagttgcagtgcgcaaaggagcagttggatatccacgattctctaggatcacaggcgtattctaataaatatttaaccatgctccagacccagcagaaatctctccaagcattaaagcaccaggtggacctggcaaagagactggctcaggaccttgtggtagaagccagcgacagcaaagggaccagtgacgtcctgctccaagtggagacaattgcccaggagcatagcacactttcccagcaggtagatgaaaagtgctcgttcctggaaactaagctgcaggggatagggcatttccagaacacaatcagggaaatgttctcacaatttgccgagtttgacgatgagctggactcgatggctcctgtcggcagggatgctgaaacactccagaagcagaaggagactatcaaggccttcttaaaaaaattggaggcgctcatggcctctaacgataacgcgaataaaacctgtaagatgatgctggctaccgaagaaacttctcccgacctggtgggcatcaagcgtgaccttgaagcactgagcaaacagtgtaataaactcctggatcgcgcacaggccagagaggagcaggtggaagggacaataaagaggctagaggagttttactccaagctgaaagaattttctattctgctgcaaaaggctgaggaacatgaggaatcccagggccctgtgggcatggaaaccgaaactatcaaccaacagttaaatatgtttaaggtttttcagaaggaagagatcgaacccctgcaggggaagcaacaggatgtcaactggttgggccagggccttatccagagcgctgcgaaatctacatctacccaagggctggaacatgacctagatgacgtcaatgctaggtggaaaacacttaacaaaaaagtggcacagcgggctgcccagctgcaggaggcacttctgcactgcggtcggttccaggatgccttggagtcgttactcagctggatggtggatacagaggagctagtggcaaatcagaagccacccagcgctgaatttaaggtcgtcaaggcccaaatccaggagcaaaagcttctccagagactcttggacgaccggaaatctactgttgaggtgataaagagggaaggtgagaagatcgccacaactgccgaaccggcagacaaggtgaagatactgaagcaactgtctctgctcgattcccgttgggaagctttgctgaacaaagctgagactagaaaccggcagctcgagggcatttccgtggtggcccagcaatttcacgagacactcgaaccattgaacgagtggctgacaactattgaaaagcggttggttaactgtgaacccattgggacccaggcatctaagctggaagagcagatagcccagcataaagcgctggaagacgacattatcaatcataacaagcaccttcatcaggccgtgagtatcggacaatcgctcaaggtgctgtcgtctagagaggacaaggacatggttcagtccaaactggactttagtcaggtctggtatatcgaaatccaggagaagagccattcgcgcagtgagctgttgcagcaggcactgtgtaacgccaagatttttggagaggacgaggtggaactaatgaactggttgaatgaagttcatgacaaactgtctaaattatcagtgcaagattacagcactgaaggcctttggaaacagcagtcggaactgcgcgtgttgcaggaagatatactgttaagaaagcagaacgtggaccaagccctgctcaacggtctggagctgctcaagcagacaactggcgacgaggtgttgatcatccaagataagttggaggccatcaaggcccgttataaggatataaccaaactgtctaccgatgtcgccaagacgcttgagcaggccttgcagctagccagacgcctacatagcacacatgaggaactgtgcacttggctagataaggtggaggtagaacttctgagttacgaaactcaggtgctgaagggagaggaagcttcgcaagctcagatgagacccaaggagctgaaaaaagaagctaagaacaacaaggccttacttgacagcttgaatgaggtgtcaagcgcattgctcgagctggtgccctggcgggcacgcgaaggactggagaaaatggtggcggaggataacgaacggtaccgactcgtttcagatacgattacacagaaggtagaggaaatcgacgccgcaattttacggtcacaacagtttgaccaagcagccgacgccgagttaagttggattacggaaaccgagaaaaagttgatgtccttgggggatatccgcctggaacaggatcagactagcgcacagctccaggtgcaaaagacctttacaatggagatactccggcacaaagatataatcgatgatctcgtgaagagcggccataaaataatgacagcatgctctgaagaggagaaacagtctatgaaaaagaagctggacaaggtgctcaaaaactacgacaccatctgccagatcaatagcgaacggtacctgcagcttgagcgcgctcagtctcttgtgaatcaattctgggaaacctatgaagagctgtggccctggcttaccgagacccagtctataatctcccagctcccagccccagccctggagtacgagacactgaggcagcagcaagaggagcatcgccaactacgtgagctcattgccgagcataaaccccacattgacaagatgaataagactggaccacagcttcttgaactcagtccaggcgagggattctcaatccaagaaaaatacgttgccgcagacacactgtactcgcaaatcaaagaagacgtgaagaagagggcggtagctctcgatgaagcgatctcacagtcaacccagttccacgataagattgatcaaattctcgagtctctggaaagaatcgtggaaagactcagacagccaccttccatttcggctgaagtggaaaagattaaggagcagatcagtgaaaacaagaatgtgtccgtcgacatggaaaagctgcagccattgtacgaaaccctcaagcagcggggtgaggagatgattgcaaggtcgggaggcacagacaaggatatcagcgccaaagccgtccaggacaagctcgatcaaatggtgttcatctgggagaatattcacaccctggtggaggaacgagaagctaagttactggacgttatggaactggccgagaagttctggtgcgaccatatgtcattaattgtgacaatcaaggacacccaggactttattcgtgacctggaggaccccggaatcgacccctccgtggttaaacagcagcaagaagcagcagagacgatccgcgaggaaattgatgggctgcaggaagaactggacattgtaatcaatctgggaagtgaactcattgctgcatgtggagagcctgataaacccatagtgaaaaagtccattgatgagttgaattctgcatgggacagtctcaataaagcctggaaagatcgcattgataagctcgaagaggcaatgcaggctgcagtgcagtaccaggacgggttgcaagccgtgttcgattgggtggatatcgctggaggtaagttagccagcatgtccccgatcggcacagatctcgaaaccgtaaagcagcagattgaggagctcaagcaatttaaaagcgaggcctaccaacagcagatcgagatggaacgcctcaaccaccaggccgaactgttactcaagaaagtcacagaggagtctgacaaacacaccgtccaagatcccctaatggaactgaaattgatctgggatagtctggaggagaggataatcaatcgccagcacaaattggagggagcactcctcgctctcgggcaattccagcacgccctggatgagctactagcctggctgacacacacagaaggtttgcttagtgaacagaagcccgtgggtggggaccctaaggccatcgagatcgaattggctaaacaccatgtgctgcagaatgacgtgctcgctcatcagagcacagtcgaggctgtgaacaaagcaggtaacgatttgatcgaatcctcggcgggtgaggaggctagtaacctccagaataaactcgaggtcttgaaccaacgctggcagaacgttctggagaagacagagcagcggaaacaacagctggatggtgccctgcgccaagctaagggttttcacggcgaaatagaagatctgcagcagtggctgacggatacagaacggcacctcttggcatcaaagcctctaggaggccttccagagacagccaaagaacagttgaatgtgcatatggaggtgtgcgccgcatttgaagccaaggaagaaacctacaagagcttgatgcagaaaggacagcaaatgttggcaaggtgccctaagagcgccgagacgaatattgaccaggacatcaacaatcttaaggaaaaatgggaaagcgtcgagacaaagctgaatgagcggaaaacaaagttggaggaggcactaaacttagctatggagttccacaattcactgcaagactttatcaattggttaactcaggccgagcaaacccttaacgtggcctccaggccttctctgatcctggatacagtgcttttccaaatcgacgaacacaaagtgtttgcaaacgaggtcaacagccatcgcgaacagatcatcgaactggacaagactgggacccatctcaagtatttctcacaaaagcaggatgtggtcctaatcaaaaacttgctgatttcagtccagtccagatgggaaaaggtggtgcagagactggtcgaacgaggacgctcgctcgacgatgcgcgtaagcgggctaaacaatttcacgaggcctggtccaaactcatggaatggctcgaagagtcagagaaatctctggacagcgaactggaaatcgcaaatgatcccgacaagattaagacacagctggcccagcacaaggagttccagaaaagcctgggggctaaacactctgtttatgacacaacaaacagaacgggcagatcgctcaaggagaagacaagcttggctgacgataacttaaagctcgacgacatgctgagtgagcttagagataaatgggataccatatgtggtaagagcgtggaacggcagaacaagcttgaggaagctctgctgttcagcgggcagtttaccgatgctttgcaagctctgatagattggctctacagggttgagccacaactcgctgaggatcagccagtgcacggggacatagatctggtgatgaaccttattgataaccacaaggctttccaaaaggaattgggcaaacgtacctcttccgtgcaggcgctcaaaaggagcgctcgagaactgatagaggggtctcgtgatgactccagttgggtgaaggtgcaaatgcaggaactgtccactagatgggagacagtatgtgctttgagtatcagtaaacagactaggcttgaagccgcactgcgtcaggctgaagagttccacagcgtagtgcacgccctgttggaatggctggctgaggccgagcagaccctacgatttcacggggtgctgccagacgacgaggacgccctacgaacacttatcgaccagcacaaagaattcatgaagaagctcgaggaaaaacgggcagaactgaataaggcaaccaccatgggggacacagtgctggctatatgtcaccctgattctattaccaccataaaacattggatcactatcattagagctaggttcgaagaggtgctggcttgggcaaagcagcaccagcagcgattggccagcgccctcgccggactgattgctaagcaggagctccttgaagccctgctggcctggctgcaatgggcagaaactacactgactgataaggataaagaggtcatccctcaggagatcgaggaagtaaaggccctaatcgctgagcaccagacatttatggaggaaatgacaagaaagcagcccgatgtggacaaggttactaaaacctataagcgccgagcagccgacccttctagcttgcagtcccatatacctgtgttagataaaggcagagccggacgcaagcggttccccgcatcaagcctgtacccatcgggcagccagacccagatagagaccaagaatcccagggtaaacctgctggtttccaaatggcagcaggtgtggctactcgctctggagcgcaggaggaagctgaatgacgcgctggaccggttggaggaacttagagaatttgccaattttgacttcgacatctggcgcaagaagtatatgagatggatgaaccacaagaagtctagagtgatggacttcttccggaggatagacaaggatcaggacggaaagattacgagacaagaattcatcgacggaatccttagctcgaagttccccacatcacgccttgaaatgtccgccgtggccgacatctttgaccgcgatggagatggatatattgattattacgagttcgtggccgctcttcatccaaataaagacgcttacaagccaatcacagatgccgataagattgaggatgaagtgacgaggcaggtagcaaaatgcaagtgtgccaagcgattccaagtggaacaaatcggggacaataaatatcgggtgtcttttcagagtaattttggcgattctcagcagttgaggcttgtccgcatcctgaggagtactgtcatggtacgagttggtggcggatggatggcccttgatgagtttttggtcaagaacgatccttgtagagtgcatcaccatgggtcgaagatgcttcgctccgagagcaatagcagtataactactacccagccaacgatcgccaagggaagaacaaatatggagttgagagaaaagttcatactcgcggacggcgcttcacagggcatggccgcatttcggcctagaggccgaagatctaggccaagttctagaggggcatctcctaaccgttctacatcagtgtcttcccaagctgcccaagctgcatccccgcaagtgcccgctacaacgactcccaaggggacacccatccagggtagcaagcttaggctcccaggatatctgtctggaaagggttttcactccggtgaagactctgggctgattacaactgccgctgccagagtgcggacacaattcgcggacagcaaaaagactccgtctcggcctggctcccgggctgggtccaaagctggatcacgcgcatccagccggagggggtcagacgcctcagacttcgacattagtgagatccaaagtgtttgtagcgacgtcgaaactgtgccgcaaacccatcgacctaccccacgggcaggatctcgtcccagcacagcgaagcctagcaagatccctaccccacagcggaaatctccagcctcaaagctcgacaaatctagtaagagatat

SEQ ID NO: 269258 - DNA, 22719 bp, Artificial Sequence
  derived and/or modified sequence
atggccggctacctgagccccgccgcctacctgtacgtggaggagcaggagtacctgcaggcctacgaggacgtgctggagagatacaaggacgagagagacaaggtgcagaagaagaccttcaccaagtggatcaaccagcacctgatgaaggtgagaaagcacgtgaacgacctgtacgaggacctgagagacggccacaacctgatcagcctgctggaggtgctgagcggcgacaccctgcccagagagaagggcagaatgagattccacagactgcagaacgtgcagatcgccctggactacctgaagagaagacaggtgaagctggtgaacatcagaaacgacgacatcaccgacggcaaccccaagctgaccctgggcctgatctggaccatcatcctgcacttccagatcagcgacatccacgtgaccggcgagagcgaggacatgagcgccaaggagagactgctgctgtggacccagcaggccaccgagggctacgccggcatcagatgcgagaacttcaccacctgctggagagacggcaagctgttcaacgccatcatccacaagtacagacccgacctgatcgacatgaacaccgtggccgtgcagagcaacctggccaacctggagcacgccttctacgtggccgagaagatcggcgtgatcagactgctggaccccgaggacgtggacgtgagcagccccgacgagaagagcgtgatcacctacgtgagcagcctgtacgacgccttccccaaggtgcccgagggcggcgagggcatcggcgccaacgacgtggaggtgaagtggatcgagtaccagaacatggtgaactacctgatccagtggatcagacaccacgtgaccaccatgagcgagagaaccttccccaacaaccccgtggagctgaaggccctgtacaaccagtacctgcagttcaaggagaccgagatcccccccaaggagaccgagaagagcaagatcaagagactgtacaagctgctggagatctggatcgagttcggcagaatcaagctgctgcagggctaccaccccaacgacatcgagaaggagtggggcaagctgatcatcgccatgctggagagagagaaggccctgagacccgaggtggagagactggagatgctgcagcagatcgccaacagagtgcagagagacagcgtgatctgcgaggacaagctgatcctggccggcaacgccctgcagagcgacagcaagagactggagagcggcgtgcagttccagaacgaggccgagatcgccggctacatcctggagtgcgagaacctgctgagacagcacgtgatcgacgtgcagatcctgatcgacggcaagtactaccaggccgaccagctggtgcagagagtggccaagctgagagacgagatcatggccctgagaaacgagtgcagcagcgtgtacagcaagggcagaatcctgaccaccgagcagaccaagctgatgatcagcggcatcacccagagcctgaacagcggcttcgcccagaccctgcaccccagcctgaccagcggcctgacccagagcctgacccccagcctgaccagcagcagcatgaccagcggcctgagcagcggcatgaccagcagactgacccccagcgtgacccccgcctacacccccggcttccccagcggcctggtgcccaacttcagcagcggcgtggagcccaacagcctgcagaccctgaagctgatgcagatcagaaagcccctgctgaagagcagcctgctggaccagaacctgaccgaggaggagatcaacatgaagttcgtgcaggacctgctgaactgggtggacgagatgcaggtgcagctggacagaaccgagtggggcagcgacctgcccagcgtggagagccacctggagaaccacaagaacgtgcacagagccatcgaggagttcgagagcagcctgaaggaggccaagatcagcgagatccagatgaccgcccccctgaagctgacctacgccgagaagctgcacagactggagagccagtacgccaagctgctgaacaccagcagaaaccaggagagacacctggacaccctgcacaacttcgtgagcagagccaccaacgagctgatctggctgaacgagaaggaggaggaggaggtggcctacgactggagcgagagaaacaccaacatcgccagaaagaaggactaccacgccgagctgatgagagagctggaccagaaggaggagaacatcaagagcgtgcaggagatcgccgagcagctgctgctggagaaccaccccgccagactgaccatcgaggcctacagagccgccatgcagacccagtggagctggatcctgcagctgtgccagtgcgtggagcagcacatcaaggagaacaccgcctacttcgagttcttcaacgacgccaaggaggccaccgactacctgagaaacctgaaggacgccatccagagaaagtacagctgcgacagaagcagcagcatccacaagctggaggacctggtgcaggagagcatggaggagaaggaggagctgctgcagtacaagagcaccatcgccaacctgatgggcaaggccaagaccatcatccagctgaagcccagaaacagcgactgccccctgaagaccagcatccccatcaaggccatctgcgactacagacagatcgagatcaccatctacaaggacgacgagtgcgtgctggccaacaacagccacagagccaagtggaaggtgatcagccccaccggcaacgaggccatggtgcccagcgtgtgcttcaccgtgcccccccccaacaaggaggccgtggacctggccaacagaatcgagcagcagtaccagaacgtgctgaccctgtggcacgagagccacatcaacatgaagagcgtggtgagctggcactacctgatcaacgagatcgacagaatcagagccagcaacgtggccagcatcaagaccatgctgcccggcgagcaccagcaggtgctgagcaacctgcagagcagattcgaggacttcctggaggacagccaggagagccaggtgttcagcggcagcgacatcacccagctggagaaggaggtgaacgtgtgcaagcagtactaccaggagctgctgaagagcgccgagagagaggagcaggaggagagcgtgtacaacctgtacatcagcgaggtgagaaacatcagactgagactggagaactgcgaggacagactgatcagacagatcagaacccccctggagagagacgacctgcacgagagcgtgttcagaatcaccgagcaggagaagctgaagaaggagctggagagactgaaggacgacctgggcaccatcaccaacaagtgcgaggagttcttcagccaggccgccgccagcagcagcgtgcccaccctgagaagcgagctgaacgtggtgctgcagaacatgaaccaggtgtacagcatgagcagcacctacatcgacaagctgaagaccgtgaacctggtgctgaagaacacccaggccgccgaggccctggtgaagctgtacgagaccaagctgtgcgaggaggaggccgtgatcgccgacaagaacaacatcgagaacctgatcagcaccctgaagcagtggagaagcgaggtggacgagaagagacaggtgttccacgccctggaggacgagctgcagaaggccaaggccatcagcgacgagatgttcaagacctacaaggagagagacctggacttcgactggcacaaggagaaggccgaccagctggtggagagatggcagaacgtgcacgtgcagatcgacaacagactgagagacctggagggcatcggcaagagcctgaagtactacagagacacctaccaccccctggacgactggatccagcaggtggagaccacccagagaaagatccaggagaaccagcccgagaacagcaagaccctggccacccagctgaaccagcagaagatgctggtgagcgagatcgagatgaagcagagcaagatggacgagtgccagaagtacgccgagcagtacagcgccaccgtgaaggactacgagctgcagaccatgacctacagagccatggtggacagccagcagaagagccccgtgaagagaagaagaatgcagagcagcgccgacctgatcatccaggagttcatggacctgagaaccagatacaccgccctggtgaccctgatgacccagtacatcaagttcgccggcgacagcctgaagagactggaggaggaggagaagagcctggaggaggagaagaaggagcacgtggagaaggccaaggagctgcagaagtgggtgagcaacatcagcaagaccctgaaggacgccgagaaggccggcaagccccccttcagcaagcagaagatcagcagcgaggagatcagcaccaagaaggagcagctgagcgaggccctgcagaccatccagctgttcctggccaagcacggcgacaagatgaccgacgaggagagaaacgagctggagaagcaggtgaagaccctgcaggagagctacaacctgctgttcagcgagagcctgaagcagctgcaggagagccagaccagcggcgacgtgaaggtggaggagaagctggacaaggtgatcgccggcaccatcgaccagaccaccggcgaggtgctgagcgtgttccaggccgtgctgagaggcctgatcgactacgacaccggcatcagactgctggagacccagctgatgatcagcggcctgatcagccccgagctgagaaagtgcttcgacctgaaggacgccaagagccacggcctgatcgacgagcagatcctgtgccagctgaaggagctgagcaaggccaaggagatcatcagcgccgccagccccaccaccatccccgtgctggacgccctggcccagagcatgatcaccgagagcatggccatcaaggtgctggagatcctgctgagcaccggcagcctggtgatccccgccaccggcgagcagctgaccctgcagaaggccttccagcagaacctggtgagcagcgccctgttcagcaaggtgctggagagacagaacatgtgcaaggacctgatcgacccctgcaccagcgagaaggtgagcctgatcgacatggtgcagagaagcaccctgcaggagaacaccggcatgtggctgctgcccgtgagaccccaggagggcggcagaatcaccctgaagtgcggcagaaacatcagcatcctgagagccgcccacgagggcctgatcgacagagagaccatgttcagactgctgagcgcccagctgctgagcggcggcctgatcaacagcaacagcggccagagaatgaccgtggaggaggccgtgagagagggcgtgatcgacagagacaccgccagcagcatcctgacctaccaggtgcagaccggcggcatcatccagagcaaccccgccaagagactgaccgtggacgaggccgtgcagtgcgacctgatcaccagcagcagcgccctgctggtgctggaggcccagagaggctacgtgggcctgatctggccccacagcggcgagatcttccccaccagcagcagcctgcagcaggagctgatcaccaacgagctggcctacaagatcctgaacggcagacagaagatcgccgccctgtacatccccgagagcagccaggtgatcggcctggacgccgccaagcagctgggcatcatcgacaacaacaccgccagcatcctgaagaacatcaccctgcccgacaagatgcccgacctgggcgacctggaggcctgcaagaacgccagaagatggctgagcttctgcaagttccagcccagcaccgtgcacgactacagacaggaggaggacgtgttcgacggcgaggagcccgtgaccacccagaccagcgaggagaccaagaagctgttcctgagctacctgatgatcaacagctacatggacgccaacaccggccagagactgctgctgtacgacggcgacctggacgaggccgtgggcatgctgctggagggctgccacgccgagttcgacggcaacaccgccatcaaggagtgcctggacgtgctgagcagcagcggcgtgttcctgaacaacgccagcggcagagagaaggacgagtgcaccgccacccccagcagcttcaacaagtgccactgcggcgagcccgagcacgaggagacccccgagaacagaaagtgcgccatcgacgaggagttcaacgagatgagaaacaccgtgatcaacagcgagttcagccagagcggcaagctggccagcaccatcagcatcgaccccaaggtgaacagcagccccagcgtgtgcgtgcccagcctgatcagctacctgacccagaccgagctggccgacatcagcatgctgagaagcgacagcgagaacatcctgaccaactacgagaaccagagcagagtggagaccaacgagagagccaacgagtgcagccacagcaagaacatccagaacttccccagcgacctgatcgagaaccccatcatgaagagcaagatgagcaagttctgcggcgtgaacgagaccgagaacgaggacaacaccaacagagacagccccatcttcgactacagccccagactgagcgccctgctgagccacgacaagctgatgcacagccagggcagcttcaacgacacccacacccccgagagcaacggcaacaagtgcgaggcccccgccctgagcttcagcgacaagaccatgctgagcggccagagaatcggcgagaagttccaggaccagttcctgggcatcgccgccatcaacatcagcctgcccggcgagcagtacggccagaagagcctgaacatgatcagcagcaacccccaggtgcagtaccacaacgacaagtacatcagcaacaccagcggcgaggacgagaagacccaccccggcttccagcagatgcccgaggacaaggaggacgagagcgagatcgaggagtacagctgcgccgtgacccccggcggcgacaccgacaacgccatcgtgagcctgacctgcgccacccccctgctggacgagaccatcagcgccagcgactacgagaccagcctgctgaacgaccagcagaacaacaccggcaccgacaccgacagcgacgacgacttctacgacacccccctgttcgaggacgacgaccacgacagcctgctgctggacggcgacgacagagactgcctgcaccccgaggactacgacaccctgcaggaggagaacgacgagaccgccagccccgccgacgtgttctacgacgtgagcaaggagaacgagaacagcatggtgccccagggcgcccccgtgggcagcctgagcgtgaagaacaaggcccactgcctgcaggacttcctgatggacgtggagaaggacgagctggacagcggcgagaagatccacctgaaccccgtgggcagcgacaaggtgaacggccagagcctggagaccggcagcgagagagagtgcaccaacatcctggagggcgacgagagcgacagcctgaccgactacgacatcgtgggcggcaaggagagcttcaccgccagcctgaagttcgacgacagcggcagctggagaggcagaaaggaggagtacgtgaccggccaggagttccacagcgacaccgaccacctggacagcatgcagagcgaggagagctacggcgactacatctacgacagcaacgaccaggacgacgacgacgacgacggcatcgacgaggagggcggcggcatcagagacgagaacggcaagcccagatgccagaacgtggccgaggacatggacatccagctgtgcgccagcatcctgaacgagaacagcgacgagaacgagaacatcaacaccatgatcctgctggacaagatgcacagctgcagcagcctggagaagcagcagagagtgaacgtggtgcagctggccagccccagcgagaacaacctggtgaccgagaagagcaacctgcccgagtacaccaccgagatcgccggcaagagcaaggagaacctgctgaaccacgagatggtgctgaaggacgtgctgccccccatcatcaaggacaccgagagcgagaagaccttcggccccgccagcatcagccacgacaacaacaacatcagcagcaccagcgagctgggcaccgacctggccaacaccaaggtgaagctgatccagggcagcgagctgcccgagctgaccgacagcgtgaagggcaaggacgagtacttcaagaacatgacccccaaggtggacagcagcctggaccacatcatctgcaccgagcccgacctgatcggcaagcccgccgaggagagccacctgagcctgatcgccagcgtgaccgacaaggacccccagggcaacggcagcgacctgatcaagggcagagacggcaagagcgacatcctgatcgaggacgagaccagcatccagaagatgtacctgggcgagggcgaggtgctggtggagggcctggtggaggaggagaacagacacctgaagctgctgcccggcaagaacaccagagacagcttcaagctgatcaacagccagttccccttcccccagatcaccaacaacgaggagctgaaccagaagggcagcctgaagaaggccaccgtgaccctgaaggacgagcccaacaacctgcagatcatcgtgagcaagagccccgtgcagttcgagaacctggaggagatcttcgacaccagcgtgagcaaggagatcagcgacgacatcaccagcgacatcaccagctgggagggcaacacccacttcgaggagagcttcaccgacggccccgagaaggagctggacctgttcacctacctgaagcactgcgccaagaacatcaaggccaaggacgtggccaagcccaacgaggacgtgcccagccacgtgctgatcaccgccccccccatgaaggagcacctgcagctgggcgtgaacaacaccaaggagaagagcaccagcacccagaaggacagccccctgaacgacatgatccagagcaacgacctgtgcagcaaggagagcatcagcggcggcggcaccgagatcagccagttcacccccgagagcatcgaggccaccctgagcatcctgagcagaaagcacgtggaggacgtgggcaagaacgacttcctgcagagcgagagatgcgccaacggcctgggcaacgacaacagcagcaacaccctgaacaccgactacagcttcctggagatcaacaacaagaaggagagaatcgagcagcagctgcccaaggagcaggccctgagccccagaagccaggagaaggaggtgcagatccccgagctgagccaggtgttcgtggaggacgtgaaggacatcctgaagagcagactgaaggagggccacatgaacccccaggaggtggaggagcccagcgcctgcgccgacaccaagatcctgatccagaacctgatcaagagaatcaccaccagccagctggtgaacgaggccagcaccgtgcccagcgacagccagatgagcgacagcagcggcgtgagccccatgaccaacagcagcgagctgaagcccgagagcagagacgaccccttctgcatcggcaacctgaagagcgagctgctgctgaacatcctgaagcaggaccagcacagccagaagatcaccggcgtgttcgagctgatgagagagctgacccacatggagtacgacctggagaagagaggcatcaccagcaaggtgctgcccctgcagctggagaacatcttctacaagctgctggccgacggctacagcgagaagatcgagcacgtgggcgacttcaaccagaaggcctgcagcaccagcgagatgatggaggagaagccccacatcctgggcgacatcaagagcaaggagggcaactactacagccccaacctggagaccgtgaaggagatcggcctggagagcagcaccgtgtgggccagcaccctgcccagagacgagaagctgaaggacctgtgcaacgacttccccagccacctggagtgcaccagcggcagcaaggagatggccagcggcgacagcagcaccgagcagttcagcagcgagctgcagcagtgcctgcagcacaccgagaagatgcacgagtacctgaccctgctgcaggacatgaagccccccctggacaaccaggagagcctggacaacaacctggaggccctgaagaaccagctgagacagctggagaccttcgagctgggcctggcccccatcgccgtgatcctgagaaaggacatgaagctggccgaggagttcctgaagagcctgcccagcgacttccccagaggccacgtggaggagctgagcatcagccaccagagcctgaagaccgccttcagcagcctgagcaacgtgagcagcgagagaaccaagcagatcatgctggccatcgacagcgagatgagcaagctggccgtgagccacgaggagttcctgcacaagctgaagagcttcagcgactgggtgagcgagaagagcaagagcgtgaaggacatcgagatcgtgaacgtgcaggacagcgagtacgtgaagaagagactggagttcctgaaggccaacaacgtgctgaaggacctgggccacaccaagatgcagctggagaccaccgccttcgacgtgcagttcttcatcagcgagtacgcccaggacctgagccccaaccagagcaagcagctgctgagactgctgaacaccacccagaagtgcttcctggacgtgcaggagagcgtgaccacccaggtggagagactggagacccagctgcacctggagcaggacctggacgaccagaagatcgtggccgagagacagcaggagtacaaggagaagctgcagggcatctgcgacctgctgacccagaccgagaacagactgatcggccaccaggaggccttcatgatcggcgacggcaccgtggagctgaagaagtaccagagcaagcaggaggagctgcagaaggacatgcagggcagcgcccaggccctggccgaggtggtgaagaacaccgagaacttcctgaaggagaacggcgagaagctgagccaggaggacaaggccctgatcgagcagaagctgaacgaggccaagatcaagtgcgagcagctgaacctgaaggccgagcagagcaagaaggagctggacaaggtggtgaccaccgccatcaaggaggagaccgagaaggtggccgccgtgaagcagctggaggagagcaagaccaagatcgagaacctgctggactggctgagcaacgtggacaaggacagcgagagagccggcaccaagcacaagcaggtgatcgagcagaacggcacccacttccaggagggcgacggcaagagcgccatcggcgaggaggacgaggtgaacggcaacctgctggagaccgacgtggacggccaggtgggcaccacccaggagaacctgaaccagcagtaccagaaggtgaaggcccagcacgagaagatcatcagccagcaccaggccgtgatcatcgccacccagagcgcccaggtgctgctggagaagcagggccagtacctgagccccgaggagaaggagaagctgcagaagaacatgaaggagctgaaggtgcactacgagaccgccctggccgagagcgagaagaagatgaagctgacccacagcctgcaggaggagctggagaagttcgacgccgactacaccgagttcgagcactggctgcagcagagcgagcaggagctggagaacctggaggccggcgccgacgacatcaacggcctgatgaccaagctgaagagacagaagagcttcagcgaggacgtgatcagccacaagggcgacctgagatacatcaccatcagcggcaacagagtgctggaggccgccaagagctgcagcaagagagacggcggcaaggtggacaccagcgccacccacagagaggtgcagagaaagctggaccacgccaccgacagattcagaagcctgtacagcaagtgcaacgtgctgggcaacaacctgaaggacctggtggacaagtaccagcactacgaggacgccagctgcggcctgctggccggcctgcaggcctgcgaggccaccgccagcaagcacctgagcgagcccatcgccgtggaccccaagaacctgcagagacagctggaggagaccaaggccctgcagggccagatcagcagccagcaggtggccgtggagaagctgaagaagaccgccgaggtgctgctggacgccagaggcagcctgctgcccgccaagaacgacatccagaagaccctggacgacatcgtgggcagatacgaggacctgagcaagagcgtgaacgagagaaacgagaagctgcagatcaccctgaccagaagcctgagcgtgcaggacggcctggacgagatgctggactggatgggcaacgtggagagcagcctgaaggagcagggccaggtgcccctgaacagcaccgccctgcaggacatcatcagcaagaacatcatgctggagcaggacatcgccggcagacagagcagcatcaacgccatgaacgagaaggtgaagaagttcatggagaccaccgaccccagcaccgccagcagcctgcaggccaagatgaaggacctgagcgccagattcagcgaggccagccacaagcacaaggagaccctggccaagatggaggagctgaagaccaaggtggagctgttcgagaacctgagcgagaagctgcagaccttcctggagaccaagacccaggccctgaccgaggtggacgtgcccggcaaggacgtgaccgagctgagccagtacatgcaggagagcaccagcgagttcctggagcacaagaagcacctggaggtgctgcacagcctgctgaaggagatcagcagccacggcctgcccagcgacaaggccctggtgctggagaagaccaacaacctgagcaagaagttcaaggagatggaggacaccatcaaggagaagaaggaggccgtgaccagctgccaggagcagctggacgccttccaggtgctggtgaagagcctgaagagctggatcaaggagaccaccaagaaggtgcccatcgtgcagcccagcttcggcgccgaggacctgggcaagagcctggaggacaccaagaagctgcaggagaagtggagcctgaagacccccgagatccagaaggtgaacaacagcggcatcagcctgtgcaacctgatcagcgccgtgaccacccccgccaaggccatcgccgccgtgaagagcggcggcgccgtgctgaacggcgagggcaccgccaccaacaccgaggagttctgggccaacaagggcctgaccagcatcaagaaggacatgaccgacatcagccacggctacgaggacctgggcctgctgctgaaggacaagatcgccgagctgaacaccaagctgagcaagctgcagaaggcccaggaggagagcagcgccatgatgcagtggctgcagaagatgaacaagaccgccaccaagtggcagcagacccccgcccccaccgacaccgaggccgtgaagacccaggtggagcagaacaagagcttcgaggccgagctgaagcagaacgtgaacaaggtgcaggagctgaaggacaagctgaccgagctgctggaggagaaccccgacacccccgaggcccccagatggaagcagatgctgaccgagatcgacagcaagtggcaggagctgaaccagctgaccatcgacagacagcagaagctggaggagagcagcaacaacctgacccagttccagaccgtggaggcccagctgaagcagtggctggtggagaaggagctgatggtgagcgtgctgggccccctgagcatcgaccccaacatgctgaacacccagagacagcaggtgcagatcctgctgcaggagttcgccaccagaaagccccagtacgagcagctgaccgccgccggccagggcatcctgagcagacccggcgaggaccccagcctgagaggcatcgtgaaggagcagctggccgccgtgacccagaagtgggacagcctgaccggccagctgagcgacagatgcgactggatcgaccaggccatcgtgaagagcacccagtaccagagcctgctgagaagcctgagcgacaagctgagcgacctggacaacaagctgagcagcagcctggccgtgagcacccaccccgacgccatgaaccagcagctggagaccgcccagaagatgaagcaggagatccagcaggagaagaagcagatcaaggtggcccaggccctgtgcgaggacctgagcgccctggtgaaggaggagtacctgaaggccgagctgagcagacagctggagggcatcctgaagagcttcaaggacgtggagcagaaggccgagaaccacgtgcagcacctgcagagcgcctgcgccagcagccaccagttccagcagatgagcagagacttccaggcctggctggacaccaagaaggaggagcagaacaagagccaccccatcagcgccaagctggacgtgctggagagcctgatcaaggaccacaaggacttcagcaagaccctgaccgcccagagccacatgtacgagaagaccatcgccgagggcgagaacctgctgctgaagacccagggcagcgagaaggccgccctgcagctgcagctgaacaccatcaagaccaactgggacaccttcaacaagcaggtgaaggagagagagaacaagctgaaggagagcctggagaaggccctgaagtacaaggagcaggtggagaccctgtggccctggatcgacaagtgccagaacaacctggaggagatcaagttctgcctggaccccgccgagggcgagaacagcatcgccaagctgaagagcctgcagaaggagatggaccagcacttcggcatggtggagctgctgaacaacaccgccaacagcctgctgagcgtgtgcgagatcgacaaggaggtggtgaccgacgagaacaagagcctgatccagaaggtggacatggtgaccgagcagctgcacagcaagaagttctgcctggagaacatgacccagaagttcaaggagttccaggaggtgagcaaggagagcaagagacagctgcagtgcgccaaggagcagctggacatccacgacagcctgggcagccaggcctacagcaacaagtacctgaccatgctgcagacccagcagaagagcctgcaggccctgaagcaccaggtggacctggccaagagactggcccaggacctggtggtggaggccagcgacagcaagggcaccagcgacgtgctgctgcaggtggagaccatcgcccaggagcacagcaccctgagccagcaggtggacgagaagtgcagcttcctggagaccaagctgcagggcatcggccacttccagaacaccatcagagagatgttcagccagttcgccgagttcgacgacgagctggacagcatggcccccgtgggcagagacgccgagaccctgcagaagcagaaggagaccatcaaggccttcctgaagaagctggaggccctgatggccagcaacgacaacgccaacaagacctgcaagatgatgctggccaccgaggagaccagccccgacctggtgggcatcaagagagacctggaggccctgagcaagcagtgcaacaagctgctggacagagcccaggccagagaggagcaggtggagggcaccatcaagagactggaggagttctacagcaagctgaaggagttcagcatcctgctgcagaaggccgaggagcacgaggagagccagggccccgtgggcatggagaccgagaccatcaaccagcagctgaacatgttcaaggtgttccagaaggaggagatcgagcccctgcagggcaagcagcaggacgtgaactggctgggccagggcctgatccagagcgccgccaagagcaccagcacccagggcctggagcacgacctggacgacgtgaacgccagatggaagaccctgaacaagaaggtggcccagagagccgcccagctgcaggaggccctgctgcactgcggcagattccaggacgccctggagagcctgctgagctggatggtggacaccgaggagctggtggccaaccagaagccccccagcgccgagttcaaggtggtgaaggcccagatccaggagcagaagctgctgcagagactgctggacgacagaaagagcaccgtggaggtgatcaagagagagggcgagaagatcgccaccaccgccgagcccgccgacaaggtgaagatcctgaagcagctgagcctgctggacagcagatgggaggccctgctgaacaaggccgagaccagaaacagacagctggagggcatcagcgtggtggcccagcagttccacgagaccctggagcccctgaacgagtggctgaccaccatcgagaagagactggtgaactgcgagcccatcggcacccaggccagcaagctggaggagcagatcgcccagcacaaggccctggaggacgacatcatcaaccacaacaagcacctgcaccaggccgtgagcatcggccagagcctgaaggtgctgagcagcagagaggacaaggacatggtgcagagcaagctggacttcagccaggtgtggtacatcgagatccaggagaagagccacagcagaagcgagctgctgcagcaggccctgtgcaacgccaagatcttcggcgaggacgaggtggagctgatgaactggctgaacgaggtgcacgacaagctgagcaagctgagcgtgcaggactacagcaccgagggcctgtggaagcagcagagcgagctgagagtgctgcaggaggacatcctgctgagaaagcagaacgtggaccaggccctgctgaacggcctggagctgctgaagcagaccaccggcgacgaggtgctgatcatccaggacaagctggaggccatcaaggccagatacaaggacatcaccaagctgagcaccgacgtggccaagaccctggagcaggccctgcagctggccagaagactgcacagcacccacgaggagctgtgcacctggctggacaaggtggaggtggagctgctgagctacgagacccaggtgctgaagggcgaggaggccagccaggcccagatgagacccaaggagctgaagaaggaggccaagaacaacaaggccctgctggacagcctgaacgaggtgagcagcgccctgctggagctggtgccctggagagccagagagggcctggagaagatggtggccgaggacaacgagagatacagactggtgagcgacaccatcacccagaaggtggaggagatcgacgccgccatcctgagaagccagcagttcgaccaggccgccgacgccgagctgagctggatcaccgagaccgagaagaagctgatgagcctgggcgacatcagactggagcaggaccagaccagcgcccagctgcaggtgcagaagaccttcaccatggagatcctgagacacaaggacatcatcgacgacctggtgaagagcggccacaagatcatgaccgcctgcagcgaggaggagaagcagagcatgaagaagaagctggacaaggtgctgaagaactacgacaccatctgccagatcaacagcgagagatacctgcagctggagagagcccagagcctggtgaaccagttctgggagacctacgaggagctgtggccctggctgaccgagacccagagcatcatcagccagctgcccgcccccgccctggagtacgagaccctgagacagcagcaggaggagcacagacagctgagagagctgatcgccgagcacaagccccacatcgacaagatgaacaagaccggcccccagctgctggagctgagccccggcgagggcttcagcatccaggagaagtacgtggccgccgacaccctgtacagccagatcaaggaggacgtgaagaagagagccgtggccctggacgaggccatcagccagagcacccagttccacgacaagatcgaccagatcctggagagcctggagagaatcgtggagagactgagacagccccccagcatcagcgccgaggtggagaagatcaaggagcagatcagcgagaacaagaacgtgagcgtggacatggagaagctgcagcccctgtacgagaccctgaagcagagaggcgaggagatgatcgccagaagcggcggcaccgacaaggacatcagcgccaaggccgtgcaggacaagctggaccagatggtgttcatctgggagaacatccacaccctggtggaggagagagaggccaagctgctggacgtgatggagctggccgagaagttctggtgcgaccacatgagcctgatcgtgaccatcaaggacacccaggacttcatcagagacctggaggaccccggcatcgaccccagcgtggtgaagcagcagcaggaggccgccgagaccatcagagaggagatcgacggcctgcaggaggagctggacatcgtgatcaacctgggcagcgagctgatcgccgcctgcggcgagcccgacaagcccatcgtgaagaagagcatcgacgagctgaacagcgcctgggacagcctgaacaaggcctggaaggacagaatcgacaagctggaggaggccatgcaggccgccgtgcagtaccaggacggcctgcaggccgtgttcgactgggtggacatcgccggcggcaagctggccagcatgagccccatcggcaccgacctggagaccgtgaagcagcagatcgaggagctgaagcagttcaagagcgaggcctaccagcagcagatcgagatggagagactgaaccaccaggccgagctgctgctgaagaaggtgaccgaggagagcgacaagcacaccgtgcaggaccccctgatggagctgaagctgatctgggacagcctggaggagagaatcatcaacagacagcacaagctggagggcgccctgctggccctgggccagttccagcacgccctggacgagctgctggcctggctgacccacaccgagggcctgctgagcgagcagaagcccgtgggcggcgaccccaaggccatcgagatcgagctggccaagcaccacgtgctgcagaacgacgtgctggcccaccagagcaccgtggaggccgtgaacaaggccggcaacgacctgatcgagagcagcgccggcgaggaggccagcaacctgcagaacaagctggaggtgctgaaccagagatggcagaacgtgctggagaagaccgagcagagaaagcagcagctggacggcgccctgagacaggccaagggcttccacggcgagatcgaggacctgcagcagtggctgaccgacaccgagagacacctgctggccagcaagcccctgggcggcctgcccgagaccgccaaggagcagctgaacgtgcacatggaggtgtgcgccgccttcgaggccaaggaggagacctacaagagcctgatgcagaagggccagcagatgctggccagatgccccaagagcgccgagaccaacatcgaccaggacatcaacaacctgaaggagaagtgggagagcgtggagaccaagctgaacgagagaaagaccaagctggaggaggccctgaacctggccatggagttccacaacagcctgcaggacttcatcaactggctgacccaggccgagcagaccctgaacgtggccagcagacccagcctgatcctggacaccgtgctgttccagatcgacgagcacaaggtgttcgccaacgaggtgaacagccacagagagcagatcatcgagctggacaagaccggcacccacctgaagtacttcagccagaagcaggacgtggtgctgatcaagaacctgctgatcagcgtgcagagcagatgggagaaggtggtgcagagactggtggagagaggcagaagcctggacgacgccagaaagagagccaagcagttccacgaggcctggagcaagctgatggagtggctggaggagagcgagaagagcctggacagcgagctggagatcgccaacgaccccgacaagatcaagacccagctggcccagcacaaggagttccagaagagcctgggcgccaagcacagcgtgtacgacaccaccaacagaaccggcagaagcctgaaggagaagaccagcctggccgacgacaacctgaagctggacgacatgctgagcgagctgagagacaagtgggacaccatctgcggcaagagcgtggagagacagaacaagctggaggaggccctgctgttcagcggccagttcaccgacgccctgcaggccctgatcgactggctgtacagagtggagccccagctggccgaggaccagcccgtgcacggcgacatcgacctggtgatgaacctgatcgacaaccacaaggccttccagaaggagctgggcaagagaaccagcagcgtgcaggccctgaagagaagcgccagagagctgatcgagggcagcagagacgacagcagctgggtgaaggtgcagatgcaggagctgagcaccagatgggagaccgtgtgcgccctgagcatcagcaagcagaccagactggaggccgccctgagacaggccgaggagttccacagcgtggtgcacgccctgctggagtggctggccgaggccgagcagaccctgagattccacggcgtgctgcccgacgacgaggacgccctgagaaccctgatcgaccagcacaaggagttcatgaagaagctggaggagaagagagccgagctgaacaaggccaccaccatgggcgacaccgtgctggccatctgccaccccgacagcatcaccaccatcaagcactggatcaccatcatcagagccagattcgaggaggtgctggcctgggccaagcagcaccagcagagactggccagcgccctggccggcctgatcgccaagcaggagctgctggaggccctgctggcctggctgcagtgggccgagaccaccctgaccgacaaggacaaggaggtgatcccccaggagatcgaggaggtgaaggccctgatcgccgagcaccagaccttcatggaggagatgaccagaaagcagcccgacgtggacaaggtgaccaagacctacaagagaagagccgccgaccccagcagcctgcagagccacatccccgtgctggacaagggcagagccggcagaaagagattccccgccagcagcctgtaccccagcggcagccagacccagatcgagaccaagaaccccagagtgaacctgctggtgagcaagtggcagcaggtgtggctgctggccctggagagaagaagaaagctgaacgacgccctggacagactggaggagctgagagagttcgccaacttcgacttcgacatctggagaaagaagtacatgagatggatgaaccacaagaagagcagagtgatggacttcttcagaagaatcgacaaggaccaggacggcaagatcaccagacaggagttcatcgacggcatcctgagcagcaagttccccaccagcagactggagatgagcgccgtggccgacatcttcgacagagacggcgacggctacatcgactactacgagttcgtggccgccctgcaccccaacaaggacgcctacaagcccatcaccgacgccgacaagatcgaggacgaggtgaccagacaggtggccaagtgcaagtgcgccaagagattccaggtggagcagatcggcgacaacaagtacagagtgagcttccagagcaacttcggcgacagccagcagctgagactggtgagaatcctgagaagcaccgtgatggtgagagtgggcggcggctggatggccctggacgagttcctggtgaagaacgacccctgcagagtgcaccaccacggcagcaagatgctgagaagcgagagcaacagcagcatcaccaccacccagcccaccatcgccaagggcagaaccaacatggagctgagagagaagttcatcctggccgacggcgccagccagggcatggccgccttcagacccagaggcagaagaagcagacccagcagcagaggcgccagccccaacagaagcaccagcgtgagcagccaggccgcccaggccgccagcccccaggtgcccgccaccaccacccccaagggcacccccatccagggcagcaagctgagactgcccggctacctgagcggcaagggcttccacagcggcgaggacagcggcctgatcaccaccgccgccgccagagtgagaacccagttcgccgacagcaagaagacccccagcagacccggcagcagagccggcagcaaggccggcagcagagccagcagcagaagaggcagcgacgccagcgacttcgacatcagcgagatccagagcgtgtgcagcgacgtggagaccgtgccccagacccacagacccacccccagagccggcagcagacccagcaccgccaagcccagcaagatccccaccccccagagaaagagccccgccagcaagctggacaagagcagcaagagatag

SEQ ID NO: 269259 - DNA, 23735 bp, Artificial Sequence
  derived and/or modified sequence
atggcgggttacctctcccctgctgcttacctgtacgtggaggagcaggagtatctccaggcctacgaggatgtcctggagaggtacaaagatgaacgggacaaagttcagaagaaaacatttacaaaatggataaatcagcatctcatgaaggttcgaaaacatgtgaatgatctctatgaagacttaagggatggacacaatttgatttctcttttagaggttctttcaggagataccttgcccagagaaaaaggtcggatgcgttttcacagactacagaatgtacaaattgcacttgactatttgaaaagacgccaggtgaaattagtgaatattagaaatgatgacataacagatggaaatcccaaattgactttgggattaatctggacaataattttgcactttcagatatctgatatccatgttactggagagtcagaggatatgtctgcaaaagagagattgctactctggacgcagcaggcaacagagggttatgctggaattcggtgtgaaaatttcactacctgctggagagatggaaaattatttaatgccatcattcataaatacaggccggacctgatagatatgaatactgttgctgttcaaagcaaccttgcaaatttagagcatgctttttacgtagcagaaaaaattggtgttataagacttctggaccctgaagatgtcgatgtctcctcacctgatgaaaaatcagtaataacttacgtgtcatctctctatgatgcatttcctaaagtccctgaaggtggggaaggcattggtgcaaatgatgttgaagtcaaatggattgaataccagaatatggtgaactacctcatccaatggattagacaccatgtgaccacaatgtctgagagaacatttcctaataatcctgtagaactgaaggcactttataatcagtatttacagtttaaagaaacagaaattccaccaaaggagacagaaaaatcaaaaattaaacgtctatataaattattagagatttggatagaatttggacgcatcaagctccttcaaggttatcatccaaatgacatagaaaaagagtgggggaaactcattattgccatgctagagagagagaaggcccttcgtccagaagtagaaaggttagaaatgttgcaacagattgccaacagagttcagagggacagtgtcatctgtgaagacaaactgattcttgctggaaatgctcttcagtctgattctaaaagattagaatcaggagtgcagtttcagaatgaagcagaaattgctgggtatatacttgaatgtgagaaccttttacgccagcatgtaattgatgtacagattcttattgatggaaaatactaccaggcagatcaattggtacagagggttgcaaaactgcgtgacgaaattatggccttaaggaacgaatgttcttctgtgtacagcaaaggacgcatactgacaacagaacagacaaagctcatgatatcaggaatcactcaaagtttaaactcaggatttgcacagaccttacaccctagtctgacctcagggctgacccagagtttaacaccttccctaacctcttctagtatgacttctggcctgtcatcagggatgacttcccgcctgactccatctgtcactccagcttatacacctggtttcccatcaggattagttccaaatttcagttcaggagtagagccaaattcattgcaaactttgaagttgatgcagatccgaaaaccccttctaaagtcttctttgctggatcaaaatttaacagaagaagaaatcaatatgaaatttgttcaggatcttttgaattgggttgatgagatgcaggtacaactggaccgcactgagtggggctcagatttgccaagtgttgaaagccatttagaaaatcataaaaatgttcatagagctattgaagaatttgaatctagtctcaaagaagctaaaatcagtgagattcaaatgacagcacctcttaaactgacttatgcagaaaagttgcacagattagagagtcagtatgcaaaactcttgaatacatccaggaatcaagaacggcaccttgatacactccataattttgtaagtcgtgcgactaatgaacttatttggttgaatgaaaaagaagaggaggaagttgcttatgactggagtgagagaaacaccaacatagctaggaaaaaagattatcatgctgaattaatgagagaacttgatcaaaaggaagaaaatattaaatcagttcaggagatagcagagcagctacttctagaaaatcatccagcccggttaactattgaggcctacagagcggcaatgcagacgcagtggagctggatcttacagctctgccagtgtgtggagcagcacataaaggagaacacagcgtatttcgagtttttcaatgatgccaaagaagctactgattacttaaggaatctaaaagatgccattcagcggaagtacagctgtgatagatcaagcagcattcacaagctagaagaccttgttcaggaatcaatggaagagaaagaagaacttctgcagtacaaaagcactatagcaaacctaatgggaaaagcaaaaacaataattcaactgaagccaaggaattctgactgtccactcaaaacttctattccgatcaaagctatctgtgactacagacaaattgagataaccatttacaaagacgatgaatgtgttttggcgaataactctcatcgtgctaaatggaaggtcattagtcctactgggaatgaggctatggtcccatctgtgtgcttcaccgttcctccaccaaacaaagaagcggtggaccttgccaacagaattgagcaacagtatcagaatgtcctgactctttggcatgagtctcacataaacatgaagagtgtagtatcctggcattatctcatcaatgaaattgatagaattcgagctagcaatgtggcttcaataaagacaatgctacctggtgaacatcagcaagttctaagtaatctacaatctcgttttgaagattttctggaagatagccaggaatcccaagtcttttcaggctcagatataacacaactggaaaaggaggttaatgtatgtaagcagtattatcaagaacttcttaaatctgcagaaagagaggagcaagaggaatcagtttataatctctacatctctgaagttcgaaacattagacttcggttagagaactgtgaagatcggctgattagacagattcgaactcccctggaaagagatgatttgcatgaaagtgtgttcagaatcacagaacaggagaaactaaagaaagagctggaacgacttaaagatgatttgggaacaatcacaaataagtgtgaggagtttttcagtcaagcagcagcctcttcatcagtccctaccctacgatcagagcttaatgtggtccttcagaacatgaaccaagtctattctatgtcttccacttacatagataagttgaaaactgttaacttggtgttaaaaaacactcaagctgcagaagccctcgtaaaactctatgaaactaaactgtgtgaagaagaagcagttatagctgacaagaataatattgagaatctaataagtactttaaagcaatggagatctgaagtagatgaaaagagacaggtattccatgccttagaggatgagttgcagaaagctaaagccatcagtgatgaaatgtttaaaacgtataaagaacgggaccttgattttgactggcacaaagaaaaagcagatcaattagttgaaaggtggcaaaatgttcatgtgcagattgacaacaggttacgggacttagagggcattggcaaatcactgaagtactacagagacacttaccatcctttagatgattggatccagcaggttgaaactactcagagaaagattcaggaaaatcagcctgaaaatagtaaaaccctagccacacagttgaatcaacagaagatgctggtgtccgaaatagaaatgaaacagagcaaaatggacgagtgtcaaaaatatgcagaacagtactcagctacagtgaaggactatgaattacaaacaatgacctaccgggccatggtagattcacaacaaaaatctccagtgaaacgccgaagaatgcagagttcagcagatctcattattcaagagttcatggacctaaggactcgatatactgccctggtcactctcatgacacaatatattaaatttgctggtgattcattgaagaggctggaagaggaggagaagtcactggaagaagaaaagaaagaacatgttgaaaaagccaaagaattgcaaaaatgggtatcaaatatcagcaagacattgaaagatgcagagaaggctggaaaacctcccttctctaagcaaaagatttccagtgaggaaatatcaaccaagaaggaacaattatcggaagcacttcaaactatacagctttttttggcaaaacatggagacaaaatgacagatgaagaaagaaatgaattggaaaaacaagtgaaaactcttcaggaaagttataatttattattcagtgaatctctgaaacagctacaagaatcacaaacctcaggagatgtaaaggtagaggagaagctggataaagtgattgcaggcaccattgatcagacaactggagaagtcctttcagtctttcaagcagttttaagaggcctcattgactatgacacaggaattaggttgcttgagacacagctaatgatttctggtctaatttcaccagaattaagaaagtgctttgaccttaaagatgccaaaagtcatggccttattgatgaacaaattctgtgccaactcaaagaactaagtaaagctaaggagattatttctgctgcgtcacctaccacaattccagtactggatgctctagctcaaagcatgataacagaatccatggccatcaaagttcttgagatactgctttctacaggctctctggttattccagccacaggagaacagttgaccctacagaaggctttccaacagaacttggtttcctcagcattattttctaaagttctggaaaggcaaaatatgtgcaaagatcttattgacccctgcacctctgagaaggtttctttaatagatatggtacaaagaagtactttacaggaaaacacagggatgtggcttctacctgtgagaccacaagaaggaggtagaataacattaaaatgtggaagaaacataagcattttaagagcagctcatgaaggtctcatagaccgtgaaaccatgtttaggttgttaagtgcacagcttctttctggaggtctgatcaattccaactctggccaaagaatgactgttgaagaagctgtcagagaaggggtgattgacagggacactgctagcagtatcctcacatatcaggttcaaactggtggaatcatccagtcaaaccctgccaagcgtttaactgtagacgaagcagtacagtgtgatttaataacttccagcagtgctcttctggtcctggaagctcagcgaggctatgttggactcatttggccccattctggtgaaatatttcccacatcatcttccttgcagcaagaattgattacaaatgaattggcctacaaaatcctgaatggcagacaaaaaatagctgctctttatattccagaaagttctcaagtcattggtttggatgctgctaaacagctaggaattatagacaacaacacagcatcaattttaaaaaatataacactgcctgataaaatgccagatttaggagatttagaagcttgtaaaaatgccagaagatggctctctttttgtaaatttcaaccctccacagttcatgattacagacaagaagaggatgtttttgatggagaagaacctgtcactactcagacctcagaagaaactaaaaaattatttctatcttatttaatgataaatagctatatggatgcaaacacagggcaaaggcttttgctgtacgatggagacttggatgaggctgttggcatgctactggaaggctgtcatgcagaatttgatggaaacacagccataaaagaatgtctcgatgtcttaagctcatctggtgtatttcttaataatgcttcaggtagagaaaaggatgaatgtacagctacaccaagtagtttcaataaatgtcactgtggagaacctgaacatgaagagactcctgaaaatagaaagtgtgctatagatgaagaatttaatgaaatgagaaatactgttatcaatagtgaattttctcagtcaggaaaactggcaagtacaatatcaattgatcctaaagttaacagttcacccagtgtgtgtgttcccagtctcatatcatatttaacacagactgaacttgcagacattagcatgcttagaagtgactctgaaaacatacttacaaactatgaaaatcaaagccgagtggaaacaaatgaacgtgcaaatgaatgtagtcattctaaaaacattcaaaactttccaagtgatttaatagaaaatcctattatgaaatcaaaaatgagtaaattctgtggtgtgaatgaaacagagaatgaagataatacaaacagggattcacctatctttgactattcccccaggctaagtgccttgttaagtcatgataaattgatgcacagtcagggaagttttaatgatacacacaccccagagagcaatggaaataagtgtgaagccccagccttatcattcagtgacaaaaccatgttgtcaggtcaaagaataggagaaaaatttcaagaccagtttctgggaattgcagctattaacatcagtttaccaggagagcagtatggacagaaatctttaaatatgatttctagtaatcctcaagtacaatatcacaatgataaatacatttcaaatacttctggtgaggatgaaaaaacacatccaggttttcagcagatgcctgaagacaaggaagatgagtctgaaatagaagagtattcctgtgctgtgactccagggggtgatactgataatgccattgtgtctcttacttgtgctacaccattgcttgatgaaaccatcagtgctagtgactatgaaacgtcactgctgaatgatcagcagaataacacaggaacagacactgatagtgatgatgatttttatgatactcccttgtttgaagatgatgaccatgattctttgcttcttgatggtgatgatcgtgattgcctgcaccctgaggactacgacacactgcaagaggaaaatgatgagacggcttctcctgctgatgttttttatgatgtctcaaaagagaatgaaaattccatggttccccagggggcaccagttggtagcttaagtgtgaagaacaaagcacattgtcttcaggatttccttatggatgttgagaaagatgaattagattctggtgaaaaaatacatttaaatcctgttggctcagataaggtgaatggacagtcactggaaactggatcagaaagggaatgcacaaatatccttgaaggtgatgaatctgactcattgactgattatgatattgtaggaggaaaagagagcttcactgcatcattaaaatttgatgacagtggcagttggagaggaagaaaggaagagtatgtaactggacaggaatttcactccgatactgatcatttagattctatgcaaagtgaagaaagttatggggattatatatatgacagtaatgatcaggatgacgatgatgatgatggcattgatgaagaaggaggaggtataagagatgagaatggaaagcccaggtgccaaaatgtggctgaagatatggatatccagttgtgtgcctctattttaaatgaaaacagtgatgaaaatgaaaatattaatacaatgattcttctggataaaatgcacagttgtagctctttagaaaaacagcaaagggtaaatgttgtacagctagcatcacctagtgaaaataacttagttactgaaaaaagcaaccttccagaatatacaactgagattgctggaaaaagcaaagaaaatctgttgaaccatgagatggtacttaaggatgtattgccgcctatcattaaagacactgaatctgaaaaaacttttggccctgcaagtatttcacatgataataataatatcagttcaacttctgaattaggtactgatctagcaaacacaaaggttaagttgattcaagggtcagaattgccagaattgactgattctgtgaaaggtaaagatgaatattttaagaatatgacaccaaaagttgactcatctcttgatcacatcatttgtactgagcctgatttaataggaaaacctgctgaggaaagccatttgtcattgatagcctctgtaactgacaaagatcctcaaggaaatggaagcgatctcattaaagggagagatggcaaaagtgatattctaatagaagatgaaacatcaattcagaaaatgtacttgggtgaaggagaagtgcttgtagaaggtctagtagaagaagaaaataggcatctcaaacttttgcctggtaaaaatacaagggatagtttcaagttaattaatagtcagtttccatttccacaaatcacaaacaatgaagaacttaatcagaaaggaagccttaaaaaagcaactgtaactcttaaagatgaaccaaataatctacaaataatagttagtaaaagtcctgttcagtttgagaatcttgaagaaatttttgacacatcagtttccaaagagattagtgatgacattacttcagacattacatcgtgggaagggaatacacattttgaggagtcattcactgatggacctgagaaagagcttgatctgtttacttacttaaaacattgtgctaaaaatataaaagcaaaagatgtagccaaaccaaatgaagatgtcccaagccatgttttaataactgcccctcccatgaaagaacatttacaattaggagttaataatacaaaagagaagtccactagtacccaaaaagactcacctcttaatgacatgatccaaagcaatgatctttgtagtaaagaaagcatctcaggaggaggaacagaaatttctcagttcacaccagaaagtattgaagccacactttcaatattatctcgtaaacatgtagaagatgttgggaaaaatgattttctgcagtcggagcggtgtgcaaatggattaggaaatgataactccagtaacactttaaatactgactattcattcttagaaattaataataagaaagaaagaattgagcaacagctaccaaaagaacaagccttgtctccaagatcccaagaaaaggaggttcagattcctgaattgtctcaggtatttgtggaggatgtaaaggatatcttaaaaagcaggttgaaagaaggtcatatgaaccctcaagaggttgaagaaccttcagcctgtgcagacactaaaattttaattcaaaatttaattaaaaggattaccacatcacagttggtaaatgaggcatctactgtgcccagcgactctcaaatgagtgactcttctggagtttcccccatgactaactcatcagaactaaagccagaaagtagagatgatcctttctgtattggaaatcttaagtctgagcttctccttaatatattgaagcaagatcaacatagccaaaaaattacaggagtatttgaattgatgagagaattaactcatatggagtatgacctagagaaaagaggcattacgtctaaagtacttccactgcagcttgaaaatattttctacaaactgcttgctgatggatattcagagaaaatagaacatgttggagactttaatcaaaaagcatgttctacatctgagatgatggaagaaaagccacatattcttggtgatattaaaagcaaagaaggaaactactattctcctaatttagaaactgtaaaagaaattggactagaaagctctactgtgtgggcatcaacattgccaagagatgagaagctcaaggatctgtgtaatgatttcccaagccatttggaatgtacttcagggtctaaagagatggcttctggagatagctcaaccgaacaattttccagtgaattacagcagtgtttacagcacactgaaaaaatgcatgagtatttgacattgcttcaagatatgaaaccccccttagacaaccaggaatctctggataacaacttggaagctttgaagaatcaacttagacagttggagacatttgaattgggattagctccaattgctgttattttaagaaaagatatgaagttggcagaagagtttttaaagtctcttcccagtgactttcccagaggccatgttgaagaattgagtattagccaccagagtttgaagaccgccttctcttccctcagcaacgtgtcttcagaaagaacgaaacagatcatgcttgcgatcgactctgaaatgtctaaactagcagtttcccatgaagaatttctgcataaacttaagtcattctcagattgggtatcagagaagagcaaatctgtgaaggatattgagattgtgaatgttcaagattctgagtatgtaaagaaacgtttggagtttctcaaggcaaataatgtattaaaagaccttggacataccaaaatgcagctggagactactgcctttgatgtgcagttcttcatttctgaatatgcacaggatctgtctcccaaccaaagcaaacaactgctgaggctcttaaatacaactcagaagtgttttcttgatgtacaggagtcagtaactacccaggtggaacgtttagagactcagttacatctagaacaagatcttgatgatcagaagattgtagcagagcgtcagcaggagtataaagagaaactccaagggatatgtgatcttcttacccaaactgaaaaccgcctaattggtcaccaagaagccttcatgattggagatggcacagttgagttaaagaaatatcagtccaagcaagaggaattacagaaagatatgcaaggaagtgcacaggcattggctgaagtagtgaaaaacacagagaacttcttaaaagagaatggtgaaaagctgtcacaggaagataaggctttgattgaacagaaacttaatgaagctaagataaagtgtgaacagcttaatttaaaagcagaacagtctaaaaaggagctggataaagttgtgacaacagcaatcaaggaagaaactgaaaaggtagcagcagtgaagcagctggaagagagcaaaaccaaaatagaaaaccttttggactggttgtcaaatgttgacaaagactcagaaagggcagggacaaaacacaaacaggtaatcgaacagaacgggacccattttcaagaaggtgatggcaagtcagcaattggagaagaggatgaagttaatggtaacctgttggagactgatgttgatgggcaagttggaaccactcaggagaatctgaatcagcaatatcagaaagttaaggcccaacacgagaagatcatctctcagcaccaagcagtgatcatagccactcagtctgcacaagtgttgcttgagaaacagggtcagtatctctctcctgaagaaaaagagaaactgcaaaagaacatgaaggaactgaaagtgcattatgaaactgcactggctgagtcagagaagaaaatgaagttaactcactctctgcaggaagaattagaaaagtttgatgctgactataccgagtttgagcactggctacagcagtcagaacaagaacttgaaaacctggaggcaggtgcagatgacatcaatggtttaatgaccaaattgaagaggcagaagagtttctcagaagacgttatttctcacaaaggtgacttgagatacatcacaatttctggaaacagagtgttggaagctgccaaatcttgcagcaagagagacggtggcaaggttgatacttctgcaacccacagagaagtgcagcgcaagttggatcatgctactgatcggttcaggtctctctactctaagtgcaatgttcttggaaataatcttaaagatctggtggataaatatcaacactatgaagatgcttcatgtggacttcttgctggactccaggcctgtgaggccacagcgagcaaacacttatctgaacctattgcggtggaccccaaaaatcttcaaaggcaattagaagagaccaaggctttgcaaggacagatatcaagtcagcaggttgctgtagagaaactgaagaaaacggctgaagtgcttttagatgccaggggatctttacttccagccaagaatgatatccagaaaacacttgatgacattgttgggagatatgaggatctgtccaagtctgttaatgaacgaaatgaaaaactccagataaccttgacccgttcactgagtgtgcaggatggcttggatgaaatgctggactggatgggaaatgtggaaagttctctgaaagaacaaggtcaagtgcctttaaactctactgctcttcaggatattatcagtaaaaacattatgttggaacaggatattgcaggtcgtcagagcagtataaatgccatgaatgaaaaagtgaagaaatttatggaaacaacagatccatccactgcatcctcactgcaagccaaaatgaaagacttgtctgctcggttttcagaagcaagtcataaacacaaagaaactcttgccaaaatggaggagctaaaaaccaaagtagaactgtttgagaacctctcagaaaagctccagacatttttagaaacaaaaactcaggctcttactgaagtagatgtgccaggaaaagatgttactgaattgtctcagtatatgcaggaatcaacttctgaatttttagaacacaagaaacatcttgaagttttgcatagtctcttgaaggagatatccagccatggcttaccaagtgataaggctttggtccttgaaaaaacaaataatttgtcaaagaaattcaaggaaatggaggataccatcaaagaaaaaaaagaagctgtaacttcttgtcaagaacagttggatgctttccaagttcttgttaaatcattgaagtcatggataaaagaaacaacaaaaaaagttcccattgtacagccttcttttggtgcagaggatttaggaaaatctttggaagacactaagaaattacaagaaaagtggagtttaaaaacaccagagattcagaaagtaaacaacagtgggatctcactatgtaacttaataagtgctgtgaccacccctgcaaaggcaatagcagcagttaaatcaggtggagcagtattaaatggtgaaggaacagccacaaatactgaggaattttgggcaaataaaggtttaacatccattaaaaaggacatgactgacataagtcatggttatgaagatcttggcctcttactcaaggacaaaatagcggaactgaacactaaactctccaaattgcaaaaggctcaggaagaatcaagtgcaatgatgcagtggttacagaaaatgaacaaaactgcaacaaaatggcagcagacacctgcacctacagatactgaagctgtgaagactcaagttgagcagaataagtcgtttgaggcagaactgaagcagaatgtaaacaaagtacaggagttgaaagacaaattgacagagctgttggaggagaacccagatactcctgaggcccccagatggaaacagatgttgacagaaatagattctaagtggcaagaactcaatcaattaacaattgatagacaacaaaaactggaagaatcctccaataatctaacccagttccagactgtagaggcccaattgaaacagtggcttgtggaaaaagaacttatggtcagtgttcttgggcccttgtcaattgacccaaatatgctaaacacacaaaggcagcaggtgcagattttgctgcaagaattcgccactcggaaacctcaatatgaacagctgacagcagctggtcagggcattctgagcaggcctggagaagacccttctttacgtgggattgtgaaagagcaactggcagctgtgacccaaaaatgggatagcctaacagggcaattgagtgacagatgtgactggattgaccaagccattgttaaaagcacacagtatcaaagcctgctgagaagcctttctgataaactgagtgacttggataataaactcagcagcagtctggctgtgagcacgcaccctgatgctatgaaccaacagttggaaacagcccaaaaaatgaagcaggagatacagcaggaaaagaagcagataaaagtggcccaggcactctgtgaggatttgtcagcactggttaaagaagagtacttgaaagcagaacttagtaggcaactagaaggcatcttaaaatcatttaaggatgttgaacagaaagcagagaatcatgtccagcaccttcagtcggcctgtgcaagctctcatcaatttcagcaaatgtctagagattttcaggcttggctggatacaaagaaagaagagcaaaacaaatctcatccaatatctgccaaactcgatgtcttggagtcattaattaaagatcataaagactttagtaaaactttgaccgctcagtctcatatgtatgaaaaaaccattgcagaaggtgaaaatctgttattaaaaacacaagggtctgagaaggcagccttacagttacagcttaatacaattaaaaccaattgggatacatttaataagcaggtgaaagaaagagaaaacaagttaaaagagtcattggaaaaagcccttaagtataaagagcaagtagagactctctggccatggatagacaaatgccaaaacaacctggaggaaataaaattttgcttggatcctgctgaaggagagaattctattgccaagttaaagtctctgcagaaggaaatggaccaacactttggtatggtagaattactgaacaacacagccaatagcttgctcagtgtctgtgagatagataaagaagttgttacagatgagaataagtcactgatccagaaggtggacatggtcactgaacaacttcacagtaagaaattctgtctggagaacatgactcagaagtttaaagaatttcaagaagtttccaaagaatctaaaaggcagcttcagtgtgcaaaggagcagctagatatccatgattcgctgggatcccaggcttacagtaacaaatacctgaccatgttgcaaactcagcagaaatcacttcaggccttgaagcatcaggtagatttggctaaaagacttgcacaggaccttgtggtagaggcctcagactcaaagggaacctctgatgttttattacaagtggaaaccatagctcaagagcatagtacactaagtcagcaggttgatgaaaagtgttctttcttagaaaccaagcttcagggcattgggcatttccagaataccattcgagaaatgttttctcagttcgcagagtttgatgatgaactggatagcatggctccagtggggagagatgcagaaacattgcaaaagcaaaaggaaactataaaagcctttctaaagaaactagaagccctcatggcaagcaatgacaatgccaataaaacctgcaagatgatgttagccacagaagaaacctctcctgaccttgttggaatcaaaagggacttggaggccttaagcaaacaatgcaacaagttactggaccgagcccaagccagagaagagcaggttgaagggacaattaagcgccttgaagaattttacagcaaattgaaagaattttctattctgctccagaaagccgaagaacatgaagagtcacaaggtcctgttggtatggaaacggagacaattaatcagcagcttaacatgttcaaggtattccagaaagaagagattgaacccttgcaaggtaaacagcaagatgtaaactggttaggtcaaggccttattcagagtgctgccaaaagcactagcactcagggcttggagcatgacctggatgatgtcaatgcacggtggaagactctcaataagaaggtggctcagcgagcagcccagctgcaggaggccttgctgcactgtgggaggttccaggatgccctggagtccctgctcagctggatggtggacactgaggagcttgtggccaatcagaagcccccgtcggctgagttcaaagtggtaaaggcccagatacaagaacaaaagcttctccagagattgttggatgaccgaaaatctacggtggaggtaatcaaacgagaaggagaaaaaattgctacaacagcagagcccgcagataaagtgaagattttgaaacagctcagtctcttggatagcagatgggaggcattgcttaataaagctgaaacaaggaatcgtcagttggaaggtatctcggtggtagcacagcaatttcatgaaaccttagaaccactgaacgagtggcttacaaccatagaaaagaggctggtgaattgtgaacccataggaacccaagcatctaaacttgaggaacaaattgcacagcacaaagccttagaagatgacatcatcaatcacaataaacatttacaccaggctgttagcattggccagtccttaaaggttttgagctccagggaggataaagatatggtgcagagtaaattagacttctctcaagtatggtacattgagattcaagagaaaagtcacagcaggtctgagctcctccagcaggccttatgtaatgctaagatttttggggaagatgaagttgaactgatgaactggctgaatgaagtgcatgacaaactgagcaagctctcagtccaggattacagcactgaggggctatggaagcagcagtctgaacttcgggttctgcaagaggacatcttactcaggaaacaaaatgtagatcaggctttactaaatggtttagaactacttaaacaaaccacaggtgatgaagttttaataattcaagataaattggaagccattaaagcaaggtacaaagacattactaaactgagcactgatgtggccaagactctggaacaggcgctgcagcttgcaaggcggctgcactccacacacgaagagctgtgtacctggctggacaaagtggaggtggaattactttcatatgaaactcaggttctgaaaggagaagaagcaagtcaagcacaaatgagaccaaaggaactgaaaaaggaagctaagaacaacaaagccttactggactcccttaatgaagtgagcagtgctttgctggaactggtaccatggagggcaagagaaggacttgagaaaatggtagctgaggacaatgagcgctaccgattagtgagcgacaccatcactcagaaggtggaggagatcgatgcagccattctgcgatcacagcagtttgaccaagcagctgatgctgagttatcctggattactgaaacagaaaaaaaattgatgtctctgggtgacatcaggcttgagcaagaccagacttctgctcagcttcaagttcaaaagacattcaccatggagattttgagacacaaggatattattgatgaccttgttaaatctgggcataaaatcatgaccgcatgcagtgaagaggaaaagcaatcaatgaagaaaaaactggacaaggtactgaagaactatgataccatctgccagattaattcagaaaggtatctgcagctggaacgggcacagtccctggttaaccaattctgggaaacatatgaagaactttggccatggctgacagaaacacaatcaatcatctctcagcttcccgccccagcccttgaatatgaaactctaaggcagcagcaggaagaacatcggcaactgcgtgagttgatagctgaacacaagcctcatatagataagatgaacaaaactgggccacagttactggaattgagccctggggaaggcttttctatccaagagaagtatgtggcagccgacaccctttacagtcaaattaaagaagatgtcaaaaagcgtgctgtggcactggatgaagccatttctcaatcaactcagttccatgacaagatagatcagatccttgagagcctggaacgcatcgtggaacgtctgaggcagccaccctctatctctgcagaggttgagaagatcaaggaacagatcagtgaaaataagaatgtgtcagtagacatggaaaagctacagccgttgtatgaaactcttaaacagaggggagaggaaatgattgctagatctggggggactgataaagacatatctgccaaagctgttcaggataagcttgaccaaatggttttcatttgggagaacatacacacactggtggaagagagggaagccaaactactggatgtgatggagctagcagaaaagttctggtgtgatcacatgtcattgatagttaccattaaagatactcaagatttcatccgggacctggaagatcctggaattgatccttcagtagtaaaacaacagcaagaagcagcagagaccataagggaagaaatagatggactacaggaggagctggatatagttattaacctaggttctgaactcattgcggcatgtggggagcctgataaacccattgtcaagaagagtatagatgagttaaattcagcatgggattctctaaataaagcttggaaagaccggattgacaaacttgaggaggcaatgcaggctgccgttcagtaccaggatggactgcaggcggtatttgactgggtagatattgcaggtggtaaattagcttcaatgtctccaattggaacagatctcgaaactgtcaagcagcagattgaagagctaaagcaatttaagtctgaggcctatcaacagcagatagaaatggaaagactgaatcatcaagcagagcttttgctaaagaaagtaacagaagagagtgacaaacacactgttcaagacccattaatggaactgaaattgatatgggatagcctggaggagagaatcatcaacagacagcataaactggagggtgctctattagccttgggtcagttccaacatgccctggatgagctcctggcatggctgacacacaccgagggcttgctaagtgagcagaaacctgttggaggagaccctaaagccattgaaattgaacttgccaagcatcatgtgctccaaaatgatgtattagcccatcagtccacagtggaagccgttaataaagcaggaaatgatctaattgaatcaagtgcaggagaagaagcaagcaaccttcagaacaagctagaggttttaaatcaacgctggcaaaatgttttggaaaaaacagaacaaaggaagcagcagctggatggtgccttgcgccaggccaaagggttccatggcgaaattgaggatttgcagcagtggctgactgacacggagcgtcatctgttggcatctaaaccgctgggaggtttaccggaaacagccaaggagcagcttaatgtccatatggaagtctgtgctgcctttgaagctaaagaagaaacatataagagtctgatgcagaaaggccagcagatgcttgcaagatgcccaaaatctgcagagacaaatattgaccaagacataaataacttgaaagaaaaatgggaatcggtggaaaccaaactcaatgaaaggaaaactaaactggaagaggctctcaacttggcaatggagttccacaattctctccaagacttcatcaactggcttactcaggctgaacagaccctaaatgtagcttctcggccaagtctcatcttggacacagtcttatttcaaattgacgaacacaaggtttttgccaatgaagtaaattctcatcgtgagcagataatagagctggacaaaactggaacccacctaaaatattttagtcagaaacaagatgttgttctaatcaagaatctacttatcagtgtacaaagtcgatgggaaaaagtggttcaacggttggtagagagaggaagatctttggatgatgcaaggaagagagccaagcagttccatgaagcttggagtaaacttatggagtggctagaagagtcagaaaagtctttggattctgaactggaaatcgcaaatgatccagacaaaataaaaacacaacttgcacaacataaggagtttcagaaatcactcggagccaagcattctgtctacgacaccaccaacaggactggacgttctctgaaggagaaaacctccctggctgatgacaacctgaaactggatgacatgctgagtgaactcagagacaaatgggataccatatgtggaaaatctgtggaaagacaaaacaaattggaggaagccctgttattttctggacaattcacagatgccctacaggctctcattgattggttatatagagttgaaccccagctggcagaagaccagcctgttcatggagacattgatttggtgatgaatctgatcgataatcacaaggccttccaaaaagagttggggaagaggaccagcagtgtgcaggccctgaagcgctcagcccgagaactcatagaaggcagtcgggatgactcctcctgggtcaaggtccagatgcaggaattaagcacacgctgggagaccgtgtgtgcactttctatatcaaagcaaacacggttagaagcagccctgcgtcaggcagaggaattccactcggtggtacatgccctcttggagtggctggctgaggcggagcaaaccctgcgtttccatggtgtcctcccagatgatgaggatgctctccggactctcattgatcagcataaagaattcatgaagaaactggaagaaaagagagctgaactaaataaagccaccactatgggcgacaccgttttggctatctgccaccccgactccatcactaccattaagcactggataacaatcatccgggcgaggtttgaggaggtgctggcctgggcaaagcaacatcagcagagattagcaagtgctctggctgggcttattgccaaacaggaattgttggaagctttgctggcttggttgcaatgggctgaaactacacttactgataaggataaagaagtcatcccccaggagatcgaagaggtgaaagcactcattgcagaacaccagaccttcatggaggaaatgaccagaaaacagcctgatgttgataaagtaacgaagacctataagaggagagctgctgatccttcctcattacaatcccatattccagtcttggataagggacgagcaggaagaaaacgctttccagcatcaagcttgtatccctctgggtcacagacacaaattgaaaccaaaaatcctagggtaaacttactggtgagcaaatggcagcaagtctggctcctggcgttggaaagaaggaggaaactcaatgatgccttggacagactagaggagctgagggaatttgctaactttgattttgatatctggcgcaaaaaatacatgcgatggatgaatcacaagaaatctcgagtgatggacttcttcaggagaattgataaagaccaggatgggaaaataacgcggcaggaatttattgatggaattctttcctcaaagtttccaaccagtcgcttggagatgagcgcagttgcagacatctttgacagagatggcgatggatatattgactactatgaatttgtagcagcccttcacccaaataaagatgcatataaacctatcacagatgccgacaaaatcgaagatgaggtgacaaggcaggtagctaagtgtaaatgtgcaaagcgatttcaagttgagcagattggtgataataaatacagggtaagttttcaaagtaattttggagactcccagcaactgcgactggtccggatcctgcggagtactgtgatggttcgtgttggaggtggatggatggcacttgatgagttcttagtgaaaaatgatccttgcagggttcatcatcatgggagtaaaatgttacgttcggaatcaaactcttcaattactactactcagcctactatagccaaaggaaggacaaacatggaactgcgtgagaagttcattttagcagatggtgccagccagggtatggctgctttccgaccccgaggccgaagatcccggccatcatcacgaggcgcttcacccaacagatccacttctgtgtccagtcaggctgcgcaggcggcctccccacaggtccctgccaccaccacacccaagggaacgccaatacaaggaagcaagcttcgacttccaggatatttatcagggaaaggcttccactctggggaggacagtggcttgataacaactgcagctgccagagtccgaacacagtttgctgattccaagaagactcccagccgaccaggaagtcgagctggaagcaaagctggcagcagggccagcagccgccgaggcagtgatgcatcagactttgacatttcagaaatccagtccgtgtgctcagatgtggaaactgtcccccagacacacagacctacaccccgagcaggttctcggccatccacagcgaagccttcaaaaatccccacgccccagaggaaatcacctgccagcaaattggacaagtcctcaaagagatagtgcaattggttctaccaaggcccttccttgagcatttattatttaagtttgaacgatgtaaaatatggtgtagaaattcttgtgaaatattgcaagaggcgagtttaaaattctgcagatggccttatttgtgtatttgtctttttattttatctgtataattttttttgtcagatattctggggttaaagtcacatcatatgtgaggaggaaaagtttaacatgaactaacatttctgcactgtaacgtgccgggcacacactaaactcagttactgtacctacaggtaagtctacatcctctctgacagccacagcactacatcaatccctgacgttagggatacctcatgacattttcctgtttttatggaaactctgagaagctgaatgatacatgcaggggatattttttgagatgatttaaatgtaaaccaaaagatggaagacaaaaagacaaacacacccacacgcagtctttgcagtatctgacagagaactcacaggaagttacttcaagcacttgccagtactatgatattcaagtaccttgcagcatttctctgccattgctttcaatgaggccagaggcatcctggatattagacctattatactgtaagaatataagtataaagtgcgttcatatacatgtgaggttttcttttgcttgagtggacagtagcacctgtatcattgaactcattttgtatcagagcaattttgcttgcagaaagctatgaaataaaacacgtcccttaactgcattgctatggaattaattttttttccccagggaaaactagtgtatttttttatgagcaatatcaatttggagtgaccaaaagatacttaaaaatgggtttattttgatttctcatctgaaataatcatgttctggtattatatctatctatatttaataaatatatacattttaatttattatgtgtactcacatactatagaaagatattagtatgcatttaataaaacatattcacttgaatatatgg

SEQ ID NO: 269260 - protein, 3060 aa, Artificial Sequence
  derived and/or modified sequence
MHSSSYSYRSSDSVFSNTTSTRTSLDSNENLLLVHCGPTLINSCISFGSESFDGHRLEMLQQIANRVQRDSVICEDKLILAGNALQSDSKRLESGVQFQNEAEIAGYILECENLLRQHVIDVQILIDGKYYQADQLVQRVAKLRDEIMALRNECSSVYSKGRILTTEQTKLMISGITQSLNSGFAQTLHPSLTSGLTQSLTPSLTSSSMTSGLSSGMTSRLTPSVTPAYTPGFPSGLVPNFSSGVEPNSLQTLKLMQIRKPLLKSSLLDQNLTEEEINMKFVQDLLNWVDEMQVQLDRTEWGSDLPSVESHLENHKNVHRAIEEFESSLKEAKISEIQMTAPLKLTYAEKLHRLESQYAKLLNTSRNQERHLDTLHNFVSRATNELIWLNEKEEEEVAYDWSERNTNIARKKDYHAELMRELDQKEENIKSVQEIAEQLLLENHPARLTIEAYRAAMQTQWSWILQLCQCVEQHIKENTAYFEFFNDAKEATDYLRNLKDAIQRKYSCDRSSSIHKLEDLVQESMEEKEELLQYKSTIANLMGKAKTIIQLKPRNSDCPLKTSIPIKAICDYRQIEITIYKDDECVLANNSHRAKWKVISPTGNEAMVPSVCFTVPPPNKEAVDLANRIEQQYQNVLTLWHESHINMKSVVSWHYLINEIDRIRASNVASIKTMLPGEHQQVLSNLQSRFEDFLEDSQESQVFSGSDITQLEKEVNVCKQYYQELLKSAEREEQEESVYNLYISEVRNIRLRLENCEDRLIRQIRTPLERDDLHESVFRITEQEKLKKELERLKDDLGTITNKCEEFFSQAAASSSVPTLRSELNVVLQNMNQVYSMSSTYIDKLKTVNLVLKNTQAAEALVKLYETKLCEEEAVIADKNNIENLISTLKQWRSEVDEKRQVFHALEDELQKAKAISDEMFKTYKERDLDFDWHKEKADQLVERWQNVHVQIDNRLRDLEGIGKSLKYYRDTYHPLDDWIQQVETTQRKIQENQPENSKTLATQLNQQKMLVSEIEMKQSKMDECQKYAEQYSATVKDYELQTMTYRAMVDSQQKSPVKRRRMQSSADLIIQEFMDLRTRYTALVTLMTQYIKFAGDSLKRLEEEEKSLEEEKKEHVEKAKELQKWVSNISKTLKDAEKAGKPPFSKQKISSEEISTKKEQLSEALQTIQLFLAKHGDKMTDEERNELEKQVKTLQESYNLLFSESLKQLQESQTSGDVKVEEKLDKVIAGTIDQTTGEVLSVFQAVLRGLIDYDTGIRLLETQLMISGLISPELRKCFDLKDAKSHGLIDEQILCQLKELSKAKEIISAASPTTIPVLDALAQSMITESMAIKVLEILLSTGSLVIPATGEQLTLQKAFQQNLVSSALFSKVLERQNMCKDLIDPCTSEKVSLIDMVQRSTLQENTGMWLLPVRPQEGGRITLKCGRNISILRAAHEGLIDRETMFRLLSAQLLSGGLINSNSGQRMTVEEAVREGVIDRDTASSILTYQVQTGGIIQSNPAKRLTVDEAVQCDLITSSSALLVLEAQRGYVGLIWPHSGEIFPTSSSLQQELITNELAYKILNGRQKIAALYIPESSQVIGLDAAKQLGIIDNNTASILKNITLPDKMPDLGDLEACKNARRWLSFCKFQPSTVHDYRQEEDVFDGEEPVTTQTSEETKKLFLSYLMINSYMDANTGQRLLLYDGDLDEAVGMLLEGCHAEFDGNTAIKECLDVLSSSGVFLNNASGREKDECTATPSSFNKCHCGEPEHEETPENRKCAIDEEFNEMRNTVINSEFSQSGKLASTISIDPKVNSSPSVCVPSLISYLTQTELADISMLRSDSENILTNYENQSRVETNERANECSHSKNIQNFPSDLIENPIMKSKMSKFCGVNETENEDNTNRDSPIFDYSPRLSALLSHDKLMHSQGSFNDTHTPESNGNKCEAPALSFSDKTMLSGQRIGEKFQDQFLGIAAINISLPGEQYGQKSLNMISSNPQVQYHNDKYISNTSGEDEKTHPGFQQMPEDKEDESEIEEYSCAVTPGGDTDNAIVSLTCATPLLDETISASDYETSLLNDQQNNTGTDTDSDDDFYDTPLFEDDDHDSLLLDGDDRDCLHPEDYDTLQEENDETASPADVFYDVSKENENSMVPQGAPVGSLSVKNKAHCLQDFLMDVEKDELDSGEKIHLNPVGSDKVNGQSLETGSERECTNILEGDESDSLTDYDIVGGKESFTASLKFDDSGSWRGRKEEYVTGQEFHSDTDHLDSMQSEESYGDYIYDSNDQDDDDDDGIDEEGGGIRDENGKPRCQNVAEDMDIQLCASILNENSDENENINTMILLDKMHSCSSLEKQQRVNVVQLASPSENNLVTEKSNLPEYTTEIAGKSKENLLNHEMVLKDVLPPIIKDTESEKTFGPASISHDNNNISSTSELGTDLANTKVKLIQGSELPELTDSVKGKDEYFKNMTPKVDSSLDHIICTEPDLIGKPAEESHLSLIASVTDKDPQGNGSDLIKGRDGKSDILIEDETSIQKMYLGEGEVLVEGLVEEENRHLKLLPGKNTRDSFKLINSQFPFPQITNNEELNQKGSLKKATVTLKDEPNNLQIIVSKSPVQFENLEEIFDTSVSKEISDDITSDITSWEGNTHFEESFTDGPEKELDLFTYLKHCAKNIKAKDVAKPNEDVPSHVLITAPPMKEHLQLGVNNTKEKSTSTQKDSPLNDMIQSNDLCSKESISGGGTEISQFTPESIEATLSILSRKHVEDVGKNDFLQSERCANGLGNDNSSNTLNTDYSFLEINNKKERIEQQLPKEQALSPRSQEKEVQIPELSQVFVEDVKDILKSRLKEGHMNPQEVEEPSACADTKILIQNLIKRITTSQLVNEASTVPSDSQMSDSSGVSPMTNSSELKPESRDDPFCIGNLKSELLLNILKQDQHSQKITGVFELMRELTHMEYDLEKRGITSKVLPLQLENIFYKLLADGYSEKIEHVGDFNQKACSTSEMMEEKPHILGDIKSKEGNYYSPNLETVKEIGLESSTVWASTLPRDEKLKDLCNDFPSHLECTSGSKEMASGDSSTEQ

SEQ ID NO: 269261 - protein, 7246 aa, Artificial Sequence
  derived and/or modified sequence
MHSSSYSYRSSDSVFSNTTSTRTSLDSNENLLLVHCGPTLINSCISFGSESFDGHRLEMLQQIANRVQRDSVICEDKLILAGNALQSDSKRLESGVQFQNEAEIAGYILECENLLRQHVIDVQILIDGKYYQADQLVQRVAKLRDEIMALRNECSSVYSKGRILTTEQTKLMISGITQSLNSGFAQTLHPSLTSGLTQSLTPSLTSSSMTSGLSSGMTSRLTPSVTPAYTPGFPSGLVPNFSSGVEPNSLQTLKLMQIRKPLLKSSLLDQNLTEEEINMKFVQDLLNWVDEMQVQLDRTEWGSDLPSVESHLENHKNVHRAIEEFESSLKEAKISEIQMTAPLKLTYAEKLHRLESQYAKLLNTSRNQERHLDTLHNFVSRATNELIWLNEKEEEEVAYDWSERNTNIARKKDYHAELMRELDQKEENIKSVQEIAEQLLLENHPARLTIEAYRAAMQTQWSWILQLCQCVEQHIKENTAYFEFFNDAKEATDYLRNLKDAIQRKYSCDRSSSIHKLEDLVQESMEEKEELLQYKSTIANLMGKAKTIIQLKPRNSDCPLKTSIPIKAICDYRQIEITIYKDDECVLANNSHRAKWKVISPTGNEAMVPSVCFTVPPPNKEAVDLANRIEQQYQNVLTLWHESHINMKSVVSWHYLINEIDRIRASNVASIKTMLPGEHQQVLSNLQSRFEDFLEDSQESQVFSGSDITQLEKEVNVCKQYYQELLKSAEREEQEESVYNLYISEVRNIRLRLENCEDRLIRQIRTPLERDDLHESVFRITEQEKLKKELERLKDDLGTITNKCEEFFSQAAASSSVPTLRSELNVVLQNMNQVYSMSSTYIDKLKTVNLVLKNTQAAEALVKLYETKLCEEEAVIADKNNIENLISTLKQWRSEVDEKRQVFHALEDELQKAKAISDEMFKTYKERDLDFDWHKEKADQLVERWQNVHVQIDNRLRDLEGIGKSLKYYRDTYHPLDDWIQQVETTQRKIQENQPENSKTLATQLNQQKMLVSEIEMKQSKMDECQKYAEQYSATVKDYELQTMTYRAMVDSQQKSPVKRRRMQSSADLIIQEFMDLRTRYTALVTLMTQYIKFAGDSLKRLEEEEKSLEEEKKEHVEKAKELQKWVSNISKTLKDAEKAGKPPFSKQKISSEEISTKKEQLSEALQTIQLFLAKHGDKMTDEERNELEKQVKTLQESYNLLFSESLKQLQESQTSGDVKVEEKLDKVIAGTIDQTTGEVLSVFQAVLRGLIDYDTGIRLLETQLMISGLISPELRKCFDLKDAKSHGLIDEQILCQLKELSKAKEIISAASPTTIPVLDALAQSMITESMAIKVLEILLSTGSLVIPATGEQLTLQKAFQQNLVSSALFSKVLERQNMCKDLIDPCTSEKVSLIDMVQRSTLQENTGMWLLPVRPQEGGRITLKCGRNISILRAAHEGLIDRETMFRLLSAQLLSGGLINSNSGQRMTVEEAVREGVIDRDTASSILTYQVQTGGIIQSNPAKRLTVDEAVQCDLITSSSALLVLEAQRGYVGLIWPHSGEIFPTSSSLQQELITNELAYKILNGRQKIAALYIPESSQVIGLDAAKQLGIIDNNTASILKNITLPDKMPDLGDLEACKNARRWLSFCKFQPSTVHDYRQEEDVFDGEEPVTTQTSEETKKLFLSYLMINSYMDANTGQRLLLYDGDLDEAVGMLLEGCHAEFDGNTAIKECLDVLSSSGVFLNNASGREKDECTATPSSFNKCHCGEPEHEETPENRKCAIDEEFNEMRNTVINSEFSQSGKLASTISIDPKVNSSPSVCVPSLISYLTQTELADISMLRSDSENILTNYENQSRVETNERANECSHSKNIQNFPSDLIENPIMKSKMSKFCGVNETENEDNTNRDSPIFDYSPRLSALLSHDKLMHSQGSFNDTHTPESNGNKCEAPALSFSDKTMLSGQRIGEKFQDQFLGIAAINISLPGEQYGQKSLNMISSNPQVQYHNDKYISNTSGEDEKTHPGFQQMPEDKEDESEIEEYSCAVTPGGDTDNAIVSLTCATPLLDETISASDYETSLLNDQQNNTGTDTDSDDDFYDTPLFEDDDHDSLLLDGDDRDCLHPEDYDTLQEENDETASPADVFYDVSKENENSMVPQGAPVGSLSVKNKAHCLQDFLMDVEKDELDSGEKIHLNPVGSDKVNGQSLETGSERECTNILEGDESDSLTDYDIVGGKESFTASLKFDDSGSWRGRKEEYVTGQEFHSDTDHLDSMQSEESYGDYIYDSNDQDDDDDDGIDEEGGGIRDENGKPRCQNVAEDMDIQLCASILNENSDENENINTMILLDKMHSCSSLEKQQRVNVVQLASPSENNLVTEKSNLPEYTTEIAGKSKENLLNHEMVLKDVLPPIIKDTESEKTFGPASISHDNNNISSTSELGTDLANTKVKLIQGSELPELTDSVKGKDEYFKNMTPKVDSSLDHIICTEPDLIGKPAEESHLSLIASVTDKDPQGNGSDLIKGRDGKSDILIEDETSIQKMYLGEGEVLVEGLVEEENRHLKLLPGKNTRDSFKLINSQFPFPQITNNEELNQKGSLKKATVTLKDEPNNLQIIVSKSPVQFENLEEIFDTSVSKEISDDITSDITSWEGNTHFEESFTDGPEKELDLFTYLKHCAKNIKAKDVAKPNEDVPSHVLITAPPMKEHLQLGVNNTKEKSTSTQKDSPLNDMIQSNDLCSKESISGGGTEISQFTPESIEATLSILSRKHVEDVGKNDFLQSERCANGLGNDNSSNTLNTDYSFLEINNKKERIEQQLPKEQALSPRSQEKEVQIPELSQVFVEDVKDILKSRLKEGHMNPQEVEEPSACADTKILIQNLIKRITTSQLVNEASTVPSDSQMSDSSGVSPMTNSSELKPESRDDPFCIGNLKSELLLNILKQDQHSQKITGVFELMRELTHMEYDLEKRGITSKVLPLQLENIFYKLLADGYSEKIEHVGDFNQKACSTSEMMEEKPHILGDIKSKEGNYYSPNLETVKEIGLESSTVWASTLPRDEKLKDLCNDFPSHLECTSGSKEMASGDSSTEQFSSELQQCLQHTEKMHEYLTLLQDMKPPLDNQESLDNNLEALKNQLRQLETFELGLAPIAVILRKDMKLAEEFLKSLPSDFPRGHVEELSISHQSLKTAFSSLSNVSSERTKQIMLAIDSEMSKLAVSHEEFLHKLKSFSDWVSEKSKSVKDIEIVNVQDSEYVKKRLEFLKANNVLKDLGHTKMQLETTAFDVQFFISEYAQDLSPNQSKQLLRLLNTTQKCFLDVQESVTTQVERLETQLHLEQDLDDQKIVAERQQEYKEKLQGICDLLTQTENRLIGHQEAFMIGDGTVELKKYQSKQEELQKDMQGSAQALAEVVKNTENFLKENGEKLSQEDKALIEQKLNEAKIKCEQLNLKAEQSKKELDKVVTTAIKEETEKVAAVKQLEESKTKIENLLDWLSNVDKDSERAGTKHKQVIEQNGTHFQEGDGKSAIGEEDEVNGNLLETDVDGQVGTTQENLNQQYQKVKAQHEKIISQHQAVIIATQSAQVLLEKQGQYLSPEEKEKLQKNMKELKVHYETALAESEKKMKLTHSLQEELEKFDADYTEFEHWLQQSEQELENLEAGADDINGLMTKLKRQKSFSEDVISHKGDLRYITISGNRVLEAAKSCSKRDGGKVDTSATHREVQRKLDHATDRFRSLYSKCNVLGNNLKDLVDKYQHYEDASCGLLAGLQACEATASKHLSEPIAVDPKNLQRQLEETKALQGQISSQQVAVEKLKKTAEVLLDARGSLLPAKNDIQKTLDDIVGRYEDLSKSVNERNEKLQITLTRSLSVQDGLDEMLDWMGNVESSLKEQGQVPLNSTALQDIISKNIMLEQDIAGRQSSINAMNEKVKKFMETTDPSTASSLQAKMKDLSARFSEASHKHKETLAKMEELKTKVELFENLSEKLQTFLETKTQALTEVDVPGKDVTELSQYMQESTSEFLEHKKHLEVLHSLLKEISSHGLPSDKALVLEKTNNLSKKFKEMEDTIKEKKEAVTSCQEQLDAFQVLVKSLKSWIKETTKKVPIVQPSFGAEDLGKSLEDTKKLQEKWSLKTPEIQKVNNSGISLCNLISAVTTPAKAIAAVKSGGAVLNGEGTATNTEEFWANKGLTSIKKDMTDISHGYEDLGLLLKDKIAELNTKLSKLQKAQEESSAMMQWLQKMNKTATKWQQTPAPTDTEAVKTQVEQNKSFEAELKQNVNKVQELKDKLTELLEENPDTPEAPRWKQMLTEIDSKWQELNQLTIDRQQKLEESSNNLTQFQTVEAQLKQWLVEKELMVSVLGPLSIDPNMLNTQRQQVQILLQEFATRKPQYEQLTAAGQGILSRPGEDPSLRGIVKEQLAAVTQKWDSLTGQLSDRCDWIDQAIVKSTQYQSLLRSLSDKLSDLDNKLSSSLAVSTHPDAMNQQLETAQKMKQEIQQEKKQIKVAQALCEDLSALVKEEYLKAELSRQLEGILKSFKDVEQKAENHVQHLQSACASSHQFQQMSRDFQAWLDTKKEEQNKSHPISAKLDVLESLIKDHKDFSKTLTAQSHMYEKTIAEGENLLLKTQGSEKAALQLQLNTIKTNWDTFNKQVKERENKLKESLEKALKYKEQVETLWPWIDKCQNNLEEIKFCLDPAEGENSIAKLKSLQKEMDQHFGMVELLNNTANSLLSVCEIDKEVVTDENKSLIQKVDMVTEQLHSKKFCLENMTQKFKEFQEVSKESKRQLQCAKEQLDIHDSLGSQAYSNKYLTMLQTQQKSLQALKHQVDLAKRLAQDLVVEASDSKGTSDVLLQVETIAQEHSTLSQQVDEKCSFLETKLQGIGHFQNTIREMFSQFAEFDDELDSMAPVGRDAETLQKQKETIKAFLKKLEALMASNDNANKTCKMMLATEETSPDLVGIKRDLEALSKQCNKLLDRAQAREEQVEGTIKRLEEFYSKLKEFSILLQKAEEHEESQGPVGMETETINQQLNMFKVFQKEEIEPLQGKQQDVNWLGQGLIQSAAKSTSTQGLEHDLDDVNARWKTLNKKVAQRAAQLQEALLHCGRFQDALESLLSWMVDTEELVANQKPPSAEFKVVKAQIQEQKLLQRLLDDRKSTVEVIKREGEKIATTAEPADKVKILKQLSLLDSRWEALLNKAETRNRQLEGISVVAQQFHETLEPLNEWLTTIEKRLVNCEPIGTQASKLEEQIAQHKALEDDIINHNKHLHQAVSIGQSLKVLSSREDKDMVQSKLDFSQVWYIEIQEKSHSRSELLQQALCNAKIFGEDEVELMNWLNEVHDKLSKLSVQDYSTEGLWKQQSELRVLQEDILLRKQNVDQALLNGLELLKQTTGDEVLIIQDKLEAIKARYKDITKLSTDVAKTLEQALQLARRLHSTHEELCTWLDKVEVELLSYETQVLKGEEASQAQMRPKELKKEAKNNKALLDSLNEVSSALLELVPWRAREGLEKMVAEDNERYRLVSDTITQKVEEIDAAILRSQQFDQAADAELSWITETEKKLMSLGDIRLEQDQTSAQLQVQKTFTMEILRHKDIIDDLVKSGHKIMTACSEEEKQSMKKKLDKVLKNYDTICQINSERYLQLERAQSLVNQFWETYEELWPWLTETQSIISQLPAPALEYETLRQQQEEHRQLRELIAEHKPHIDKMNKTGPQLLELSPGEGFSIQEKYVAADTLYSQIKEDVKKRAVALDEAISQSTQFHDKIDQILESLERIVERLRQPPSISAEVEKIKEQISENKNVSVDMEKLQPLYETLKQRGEEMIARSGGTDKDISAKAVQDKLDQMVFIWENIHTLVEEREAKLLDVMELAEKFWCDHMSLIVTIKDTQDFIRDLEDPGIDPSVVKQQQEAAETIREEIDGLQEELDIVINLGSELIAACGEPDKPIVKKSIDELNSAWDSLNKAWKDRIDKLEEAMQAAVQYQDGLQAVFDWVDIAGGKLASMSPIGTDLETVKQQIEELKQFKSEAYQQQIEMERLNHQAELLLKKVTEESDKHTVQDPLMELKLIWDSLEERIINRQHKLEGALLALGQFQHALDELLAWLTHTEGLLSEQKPVGGDPKAIEIELAKHHVLQNDVLAHQSTVEAVNKAGNDLIESSAGEEASNLQNKLEVLNQRWQNVLEKTEQRKQQLDGALRQAKGFHGEIEDLQQWLTDTERHLLASKPLGGLPETAKEQLNVHMEVCAAFEAKEETYKSLMQKGQQMLARCPKSAETNIDQDINNLKEKWESVETKLNERKTKLEEALNLAMEFHNSLQDFINWLTQAEQTLNVASRPSLILDTVLFQIDEHKVFANEVNSHREQIIELDKTGTHLKYFSQKQDVVLIKNLLISVQSRWEKVVQRLVERGRSLDDARKRAKQFHEAWSKLMEWLEESEKSLDSELEIANDPDKIKTQLAQHKEFQKSLGAKHSVYDTTNRTGRSLKEKTSLADDNLKLDDMLSELRDKWDTICGKSVERQNKLEEALLFSGQFTDALQALIDWLYRVEPQLAEDQPVHGDIDLVMNLIDNHKAFQKELGKRTSSVQALKRSARELIEGSRDDSSWVKVQMQELSTRWETVCALSISKQTRLEAALRQAEEFHSVVHALLEWLAEAEQTLRFHGVLPDDEDALRTLIDQHKEFMKKLEEKRAELNKATTMGDTVLAICHPDSITTIKHWITIIRARFEEVLAWAKQHQQRLASALAGLIAKQELLEALLAWLQWAETTLTDKDKEVIPQEIEEVKALIAEHQTFMEEMTRKQPDVDKVTKTYKRRAADPSSLQSHIPVLDKGRAGRKRFPASSLYPSGSQTQIETKNPRVNLLVSKWQQVWLLALERRRKLNDALDRLEELREFANFDFDIWRKKYMRWMNHKKSRVMDFFRRIDKDQDGKITRQEFIDGILSSKFPTSRLEMSAVADIFDRDGDGYIDYYEFVAALHPNKDAYKPITDADKIEDEVTRQVAKCKCAKRFQVEQIGDNKYRVSFQSNFGDSQQLRLVRILRSTVMVRVGGGWMALDEFLVKNDPCRVHHHGSKMLRSESNSSITTTQPTIAKGRTNMELREKFILADGASQGMAAFRPRGRRSRPSSRGASPNRSTSVSSQAAQAASPQVPATTTPKGTPIQGSKLRLPGYLSGKGFHSGEDSGLITTAAARVRTQFADSKKTPSRPGSRAGSKAGSRASSRRGSDASDFDISEIQSVCSDVETVPQTHRPTPRAGSRPSTAKPSKIPTPQRKSPASKLDKSSKR

SEQ ID NO: 269262 - DNA, 9183 bp, Artificial Sequence
  derived and/or modified sequence
atgcatagttcctcttactcttatcgctcctcagactccgtcttttctaacaccacctccacccggacttctttggacagcaatgaaaaccttcttttggttcattgcggacctaccctgataaatagttgtatctcattcggttccgagtcattcgacgggcacagactggagatgctccagcagatagcaaaccgggtccaaagagactccgtgatttgtgaggacaagctcatcctggccggaaatgccctccagagcgacagcaaaagacttgagtccggagtccagtttcagaatgaagccgagattgccggatacatcctagaatgcgagaacctgctgaggcagcacgtcattgatgtgcaaattcttattgatggcaagtattaccaggctgaccagctggtccagagggttgctaaactcagggatgagattatggctctaaggaacgaatgctcatccgtgtatagcaaaggccgcatcctgacgactgagcagactaagctcatgatctctggaataactcagagcctgaattccggattcgcccagacacttcacccatctctgacgtccggtctgacccagtcccttacaccatctctgaccagctctagtatgacctccgggttaagttcaggcatgacatcaaggctgaccccttccgtgacccccgcatatacacctggctttccgtctggtctcgtgcctaatttcagctccggagtggagcctaactcacttcagacactgaaactgatgcagatcagaaaaccccttttaaaaagcagtttgcttgatcaaaacctcactgaggaggaaattaacatgaagtttgtgcaagacctgcttaattgggtggacgagatgcaagtacagctcgaccggacagagtggggctccgacttgcccagcgtcgagtcacacttggagaatcataagaacgttcaccgtgccatcgaggagtttgagtcttccctgaaggaggccaagatttccgagattcagatgacggcacccctgaagcttacgtatgctgagaaattgcaccgcctagaatctcagtacgccaagctcttaaatactagccgcaatcaagaaagacaccttgatactcttcacaactttgtgagccgagcgaccaatgagctgatatggctgaacgaaaaagaggaggaagaggtggcctacgattggtctgagaggaataccaatattgcaaggaagaaggactatcatgcagagttaatgcgagagctggaccagaaggaggaaaatattaagtcagtgcaggagattgcagagcaactgttattagagaatcacccagctcgtctgacgatcgaggcctatcgagcagcaatgcagacccagtggtcctggattctgcagctgtgtcaatgtgtggagcagcacattaaggagaatacagcatattttgaattcttcaacgatgcgaaggaggccacggattatttacgaaacctaaaagacgctattcaacgcaaatattcttgtgatcgttccagctccatacacaagctggaggacctggtgcaggagagtatggaagagaaagaggagctactgcaatacaaaagcaccattgcaaatctgatgggaaaagccaagacgattattcagctgaaaccccgtaactcagactgccctctcaaaacaagcatcccaattaaagcgatctgtgactacagacagatcgaaatcacaatctacaaggacgacgagtgcgttctggccaataactctcaccgcgccaaatggaaggtgatctctcctaccgggaacgaggctatggtgcccagtgtgtgcttcaccgtgccaccacccaataaggaggcagtcgatttggccaatagaatcgaacagcagtaccagaatgtacttactttatggcacgaaagtcacattaacatgaagtccgtcgtctcctggcattacctgataaacgagatcgacagaattagggccagcaacgtggcttcaattaaaacaatgctacccggagaacaccaacaagttctgagcaacttgcagagtagattcgaggattttctcgaagattcacaagagagccaggttttttcaggttcagacattacccaacttgaaaaagaggtgaacgtctgcaagcagtactaccaggagcttctcaaatccgctgaacgggaggagcaggaggagagcgtatataacctgtacatcagtgaggtgcgcaatatcaggctgaggctggaaaattgcgaagatcgtctgattcgacagatacggactcctttggagcgcgatgatctgcatgaaagtgtatttcgcatcaccgagcaggaaaaattgaagaaggaattggagcgactgaaggatgatctgggaactattaccaataaatgcgaggagttctttagtcaggcagctgcgtcctccagcgtgcctacactgaggagtgagctgaacgtggtgttacagaatatgaatcaggtgtactcaatgtcaagcacgtacatagacaagctgaaaacagtgaacttggtgctaaaaaacacccaggccgcagaagccctcgtcaaactgtacgagacaaagctatgcgaagaggaggccgtgattgcggacaaaaacaacatcgaaaatctcatcagcaccctgaagcaatggaggtctgaagttgacgaaaagcgacaagtatttcatgccctcgaggacgagctgcagaaggccaaagctatatccgatgagatgttcaaaacctataaagaacgcgacctggactttgactggcataaggaaaaagccgatcagcttgtagagcggtggcagaatgtccatgtgcagatcgataatagactcagggacctggaaggaattggaaagtcccttaaatattacagagacacataccatcctcttgacgattggatccagcaggttgaaaccactcagaggaagattcaggagaatcaacccgagaattcaaagaccctggcgacacagcttaatcaacaaaaaatgttggtttcagaaatcgaaatgaagcagagcaaaatggatgagtgccagaaatacgccgaacagtacagcgcaactgtgaaggactatgagctccagactatgacatacagggctatggtggattctcaacagaaatcccctgtgaagcggagacgaatgcagtcaagcgctgacctcattatccaggaatttatggatctgagaacacggtataccgccttggtgactttgatgacacagtatataaagtttgccggagacagcttaaagcggctcgaagaggaggaaaaaagcctcgaggaggaaaagaaggagcatgtggagaaagctaaggaacttcaaaaatgggtaagtaacatctctaagacgctaaaagacgcagaaaaagcagggaaaccaccatttagcaagcagaagatcagctcagaggagatctccacaaaaaaggagcagctcagtgaagccctgcagaccattcaactgttcttagctaaacatggcgataaaatgaccgatgaagagaggaatgagctggagaagcaggtcaaaaccctgcaagagagctacaacctattgttcagtgaaagtctgaagcagttacaagagagccagacttccggcgatgtgaaggtcgaggagaagttagataaagtgatcgctggaaccatcgaccagaccaccggtgaagtgctgagcgtgtttcaggcagtgctgaggggactaatagattatgacactggaattagacttcttgagacgcagttgatgatcagcgggcttatctcgcccgagcttaggaagtgctttgatcttaaagatgcgaagagtcacggtctgatcgatgagcagattctttgccaactcaaagagctttcaaaggccaaagagattatctctgcagcatctccaaccactattccagtcttagatgccctcgctcaaagcatgatcaccgagtccatggcaattaaagtactggagatcctactgtcgactggctcactggtgatcccagccactggggagcagctgacacttcaaaaggctttccagcaaaatttggtgtcaagtgcccttttttctaaggtcctggagaggcagaatatgtgcaaggatctcattgacccctgcaccagcgaaaaagtctctctcatcgacatggttcagaggtcaacgctgcaggagaacactggcatgtggctcttgccagtgcgtccccaggagggcggccggattaccctgaaatgtggtcgaaacattagcatcctccgcgctgctcatgaaggtctgatagatagagagactatgtttaggttgctttcagcccagctgttgagcgggggcctgatcaactcaaactccggccagagaatgactgtggaagaagcagtcagagaaggtgtgattgaccgtgacacagctagttcaatactcacatatcaggtgcagacagggggaattatacaaagcaaccccgctaagaggctgacagtggacgaggcagtgcaatgtgacctgatcaccagttcctcagcccttctggtgctggaagcccaaaggggttatgtgggcctcatatggcctcattccggagaaattttccccacaagcagcagtctgcagcaggagctgattacgaacgagcttgcttataagatccttaatggccgccagaagatcgcggccctgtacatcccagaatcatcccaagtcatcgggctggacgcagcgaagcagcttggcatcatagacaataatacggctagcatccttaagaatattacactccctgataagatgccagacctgggcgatttagaagcttgtaaaaatgcaagaagatggctcagcttctgcaagtttcagccctctaccgtgcacgactatcgacaagaggaggatgtgttcgacggagaagaacctgtgactacccaaacctccgaggagaccaaaaaactgtttctctcatatttgatgattaactcttacatggacgctaatacaggccagcgtctgctgctgtacgacggcgacctggacgaggcagtggggatgttgctggagggttgccacgctgagttcgacggaaacactgcaatcaaggaatgcctggacgtgcttagcagttctggcgtattcctgaacaacgcctccgggcgcgagaaggacgagtgcaccgcaaccccttcctccttcaacaaatgtcactgcggagagccagaacacgaggagacaccggagaaccgcaagtgcgcaatcgacgaagagttcaacgaaatgcggaatactgttattaactcagaatttagtcagtcaggtaagttggcctcaactatctctattgacccaaaagtgaacagttctccctccgtgtgcgtgccttccctgatatcctatctgacacagactgaactggctgacatctctatgctgaggagcgactcagagaacatattgaccaactatgaaaaccagtctagagttgaaaccaacgagcgggctaatgagtgttctcattccaaaaacattcagaattttcctagtgatttaattgagaaccccatcatgaaatcaaagatgtccaaattttgcggcgtcaacgaaactgagaatgaagataacaccaacagagattcccccatcttcgattatagccctcggttaagcgccctcctcagccacgataaattgatgcactcacagggatcttttaacgacacccacactcctgaatccaacgggaacaagtgtgaagccccagcactttcctttagcgataagaccatgctgtccgggcaacggatcggggagaagttccaagatcaattcctgggaattgctgcaatcaatattagccttccgggcgaacagtacgggcagaagtcccttaatatgatatccagtaatcctcaggtacagtaccacaatgataaatacataagcaacacatcgggagaagacgagaagacccaccctggcttccagcagatgccggaagataaagaagacgagtccgaaatagaggagtactcttgtgcagtgactccaggaggggatactgacaacgcgatcgtgagcctgacatgcgccacacccttacttgacgagacaatctctgcctctgattacgaaacaagtctcctgaatgaccaacagaataataccggcactgacacagatagtgacgatgacttctacgacacgcccctgtttgaagacgacgaccacgattccctgctgcttgatggggacgacagggactgccttcacccggaggattacgatacgcttcaggaggagaacgacgagacggcatcccctgctgatgtgttttacgatgtctcgaaagagaacgagaacagcatggtcccacagggcgcgcccgtcggcagcctcagcgtcaagaataaggcccactgtctccaggattttctgatggacgtggaaaaagacgagcttgactcaggtgaaaagatccacctcaaccccgtcggtagcgacaaggtgaatggacagagtctggaaactggctctgaacgcgaatgcactaatatcctagaaggagacgagtccgacagtctcactgattatgacatcgtgggtggcaaggagtccttcacagcctccttgaagtttgatgatagcgggtcctggagaggccgcaaagaggaatacgtcacaggccaggagtttcattctgataccgaccacctggatagcatgcagtcagaggagagttatggagactacatctacgatagtaatgatcaggacgacgacgatgacgacggaattgacgaggaaggaggcggcatccgggatgagaatggtaaacctaggtgccagaatgtagccgaagacatggacatccagttatgcgctagcatactgaatgagaactctgatgaaaacgaaaacataaacactatgattctcctagacaagatgcacagctgctctagcctcgagaaacaacagagggtcaacgtcgtgcaactcgcctcgccctcagaaaataatctggtcaccgagaagtccaaccttcctgaatacaccaccgagattgccggcaagtcaaaagaaaacctgctgaaccatgaaatggtgttgaaggacgtcctccctccaatcattaaggacaccgaatctgaaaagacatttggcccggcttccataagtcacgataataataatattagctccacctcagagctgggaacagacctcgctaacaccaaagtcaagctgatacagggatctgagctaccagaactcacagatagtgttaaggggaaggacgaatacttcaagaacatgacccccaaagtggacagcagcctcgaccatattatttgcacggagcccgacctcataggcaagcctgctgaggagagccacctgtctctaattgcatctgtgacagataaggatccccagggaaatggcagcgacttgattaagggccgcgacggaaagagtgatatcttgattgaggatgaaacctcaatacagaagatgtacctcggagaaggggaggtattagtcgaggggctcgttgaggaggagaatcgccacctgaaactgctccctggaaagaacaccagagatagctttaaactcatcaattcacaattcccttttcctcagataaccaacaatgaggagctgaatcaaaaagggagcctcaaaaaggcaacagttaccttgaaggacgagcccaacaacctacagataattgtgtccaaatcaccagttcagttcgagaacctggaggagattttcgacacatctgtctccaaagagatctccgacgatatcaccagtgacattaccagctgggaagggaacactcactttgaggagtcttttacagatggacctgaaaaagagctggatctgttcacatacctgaagcactgcgcaaaaaatatcaaggcaaaagatgttgcgaagcccaatgaggatgtgccgtcccatgttctgattacagctcccccaatgaaagagcacttgcagttaggcgtgaacaacactaaagagaagtccacatctactcagaaggattctcccctgaacgacatgatccagtccaatgacctttgctcaaaagaaagcatttccggcggtggcactgagataagtcaattcactccagaatccatagaggccacccttagtattctgtcaaggaagcacgtggaagacgtcggaaagaacgattttctgcaaagcgagcgctgtgccaacggtctcggaaatgataactcctctaacaccctgaatacagactactcctttctggaaatcaacaataagaaagagaggatcgagcagcaactgccaaaagagcaggccctgagcccacggtcccaggaaaaagaggttcagatccccgagctctcgcaggtgttcgttgaagatgttaaggacatactcaaaagccgactgaaggaaggacacatgaatcctcaggaagttgaggagccttccgcctgcgccgataccaagatccttatccagaacttgattaagcgcatcacgacctcacaactggtaaatgaagccagtacagtgcccagtgacagtcagatgtccgatagtagcggcgtctcccctatgacaaattctagcgaactgaaaccagagagcagagatgatcccttctgcatcgggaatttgaaatctgagctgctcctgaacatcctgaaacaagatcagcactcacagaagattaccggggtcttcgaactgatgcgggaactcacccacatggaatacgatctggagaagagaggtatcacgtccaaggtactccctttgcagttagaaaatattttctacaagctgctggcagatggctatagcgagaaaattgagcacgtcggcgacttcaaccagaaggcgtgttctacgagcgagatgatggaggaaaagcctcacatcttgggggatattaaaagcaaagaagggaattattacagccccaatttggagaccgtgaaagaaataggtctggagtcgtcaaccgtgtgggccagcactcttccgcgagacgaaaagttgaaagacctgtgtaatgactttccctcccatttggagtgcacatctggatccaaggaaatggcaagtggcgacagcagtaccgaacagtag

SEQ ID NO: 269263 - DNA, 21741 bp, Artificial Sequence
  derived and/or modified sequence
atgcactctagttcatacagctatcgtagtagcgacagtgttttttccaatactaccagtactcggaccagcctggactcaaacgaaaacctactgctcgttcactgtggccccaccctgattaattcatgcatatcgtttggtagtgagagttttgacggccacagactcgaaatgctgcaacagatagctaatcgggtacagagggactctgtgatctgtgaagataagctgatcctcgccggcaacgctctccagtccgacagtaagcgactcgagagtggggtgcaatttcaaaacgaggccgagatcgcagggtatatcttggagtgtgaaaacctgttgcggcagcatgtgatcgatgtgcaaattctgatcgacggaaagtactaccaggcagatcagctcgtccagagggtcgcaaagctgcgcgatgaaatcatggcactcagaaacgaatgtagctcggtctattccaaaggacgcatcctcacaacagaacagaccaagctgatgatctctggaattacacaaagtctaaacagtggctttgcccaaactctacatccttcgctgaccagcggccttacccagtccctcactccttccttgacctccagttcaatgacatcagggctgtcctcaggtatgacaagccgtctcactccttctgtaacacccgcatacacacctggatttccaagcggtctcgttcctaatttttcatcaggtgttgaacctaatagcctgcagactctaaagttaatgcagatcaggaagcccttacttaagtcaagccttcttgatcagaatctgaccgaggaggagatcaacatgaaattcgtgcaggaccttctgaattgggtggatgaaatgcaggtgcaacttgacaggaccgaatggggcagcgatcttcccagtgtggagagccacttggaaaaccataagaatgtgcaccgggccatcgaagaattcgagtcctctctcaaggaggccaagatctccgagattcaaatgaccgccccgttgaaattaacctatgctgaaaagctgcaccggcttgagtctcagtacgccaagctactgaacacaagccggaaccaagagcggcacctggatacactgcacaactttgttagccgagcgacaaatgagctgatttggcttaacgaaaaagaagaggaggaggtggcgtatgactggtcagagaggaatactaacatcgccaggaagaaagactaccacgcagagctcatgagagaactggaccagaaagaggaaaatatcaagtcagtccaggagattgctgaacagctcctcctcgagaaccaccccgctcgactgacaatcgaggcctaccgcgctgcgatgcagacgcagtggtcgtggatcctgcagctttgtcaatgcgtcgaacaacatattaaggaaaacactgcttatttcgagttctttaacgatgcaaaagaggcaaccgactatctgagaaatcttaaagacgcaatacagaggaagtatagttgcgaccgctccagctctatccataaactggaagatctggtccaggaaagcatggaagaaaaggaagaacttctacagtacaagagcactatagccaatcttatggggaaggccaaaactatcatacagctgaagcctcggaatagcgactgccccctgaaaactagcattcctatcaaagcaatctgtgactataggcagatagaaatcactatctacaaggacgatgaatgtgttcttgcaaacaattcccatcgggctaaatggaaagtgatatctcctaccggcaacgaagccatggtcccgagcgtgtgttttacggttcctcctcccaacaaggaggctgtcgatctggccaataggatagaacagcagtaccagaatgtacttaccctctggcacgaaagccacatcaatatgaagagcgtggtcagctggcactatctaataaacgagatcgataggatccgggcgagtaacgtggcttcaataaagaccatgctgcctggggaacaccagcaggtcctgagcaacctccagagcagatttgaagacttcctggaagatagccaggaatcccaggtgttctccgggagcgatatcactcagctcgagaaggaagtgaatgtttgcaagcaatactatcaggagctactgaagtccgctgaaagggaagagcaggaagaaagtgtgtataatctgtacattagcgaagttcggaacattagactgcggctggaaaattgcgaggatcggttaatccggcaaattagaactcctctggaaagggatgatctccacgagtccgtgtttcgaataactgagcaggagaagctgaaaaaagaactggagcgtctgaaggatgacctcggcaccatcacaaataagtgtgaggaattcttttcccaggccgccgccagttctagcgtccctactctgcgctctgaactaaacgtggtattacagaacatgaatcaagtctactccatgtcctccacttacatcgacaagttgaagaccgttaatctcgttctgaagaacacccaggctgcagaagccctggtcaagttgtatgagacgaagttgtgcgaggaggaggccgtgatcgccgacaagaataacatcgagaatctgatctcgactctcaaacagtggcgctcagaagtggacgagaaacgtcaggtgttccacgctctcgaggatgaattgcagaaggcgaaagcaatatcagatgagatgtttaagacatataaggagagggacctagacttcgactggcataaggaaaaggccgaccagttggtggaacgatggcaaaatgtgcacgtgcagattgacaatagactgcgggatttagagggcatcggcaagagcttgaaatattacagagacacttaccaccccctagacgattggattcaacaggtggagaccacacagagaaaaatccaagaaaatcagcctgaaaactctaaaactttggctacacagctcaatcaacagaaaatgctagtgagtgagatcgaaatgaaacagagtaagatggacgagtgtcagaagtacgccgagcaatactccgcgacagtcaaggactacgagcttcagaccatgacgtaccgagctatggtcgatagccagcaaaaaagtcccgttaagcgcagaagaatgcagtccagcgctgacctgatcatacaggagttcatggacttgcgcacacgctataccgcactggtgacactcatgacccagtacataaagtttgccggcgattccctaaaacggttagaggaagaagagaaatctctagaggaggagaagaaggagcacgtggagaaagccaaagaactccagaaatgggtgtcaaacatatctaaaacattaaaggatgccgagaaagcaggcaagccacccttttcaaaacagaaaataagtagtgaagaaatcagcacaaagaaggaacaacttagtgaggctttgcagacaatccaactgttcctagctaagcatggggacaaaatgacggatgaggaaagaaatgaactggaaaagcaggtgaagacgttgcaggaaagctacaacctgctgttcagcgaatcccttaagcagctacaggagtcccagacttcaggagatgtaaaggtggaagaaaagcttgacaaagttattgcagggaccattgatcagacaaccggggaggtgttaagtgtcttccaggccgttttacgcggcctaattgattacgacaccggcattaggctgttagagacacagctgatgatcagcgggctcatctcccccgaactgaggaaatgttttgatctgaaagacgccaaatctcacggcctgatcgatgagcagattctttgccagttgaaggagctatccaaagcgaaggagatcataagcgccgcttcacccaccactattccagtgcttgacgctctcgcccaatctatgatcactgagagcatggcgatcaaagtgctggagatacttctgagcaccggtagtttagtgattccagcaactggcgagcaactcacactgcagaaagcctttcaacagaaccttgtttcttctgcactgttttcaaaagtgcttgaaagacagaatatgtgcaaggacctgatcgacccttgtaccagcgagaaggtgagcctgatcgatatggtccagagaagcacgctgcaggagaacacaggcatgtggctcttgccggtccgaccccaggaggggggccggataaccctcaaatgcggacggaacatctcgattctgcgggcagcacacgagggtctcattgatagagaaactatgttccggctcttgagcgcccagctcctgtccggcggcctgatcaattcaaattctggccagagaatgactgtagaagaggctgttagggagggagttattgacagggacaccgcaagctctattctgacctaccaggtccagaccggcgggatcattcaatctaacccagccaaaaggctaaccgttgacgaagctgtacagtgtgaccttatcacctctagcagtgccctcttggttctggaggctcagcgcggatatgtgggactgatttggccacacagcggcgaaattttccccacaagctcttccttgcagcaggagcttatcacgaacgagttagcttacaaaatcctcaatggaagacagaagatcgcagctttatacatccccgagagttcacaagttatcggactggacgcagctaaacaactgggcattatagacaataacacagccagcatcttaaaaaacattaccctccccgataaaatgccagacctcggcgacctggaggcatgcaaaaatgccagacggtggttaagcttttgtaagttccagccaagcactgtgcacgactatcgccaggaggaagatgtgtttgacggggaagagcctgtgaccacgcaaacatcagaagaaactaaaaagctattcctgtcttacctgatgatcaactcttacatggacgcaaataccggtcagcgccttttgctgtacgacggggatctggacgaggcagttggcatgctcctcgagggatgccacgcggaatttgacgggaataccgcaatcaaagagtgcctagatgttctaagcagcagcggggtgtttctgaataatgctagcggaagagagaaagacgagtgtacagccacaccatcttccttcaacaagtgccactgcggggaaccagaacacgaggagactcccgagaaccgaaagtgtgccatagatgaggagttcaacgagatgcgaaacaccgtgattaactcagagttttctcagtcgggtaaactggcgagtactattagcattgaccccaaagtgaactcaagcccttcggtttgtgtgccatccctgatttcgtatttgacgcaaactgagctagccgacatatccatgctgcgctcagatagtgaaaatattcttactaattacgaaaatcagtctcgcgtggagactaacgagcgggccaacgagtgctctcacagcaagaacatacaaaacttcccctccgatttgattgaaaaccccattatgaagagcaagatgtcgaagttttgcggcgtgaatgaaaccgaaaacgaagacaatactaaccgcgattcccctattttcgactattccccaaggctgtccgctctgctcagccacgacaagctcatgcatagccaggggagctttaacgacacccataccccagagtcaaatggcaacaagtgcgaagcccctgccttgtccttcagtgacaaaacaatgctgtccggtcagaggattggcgagaagttccaggatcaattccttggaatagctgccatcaatattagtctcccgggtgagcagtacggacagaagtccctgaacatgatctctagtaacccccaggtccagtaccacaatgataagtacatttcaaacacgtccggtgaagacgaaaagacccacccggggttccaacagatgccggaggataaggaggacgagtcggagatagaggaatactcctgcgcggtgacacctggcggcgacacagataatgcaattgtgtcgttgacctgtgcgacgcctttgctggacgagaccatcagcgccagcgactacgagacttccttattgaacgatcagcaaaacaacacagggacggatacagacagtgatgacgacttttacgacaccccattgttcgaagatgatgatcatgacagcctgctgctggacggcgacgaccgggactgtctacaccctgaagattatgacacactacaggaggagaacgacgagacagcaagtcccgccgacgtgttctatgatgtcagtaaagaaaacgagaattctatggtgccgcaaggtgcacccgttggctccctgtctgttaaaaacaaggcccactgtttacaggatttcctcatggacgttgagaaggatgagctcgactcaggagaaaagattcacctgaatcccgttggatctgacaaggtgaacggacagtcactcgaaaccggaagtgaacgggagtgtactaacatcctggagggggatgaatccgattcgttgacggattacgacatcgtaggaggaaaagaaagtttcacagccagtctgaagttcgacgactccggttcttggcggggcagaaaagaagagtatgtcacaggccaggagtttcacagtgacaccgaccacctagactccatgcagagcgaggagtcatatggggactacatctacgattctaatgatcaggatgacgatgatgacgacggtattgacgaggaaggcgggggtattcgggatgaaaatggcaagccccggtgtcaaaatgtggctgaggatatggatatccagctctgtgcatctattttgaacgagaattccgatgagaacgagaacatcaatacaatgattctcctggataaaatgcattcttgctcatcactcgagaagcagcaaagagtcaatgtggttcaactcgcaagtcccagcgaaaacaatttagtgactgaaaagagtaatctgccggaatataccaccgagatagccggcaaaagcaaagagaacctcttgaatcacgagatggtcttaaaagacgtgctgcccccgattatcaaagatacagaatccgagaagaccttcggcccggcctccatctcccatgataataataacatctcttcaacaagcgagctcgggactgacctagcgaacacgaaagttaagctcatccaggggtctgaactgcctgaattgacagattcagtgaagggcaaggatgagtacttcaagaacatgacccccaaggtagatagcagtctcgaccatatcatatgtacagagcccgacctgatagggaagcccgctgaagagagtcatctgtccctgattgctagtgttaccgataaagaccctcaggggaatggaagcgatctgattaagggtagagacggcaagtctgacatccttatcgaggatgaaacaagtatccaaaagatgtacctaggcgaaggggaggtgctggtagaggggcttgtcgaggaggagaacaggcatctgaagcttctgcctggtaagaacaccagagattcttttaagctcataaatagccagttccccttcccgcagataactaataatgaagaattgaaccaaaagggcagcctcaaaaaggcgactgtgaccttgaaggatgagcccaacaatctgcagataattgtgtccaagtcacccgtgcaatttgagaatctggaggaaatctttgataccagtgtcagcaaagagatctccgatgacatcacatcagacatcacatcctgggagggaaatacccacttcgaggagagcttcaccgacggcccggagaaggagctggacttattcacctatttaaagcactgcgccaagaacatcaaggcaaaggatgtggccaaaccaaatgaagacgtgcctagccacgtgttgatcactgccccgcctatgaaagaacatctgcagctcggagtcaacaataccaaggagaaatcaacctccacccagaaagattctccccttaatgatatgatccagtcaaacgatctgtgcagtaaggaatccatctccgggggtggtactgagatctcccagtttacccccgagagcattgaagcaaccctgtccatactatcacggaaacatgtggaagatgtgggtaagaatgatttcctgcagagtgaaagatgcgccaacggattgggcaacgacaattccagtaacactctcaataccgattatagctttctggagataaacaacaaaaaggagagaatcgagcagcagctgccgaaggaacaggctttgagccctcgatctcaggagaaagaagtccaaattccagaactctcccaggtttttgtggaagatgtaaaagacattctgaagtcacggctgaaggagggacatatgaatccccaggaagttgaagaaccgagcgcatgcgcagacaccaagattctgatccagaatctgataaaacgaataaccacaagccagctggttaacgaagcatctaccgtgccctctgactcccaaatgagcgacagtagtggggtgtcgcctatgactaacagttcagagttaaaacccgaatcccgcgacgaccctttttgtatcgggaacttgaagtctgagctgttactgaatatcttgaagcaagaccagcattcccagaaaatcacaggcgtgttcgaactgatgagggagctgacccacatggagtacgatcttgagaagaggggaataacatcaaaggtcctgccactccagctggaaaacattttctacaaactgctcgcagacgggtattccgaaaaaatcgagcacgttggtgacttcaatcagaaggcctgttccactagcgaaatgatggaggagaaacctcacatcctaggggatatcaagagtaaagagggcaattactactctccgaacttagagaccgttaaagaaatcggactcgagagtagtacggtgtgggccagcacacttcccagggacgaaaagctgaaagacctctgcaatgacttccccagtcacctagagtgtaccagcggttccaaagagatggcaagtggtgacagctccaccgagcagttcagttctgaattacagcagtgcctgcagcacacagagaaaatgcacgaatacctgacactgctgcaggacatgaagcccccgctggacaaccaggagtcactcgataacaacctcgaagccttaaagaaccagctgaggcagctagaaacctttgaattaggtctggccccaattgcagtgatcctgagaaaagacatgaaacttgctgaggaattcctgaaatccctgccgtccgactttcctcgcggacacgtcgaggagttgtcaatctcccaccagtcccttaagaccgcattcagcagcctctcaaacgtgtcatcagaaagaaccaaacagatcatgttagccatagatagtgagatgagtaagttggctgttagccacgaggaatttctgcacaagctcaaatcattcagcgactgggtctctgagaagagcaaatcagtgaaggacattgagatcgtaaatgtacaggactctgagtatgtgaagaaacgactggagttcctgaaagccaataacgtgctaaaggatctaggccatacaaagatgcagttggaaactaccgccttcgacgtgcagtttttcatcagtgagtacgcccaggatctgtcccccaaccaatccaagcaactgctacgcctcctcaacaccacccagaaatgcttcttagacgtgcaagagtcagtgacaacacaagttgaacggctcgagacacaactgcatctcgaacaggacttggacgaccagaaaattgtcgcagaacggcagcaggagtacaaggaaaaattacaggggatctgcgatctcctcacacagaccgagaaccggctgattggtcaccaagaggcatttatgattggagatggtaccgtcgaacttaagaagtaccaaagcaaacaggaagaactccagaaggacatgcagggaagtgcacaagccctggccgaggtggtgaaaaataccgagaatttcctcaaggagaatggagaaaagctctctcaggaggacaaggctctcatagaacagaaattaaatgaggccaaaattaaatgcgagcaactaaacttaaaagccgagcaatcaaaaaaagaactggataaggtcgtcacaacagcgattaaagaagagactgaaaaagtggccgctgtcaaacagctggaagagtctaaaacaaaaattgaaaatctgctcgactggctgagtaacgtagacaaggatagtgagagggcgggcaccaagcataagcaggttatagaacagaacgggacacactttcaggagggcgacgggaagtcagcgatcggggaagaagatgaagtgaatgggaacctgctcgagacggacgtcgatgggcaggttggtaccacccaagagaatctgaaccaacagtaccaaaaggtcaaagcccaacacgaaaagattattagccagcatcaggccgtcatcatcgctactcaatcagcccaggtcctgcttgaaaagcagggacaatatttgtcaccagaggagaaagaaaagctgcagaagaacatgaaagagctcaaggtgcactacgagactgctttggccgagagtgaaaaaaaaatgaagctgacacacagtttgcaggaggaacttgaaaagtttgacgctgattatactgagttcgaacactggctccaacagtccgagcaggaactggagaaccttgaggctggagccgatgacattaatgggctaatgaccaagctcaagaggcagaagagtttctctgaggatgtaataagtcataagggtgatctgcggtatattaccattagcgggaaccgcgttcttgaagccgcaaaaagctgttcgaagcgcgacggaggcaaggtagacacctcagccacccaccgagaggttcagagaaaactagaccatgctacggaccgctttcgatccctgtactctaaatgcaatgtgcttggaaacaacctgaaagatctcgtcgataaatatcagcactatgaagacgcttcttgcggccttctggctggactccaggcatgtgaggcaaccgcctccaagcacctcagcgagccaatcgcagtggatcccaagaacctgcagcgacagctggaggagacaaaagccctacagggccagattagctctcagcaggtggccgtggagaagctgaagaaaacagccgaagtgctgttagacgcaagaggatccctgttgcctgccaaaaacgatatacagaagacactggatgacatcgtgggcagatacgaagacctgtcaaaatctgtcaatgagcgtaatgagaagctacagattaccctcacacggagtctgtctgtccaggacggccttgatgaaatgctggactggatggggaacgtcgaatcatctctgaaagagcagggacaagtcccactcaattccaccgcgctgcaagacatcatcagtaagaatattatgcttgagcaggatatcgcaggtcgacaaagcagcatcaacgcgatgaacgagaaagtgaaaaaatttatggaaaccacagacccgagtacagcaagctctctccaagccaagatgaaggatctaagcgccaggttctccgaggctagccataaacataaggaaacactagctaaaatggaggaattaaagacaaaagttgaattgttcgagaatctcagtgaaaaactccagacatttctggagacaaaaacccaagcactgactgaagtcgacgtgcctggcaaagacgtgaccgagctgtcacaatacatgcaagagtccacatctgaattcctcgagcacaaaaagcatctggaggtgttacactccctcttgaaagagatcagtagtcacggcctcccgtctgataaagccttggtgctcgagaagacaaataacttgagtaagaaattcaaggaaatggaagacacaatcaaagaaaagaaggaagcggtcacatcctgtcaagaacagctagacgctttccaggtgcttgtgaagtctctgaagagctggattaaggaaactacgaaaaaagtcccgattgtccagccaagtttcggagctgaagatctgggaaagagcctagaagacactaagaaactccaggagaaatggagcctcaaaacccccgaaattcagaaagtgaacaatagtggcatttctttatgcaatcttattagtgccgtgaccactcccgcgaaggccatcgccgccgtcaagtccggtggtgctgtgctgaatggagagggtaccgctacaaacacagaggaattctgggctaataagggactgaccagtataaaaaaagatatgacggatatttctcacggctacgaggacttgggcctcttgctaaaggacaagattgctgaactgaacacgaagctttctaagctccaaaaggcccaggaggaaagctccgccatgatgcaatggctgcaaaagatgaataagactgccaccaaatggcagcagaccccagccccaacagatactgaggcagtgaagacacaggtcgaacagaataagagctttgaagccgaattaaagcagaatgtcaataaggtccaggaactgaaggacaaactcacagagctgttagaagagaatccagacacccccgaagctccccggtggaaacagatgttaaccgagattgattccaagtggcaggagttgaaccagctcacgattgatcgccaacagaagcttgaagagtcctccaataatctgacccagttccagacggtcgaggcccagctgaaacagtggctggttgagaaggaactcatggtgagtgttttgggccctctgagcatagatcctaatatgctcaacacccagcgtcaacaggtccagattttgctccaagaattcgccactcggaagccgcagtatgagcaattgaccgccgcaggccaaggaattctgtcacgcccaggcgaagacccttcactcaggggcatcgtcaaagaacagctagccgccgtcactcagaagtgggatagccttaccggtcagctgtctgacaggtgcgactggatcgatcaggcaatagtgaaaagcacacagtatcagagtctgttgaggagtctttcagacaagttgtcagacctggataacaagctgtcctctagcctcgctgtgtcgacgcatcccgacgcaatgaatcagcaactggagacagcgcagaaaatgaagcaggaaatccagcaggagaaaaaacagattaaggtggcccaagcgctttgcgaggacctgtccgctctcgtcaaagaggagtatttgaaagccgagctatctagacagttggaagggattctgaaaagctttaaagatgtggagcaaaaagcagaaaatcacgtccagcacttacagtccgcttgtgcttcaagtcaccaattccagcagatgtcccgggattttcaggcctggctggatacaaagaaggaagaacagaacaaatcacacccaatatcagcgaaactggacgtgctagagtctcttattaaagatcacaaggacttttccaaaactctgactgctcagagccatatgtacgagaagactattgcagagggagaaaacctgttactgaagacgcaggggagcgagaaggccgcccttcagctccagttaaataccataaaaaccaattgggacactttcaacaaacaagtgaaggagcgcgaaaacaagctgaaggaatctctcgagaaagccctcaaatacaaggagcaggtggagacattgtggccctggattgacaagtgccagaacaatctagaagaaattaaattctgcctggatccagctgaaggtgagaattcaattgcaaagctgaagtcactgcagaaagagatggaccagcatttcggcatggtggagctgctgaacaatacggccaactccctgcttagcgtttgcgagatagacaaagaggtggtgacggatgagaacaaatccctaatccagaaagttgatatggtgacagagcaattgcacagcaaaaaattctgtctggagaacatgactcagaaattcaaggagttccaggaggttagtaaggaatcaaaacgccagctgcagtgcgcaaaagaacagctggacatccacgattccttgggctctcaggcctactccaataaatatcttactatgctccagacacagcaaaaaagccttcaggctctcaagcatcaggtcgatcttgccaaaaggctggcccaagacctcgtagtcgaagcatcagacagtaagggaactagcgacgtactgctgcaggtagaaacaattgcccaagaacactcaacgctgtcccagcaggttgatgagaagtgcagcttcctcgagaccaaactgcagggcattggacattttcaaaacacaatcagggagatgttcagccagtttgccgaattcgacgatgagttagatagcatggcaccagtgggccgggatgctgagaccctgcagaaacagaaagagacgataaaggcctttctgaaaaagctggaagccctgatggcgtccaatgacaacgcgaataagacatgtaagatgatgctagccactgaagagacctcccccgatctggtaggcatcaagcgtgacctggaggcactctccaagcaatgcaacaagctcttggaccgcgcccaagcccgggaggagcaggttgaaggaacaattaaacgacttgaagagttctacagcaaactgaaggaattttcgatccttctgcagaaagccgaggaacatgaggagtcgcagggacctgtgggtatggaaactgagaccattaaccagcaactgaacatgtttaaggtgttccaaaaggaagaaatcgagccgcttcaggggaagcagcaggacgttaactggctcggtcagggcctgatccagtctgctgcaaaaagtaccagcacacagggactggaacacgacctggatgatgttaatgccagatggaaaaccctcaataaaaaggtagcccagagagccgctcaactgcaggaggctttgctgcactgcgggcgttttcaggatgctctggaaagcctcctctcttggatggttgatacagaggagttggtcgcaaaccagaagccaccgtctgcggaattcaaggttgtcaaagctcagattcaagagcaaaaactgcttcagcgtctgcttgatgaccgaaagagtacagtagaggtaatcaaaagggagggagaaaagattgcaaccaccgctgagccggccgacaaggtgaagatcctgaagcagctgagtttactcgacagcagatgggaggcactcttgaataaagctgagacccgcaaccgacaattggagggaatttctgtggtggctcagcagttccacgagacacttgaacctctcaacgagtggttaacaacaatagagaaaaggcttgtcaactgtgaacctatcggaactcaggcgagcaagctcgaggaacagatcgcacaacacaaggccctggaagacgacataattaatcataacaagcatctccatcaagcagtgagtatcggtcagtccctgaaggtgctgtccagcagagaggacaaggacatggtccagtccaagctcgatttcagtcaagtctggtacatagagattcaggaaaagtcgcacagtaggagtgagctcctgcagcaggcactgtgcaatgcaaagatttttggagaagatgaagtggagctgatgaattggcttaacgaggttcatgataaattatcgaagctgagtgttcaggactactccacggaggggttatggaagcagcagtccgagcttcgcgtccttcaggaggacatcttactgcggaaacagaacgtcgatcaggccttactcaacggccttgaactcctgaaacagactaccggagatgaggtacttattatccaagataagcttgaagccatcaaggctagatataaagatatcacgaagctgagcacggatgtggctaaaacgctggagcaagccctgcagctagctaggaggcttcatagtacacacgaggaactttgtacctggctcgacaaagttgaagtggagttgctctcgtacgagacacaggtcctaaaaggtgaggaagcctcacaggcacagatgcggccaaaagagctgaagaaagaggccaaaaacaataaagcactgctggatagcttaaatgaggtcagcagcgccttgctcgagttggttccctggagagcacgggaggggctggaaaagatggtggctgaagataatgagagatatagactcgtaagcgacacaattacgcagaaagtggaggagatcgacgcggcgatcctgcggtctcagcagttcgatcaggctgccgacgcagaactgagttggattacggagacagagaaaaagctgatgtcattaggagatatcaggttggaacaggatcagacctccgctcaactgcaagtccagaagacttttacaatggagatacttcggcacaaggacataatcgacgacctggttaagagcggccataagattatgacagcgtgctcagaagaagaaaagcagagcatgaagaaaaagctggataaagttttgaaaaactatgacacgatctgtcagataaactccgaaaggtatctccaacttgagagggcccagagcctcgtcaaccagttttgggagacctatgaggaactctggccatggctgaccgaaacgcagtccattatatcccagctgccagctcctgcgctcgagtatgagacgctgagacaacagcaggaagagcaccgacagcttagggaactgatagccgagcacaagccgcacattgacaaaatgaataaaaccggcccccaactccttgagctgtcacccggggaaggattttcaattcaggagaaatatgtggctgctgatacgctttacagccagatcaaagaggatgtgaagaagagggcagttgcccttgatgaagctatcagccaatccacccagttccacgacaagatcgaccaaatcctcgaatccctcgagaggattgttgaaagactccgccaaccccctagcatttccgcagaagttgaaaaaattaaagaacagatcagcgaaaataagaacgtcagcgttgatatggagaaactgcagccactgtatgagacacttaagcagcgtggtgaggaaatgattgcacgtagtggcggaacagataaagacatcagcgccaaggcagtgcaggacaaattggatcaaatggtcttcatttgggagaatatacatacattggtcgaggagcgcgaagccaagctcttggatgtaatggagctggctgagaagttctggtgcgaccatatgtcgctgatcgttacaatcaaggacacccaggacttcattagagatttggaagatcccgggatcgatccgtccgttgtgaagcaacaacaggaggcagcagaaacaattagggaggaaatcgatggtctgcaagaggagctagacattgtcattaatttaggctcagagttgatcgcagcgtgcggagagccggataaacccatcgtgaagaaatcaattgacgaactgaactccgcctgggacagcctcaataaagcctggaaggaccgaatcgacaaattggaggaagccatgcaggctgccgtgcagtaccaagatgggctgcaagccgtatttgactgggtcgacattgcaggaggcaagctggcatctatgagtcctatcggaacagatcttgaaacagttaaacagcagatcgaggaactaaaacagtttaaaagcgaggcttaccagcagcagatagaaatggaacgcctgaatcatcaagccgaactgctgctgaagaaagtgacggaggagtccgacaaacatactgttcaggaccctcttatggagctgaagctgatttgggactcactggaagaaagaattattaacaggcagcataagttggaaggagctctcttagccctgggccagttccagcatgcccttgacgagctactggcgtggctgactcacacagagggcttgctgtccgagcagaaacccgtaggaggcgacccaaaagcgatcgaaatagaattggctaagcaccacgtgctgcagaatgatgttcttgcccaccagtcgacagtggaagctgtgaataaagctggcaatgaccttattgaatcgagtgctggtgaggaagcatcaaatctgcagaataaactggaagtcctgaatcagcgctggcagaatgtgctggagaagaccgagcagaggaagcagcagctggacggagcactacgtcaagccaaaggctttcacggcgagatcgaagatttgcagcagtggctgaccgatactgagaggcacttattagctagtaaacccttgggcggcctgccggagactgccaaggagcagctaaacgtgcacatggaagtgtgcgcagccttcgaagcaaaagaggagacgtataaatcccttatgcaaaaaggtcagcagatgctcgctcgctgcccaaaaagcgccgagacaaatatcgaccaggatattaacaatcttaaggaaaagtgggaatccgttgagaccaaactgaatgagaggaagaccaagctggaggaggccctgaatctcgccatggaatttcataactctctgcaagatttcatcaactggctcacccaggccgagcaaacactcaatgtggctagcaggccgagcctaatcttagatacggtgctgttccaaatagacgaacacaaagtgtttgccaatgaggtgaacagtcacagagaacagatcatagagctcgacaagaccggcacacatctcaagtatttctctcaaaaacaggacgtggtcctgatcaagaacttacttatatctgtacagtcccgatgggaaaaagttgtccagagattggtcgaacgaggccgaagccttgatgacgcgaggaagagggcgaagcagtttcacgaggcttggtccaagctgatggagtggctcgaggagtccgaaaaaagcctcgactccgagctggagatagccaacgatccagataaaatcaagacacagctcgcacagcataaggaatttcagaaatcactgggcgcgaagcactccgtttacgacactacaaacagaacaggacgatctctgaaagaaaagacaagtctagcggatgataacctcaaattagatgatatgctaagtgagcttagagacaaatgggatacaatatgcggcaagagcgtcgaaagacagaataaactggaagaggccttactgttctcaggacagtttaccgatgcactgcaggcgttaatcgactggttataccgggtggagccccaacttgctgaagatcagcccgtccacggagacatcgacctcgtgatgaatttaatagacaaccataaggctttccagaaagaactgggtaagcgaacgagctccgtacaggccctcaaacgctccgctcgagagctaattgaaggctctagggatgattcgagttgggtgaaggtacagatgcaggagctgtcaactcggtgggaaaccgtctgcgctctgagtatcagtaaacagacccggctggaggccgctcttagacaggccgaagaatttcatagcgttgtccacgcactgctggaatggctggcagaggccgaacaaactctaagattccacggggtacttcccgatgatgaagacgcactgagaaccctgattgatcaacacaaagagttcatgaaaaagctggaagagaagcgcgccgagctgaacaaggctaccactatgggcgatacagtgcttgctatttgtcatccagattctatcacaactatcaagcactggattaccatcattcgggcccgttttgaggaggtgctggcgtgggcaaagcagcatcagcagcgtttagcgtcagcgttagccggtctgatcgctaaacaagagttgctggaggccctgctcgcgtggctccagtgggccgaaactacactgactgacaaagacaaagaagtgattcctcaggagatcgaggaagtgaaggcattgattgccgagcaccagacattcatggaggagatgacaaggaaacagccagatgtcgacaaagtcaccaaaacctataagagacgcgcggctgatccaagcagtctccagtcacatataccagtgttggacaaaggaagagcagggagaaagagattcccggcaagtagcctttacccttcgggcagccagacacaaattgaaacaaagaaccctagagtgaatctcctggtgtcaaaatggcagcaggtgtggctgctcgctttagagaggaggaggaagctcaacgacgctctggaccgcctggaagaactgagagagttcgcaaacttcgactttgacatatggcgcaagaagtatatgaggtggatgaaccacaaaaagtctcgtgtgatggactttttccgtcgcatcgataaggatcaggatggcaaaattactcgccaggagtttatcgacggcattctgagtagtaaattccccacatccaggcttgagatgtcagcggtcgcagacatcttcgacagggacggggacggctacattgactactatgagttcgtagcagctctccatcctaataaggacgcctataaacccattaccgacgccgacaagatagaagacgaggttactaggcaggtggccaaatgtaaatgcgctaaaaggtttcaagtggaacaaataggggacaacaagtatagagtcagtttccaatctaacttcggggattcccagcagcttcgacttgtgcggatcttgcggagcactgtaatggtacgggtggggggcggctggatggcgctggatgaatttttggtgaagaacgatccctgccgggttcatcaccacggatccaagatgctgcgctctgaatccaacagttccattacaacaactcagccaacaatcgctaagggtcgtaccaatatggaacttagggagaaattcatccttgcagacggcgcttcgcagggtatggccgcatttcgtccccgcggaaggagaagtaggccgagcagccgcggcgcgtcccctaatagatctacaagcgttagctcacaagcagcacaagccgcatccccccaggtcccagccactaccacccctaaaggcacccctattcagggcagcaagctgaggttgcctgggtacctcagcgggaaaggcttccactcaggggaagattccgggctcatcacaactgcagccgcaagagtccgaacgcagttcgccgactccaagaaaacaccctccagaccagggagtcgcgccgggtccaaggcgggatctcgagcatcctctaggcggggatctgacgcctcggacttcgacatatcagagattcaaagtgtgtgtagcgatgttgagaccgtgccacagacgcacagacctacacctcgcgcgggatcgcgccctagcactgccaaaccctccaagatccccacccctcagaggaaaagcccagcgtctaaattagacaagagctcaaaaaggtag

SEQ ID NO: 269264 - DNA, 9183 bp, Artificial Sequence
  derived and/or modified sequence
atgcacagcagcagctacagctaccgcagcagtgacagcgtcttcagcaacaccaccagcaccaggaccagcctggacagcaatgaaaacctgctgctggtgcactgcggccccaccctcatcaacagctgcatcagctttggaagtgagagctttgatggccaccggctggagatgctgcagcagatcgccaacagagtgcagagggacagcgtcatctgtgaggacaagctgatcctggccggaaatgccctgcagagcgacagcaagaggctggagagcggcgtgcagttccagaatgaggccgagattgctggctacatcctggagtgtgagaacctgctgcggcagcacgtgattgatgtgcagatcctgattgatggcaagtactaccaggccgaccagctggtgcagagggtggccaagctgagagatgagatcatggccctgagaaatgaatgttcttctgtgtacagcaagggccgcatcctgaccacagagcagaccaagctgatgatcagcggcatcacccagagcctgaacagcggctttgcccagaccctgcaccccagcctgaccagcggcctgacccagagcctgacccccagcctgaccagcagctccatgaccagcggcctgagcagcggcatgaccagccggctgacccccagcgtgaccccagcctacaccccaggcttccccagcggcctggtgcccaacttcagcagtggagtggagcccaacagcctgcagaccctgaagctgatgcagatcaggaagcccctgctgaagagcagcctgctggaccagaacctgacagaggaggagatcaacatgaagtttgtgcaggacctgctgaactgggtggatgagatgcaggtgcagctggacagaacagagtggggcagtgacctgcccagcgtggagagccacctggagaaccacaagaatgtgcaccgggccatcgaggagtttgagagcagcctgaaggaggccaagatcagcgagatccagatgacagcccccctgaagctgacctacgccgagaagctgcaccggctggagagccagtatgccaagctgctgaacaccagcaggaaccaggagcggcacctggacaccctgcacaactttgtgtcccgggccaccaatgagctgatctggctgaatgagaaggaggaggaggaggtggcctatgactggagcgagaggaacaccaacatcgccaggaagaaggactaccacgccgagctgatgagggagctggaccagaaggaggagaacatcaagtctgtgcaggagattgctgagcagctgctgctggagaaccacccagcccggctgaccatcgaggcctacagagctgccatgcagacccagtggagctggatcctgcagctgtgccagtgtgtggagcagcacatcaaggaaaatacagcctactttgagttcttcaatgatgccaaggaggccacagactacctgaggaacctgaaggatgccatccagaggaagtacagctgtgacaggagcagcagcatccacaagctggaggacctggtgcaggagagcatggaggagaaggaggagctgctgcagtacaagagcaccatcgccaacctgatgggcaaggccaagaccatcatccagctgaagcccaggaacagcgactgccccctgaagaccagcatccccatcaaggccatctgtgactaccggcagatcgagatcaccatctacaaggatgatgaatgtgtgctggccaacaacagccaccgggccaagtggaaggtgatcagccccactggaaatgaggccatggtgcccagcgtgtgcttcaccgtgcccccacccaacaaggaggccgtggacctggccaacagaattgagcagcagtaccagaatgtgctgaccctgtggcatgagagccacatcaacatgaagtctgtggtgtcctggcactacctgatcaatgaaattgaccgcatccgggccagcaatgtggccagcatcaagaccatgctgcccggggagcaccagcaggtgctgagcaacctgcagagcagatttgaggacttcctggaggacagccaggagagccaggtgttcagcggcagtgacatcacccagctggagaaggaggtgaatgtgtgcaagcagtactaccaggagctgctgaagtctgctgagcgggaggagcaggaggagagcgtgtacaacctgtacatcagcgaggtgaggaacatccggctgcggctggagaactgtgaagatagactcatccggcagatccgcacccccctggagagagatgacctgcacgagagcgtcttccgcatcacagagcaggagaagctgaagaaggagctggagcggctgaaggatgacctgggcaccatcaccaacaagtgtgaggagttcttcagccaggccgccgccagcagctctgtgcccaccctgcggtctgagctgaatgtggtgctgcagaacatgaaccaggtgtacagcatgagcagcacctacatcgacaagctgaagacagtgaacctggtgctgaagaacacccaggccgctgaggccctggtgaagctgtatgagaccaagctgtgtgaggaggaggccgtgattgctgacaagaacaacattgaaaatctcatcagcaccctgaagcagtggaggtctgaggtggatgagaagaggcaggtgttccacgccctggaggatgagctgcagaaggccaaggccatcagtgatgagatgttcaagacctacaaggagcgggacctggactttgactggcacaaggagaaggctgaccagctggtggagcgctggcagaatgtgcacgtgcagattgacaaccggctgcgggacctggagggcatcggcaagagcctgaagtactacagagacacctaccaccccctggatgactggatccagcaggtggagaccacccagaggaagatccaggagaaccagcctgagaacagcaagaccctggccacccagctgaaccagcagaagatgctggtgtctgaaattgagatgaagcagagcaagatggatgagtgccagaagtatgcagagcagtacagcgccaccgtgaaggactatgagctgcagaccatgacctaccgggccatggtggacagccagcagaagagccctgtgaagagaagaaggatgcagagcagcgctgacctgatcatccaggagttcatggacctgcggacccgctacacagccctggtgaccctgatgacccagtacatcaagtttgctggggacagcctgaagaggctggaggaggaggagaagagcctggaggaggagaagaaggagcacgtggagaaggccaaggagctgcagaagtgggtgagcaacatcagcaagaccctgaaggatgctgagaaggccggcaagccacccttcagcaagcagaagatcagcagcgaggagatcagcaccaagaaggagcagctgtctgaggccctgcagaccatccagctgttcctggccaagcacggggacaagatgacagatgaggagagaaatgagctggagaagcaggtgaagaccctgcaggagagctacaacctgctcttcagcgagagcctgaagcagctgcaggagagccagaccagcggagatgtgaaggtggaggagaagctggacaaggtgattgctggcaccatcgaccagaccactggagaggtgctgagcgtcttccaggccgtgctgcggggcctgattgattatgacaccggcatccggctgctggagacccagctgatgatcagcggcctcatcagccctgagctgaggaaatgttttgacctgaaggatgccaagagccacggcctgattgatgagcagatcctgtgccagctgaaggagctgagcaaggccaaggagatcatctctgctgccagccccaccaccatccctgtgctggatgccctggcccagagcatgatcacagagagcatggccatcaaggtgctggagatcctgctgagcacaggcagcctggtgatcccagccaccggggagcagctgaccctgcagaaggccttccagcagaacctggtgtcctctgccctcttcagcaaggtgctggagcggcagaacatgtgcaaggacctgattgacccctgcaccagcgagaaggtgtccctgattgacatggtgcagaggagcaccctgcaggagaacacaggcatgtggctgctgcctgtgcggccccaggagggcggccgcatcaccctgaagtgtggcaggaacatcagcatcctgcgggccgcccacgagggcctgattgaccgggagaccatgttccggctgctgagcgcccagctgctgagcggcggcctcatcaacagcaacagcggccagaggatgacagtggaggaggccgtgcgggagggcgtgattgaccgggacacagccagcagcatcctgacctaccaggtgcagacaggaggcatcatccagagcaacccagccaagaggctgactgtggatgaagctgtgcagtgtgacctgatcaccagcagcagcgccctgctggtgctggaggcccagaggggctacgtgggcctcatctggccccacagcggggagatcttccccaccagcagcagcctgcagcaggagctgatcaccaatgagctggcctacaagatcctgaatggccggcagaagattgctgccctgtacatccctgagagcagccaggtgattggcctggatgctgccaagcagctgggcatcatcgacaacaacacagccagcatcctgaagaacatcaccctgcctgacaagatgccagacctgggggacctggaggcctgcaagaatgcccggcgctggctgtccttctgcaagttccagcccagcacagtgcatgactaccggcaggaggaggatgtgtttgatggagaggagcctgtgaccacccagaccagcgaggagaccaagaagctgttcctgagctacctgatgatcaacagctacatggatgccaacacaggccagaggctgctgctgtatgatggagacctggatgaggccgtgggcatgctgctggagggctgccacgccgagtttgatggcaacacagccatcaaggagtgcctggatgtgctgagcagcagcggggtcttcctgaacaatgccagcggccgggagaaggatgagtgcacagccacccccagcagcttcaacaagtgccactgtggggagcctgagcacgaggagaccccagaaaatagaaaatgtgccattgatgaggagttcaatgagatgaggaacacagtcatcaacagcgagttcagccagagcggcaagctggccagcaccatcagcattgaccccaaggtgaacagcagccccagcgtgtgtgtgcccagcctcatctcctacctgacccagacagagctggccgacatctccatgctgcggagtgacagcgagaacatcctgaccaactatgagaaccagagccgggtggagaccaatgaaagagccaatgaatgtagccacagcaagaacatccagaacttccccagcgacctgattgagaaccccatcatgaagagcaagatgagcaagttctgtggggtgaatgaaacagaaaatgaagacaacaccaacagagacagccccatctttgactacagcccccggctgagcgccctgctgagccatgacaagctgatgcacagccagggcagcttcaatgacacccacaccccagagagcaatggaaacaagtgtgaggccccagccctgtccttcagtgacaagaccatgctgagcggccagagaattggagagaagttccaggaccagttcctgggcattgctgccatcaacatcagcctgcccggggagcagtatggccagaagagcctgaacatgatcagcagcaacccccaggtgcagtaccacaatgacaagtacatcagcaacaccagcggggaggatgagaagacccaccctggcttccagcagatgcctgaggacaaggaggatgaaagtgaaattgaggagtacagctgtgctgtgaccccaggaggagacacagacaatgccatcgtgtccctgacctgtgccacccccctgctggatgagaccatcagcgccagtgactatgagaccagcctgctgaatgaccagcagaacaacacaggaacagacacagacagtgatgatgacttctatgacacccccctgtttgaagatgatgaccatgacagcctgctgctggatggagatgaccgggactgcctgcaccctgaggactatgacaccctgcaggaggagaatgatgaaacagccagccctgcagatgtgttctatgatgtgtccaaagaaaatgaaaattccatggtgccccagggcgcccctgtgggcagcctgtctgtgaagaacaaggcccactgcctgcaggacttcctgatggatgtggagaaggatgagctggacagcggggagaagatccacctgaaccctgtgggcagtgacaaggtgaatggccagagcctggagaccggcagcgagagagaatgtaccaacatcctggagggagatgaaagtgacagcctgacagattatgacatcgtgggcggcaaggagagcttcaccgccagcctgaagtttgatgattctggctcctggaggggcaggaaggaggagtatgtgacaggccaggagttccacagcgacacagaccacctggacagcatgcagagcgaggagagctatggagactacatctatgacagcaatgaccaggatgatgatgatgatgatggcattgatgaggagggcggcggcatcagagatgaaaatggcaagccccgctgccagaatgtggccgaggacatggacatccagctgtgtgccagcatcctgaatgaaaattctgatgaaaatgaaaacatcaacaccatgatcctgctggacaagatgcacagctgcagcagcctggagaagcagcagagggtgaatgtggtgcagctggccagccccagcgagaacaacctggtgacagagaagagcaacctgcctgagtacaccacagaaattgctgggaagagcaaagaaaacctgctgaaccacgagatggtgctgaaggatgtgctgccccccatcatcaaggacacagaaagtgagaagacctttggacctgccagcatcagccatgacaacaacaacatcagcagcaccagcgagctgggcacagacctggccaacaccaaggtgaagctgatccagggcagcgagctgcctgagctgacagacagcgtgaagggcaaggatgagtacttcaagaacatgacccccaaggtggacagcagcctggaccacatcatctgcacagagccagacctgattggcaagccagctgaggagagccacctgagcctcatcgcctctgtgacagacaaggacccccagggcaatggaagtgacctgatcaagggcagagatggcaagagtgacatcctgattgaagatgagaccagcatccagaagatgtacctgggggagggggaggtgctggtggagggcctggtggaggaggagaacagacacctgaagctgctgcccgggaagaacacccgggacagcttcaagctgatcaacagccagttccccttcccccagatcaccaacaatgaggagctgaaccagaagggcagcctgaagaaggccaccgtgaccctgaaggatgagcccaacaacctgcagatcatcgtgtccaagagccctgtgcagtttgagaacctggaggagatctttgacacctctgtgtccaaggagatcagtgatgacatcaccagtgacatcacctcctgggagggcaacacccactttgaggagagcttcacagatggccctgagaaggagctggacctcttcacctacctgaagcactgtgccaagaacatcaaggccaaggatgtggccaagcccaatgaagatgtgcccagccacgtgctgatcacagccccacccatgaaggagcacctgcagctgggcgtgaacaacaccaaggagaagagcaccagcacccagaaggacagccccctgaatgacatgatccagagcaatgacctgtgcagcaaggagagcatcagcggcggcggcacagagatcagccagttcaccccagagagcattgaggccaccctgagcatcctgagcaggaagcacgtggaggatgtgggcaagaatgacttcctgcagagcgagcgctgtgccaacggcctgggcaatgacaacagcagcaacaccctgaacacagactacagcttcctggagatcaacaacaagaaggagcgcatcgagcagcagctgcccaaggagcaggccctgagccccaggagccaggagaaggaggtgcagatccctgagctgagccaggtgtttgtggaggatgtgaaggacatcctgaagagccggctgaaggagggccacatgaacccccaggaggtggaggagcccagcgcctgtgccgacaccaagatcctgatccagaacctgatcaagaggatcaccaccagccagctggtgaatgaggccagcacagtgcccagcgacagccagatgtctgacagcagcggcgtgagccccatgaccaacagcagcgagctgaagccagagagcagagatgaccccttctgcatcggcaacctgaagtctgagctgctgctgaacatcctgaagcaggaccagcacagccagaagatcaccggggtgtttgagctgatgagggagctgacccacatggagtatgacctggagaagaggggcatcaccagcaaggtgctgcccctgcagctggagaacatcttctacaagctgctggctgatggctacagcgagaagattgagcacgtgggggacttcaaccagaaggcctgcagcaccagcgagatgatggaggagaagccccacatcctgggggacatcaagagcaaggagggcaactactacagccccaacctggagaccgtgaaggagatcggcctggagagcagcacagtgtgggccagcaccctgcccagagatgagaagctgaaggacctgtgcaatgacttccccagccacctggagtgcaccagcggcagcaaggagatggccagcggggacagcagcacagagcagtag

SEQ ID NO: 269265 - DNA, 21741 bp, Artificial Sequence
  derived and/or modified sequence
atgcacagcagcagctacagctaccgcagcagtgacagcgtcttcagcaacaccaccagcaccaggaccagcctggacagcaatgaaaacctgctgctggtgcactgcggccccaccctcatcaacagctgcatcagctttggaagtgagagctttgatggccaccggctggagatgctgcagcagatcgccaacagagtgcagagggacagcgtcatctgtgaggacaagctgatcctggccggaaatgccctgcagagcgacagcaagaggctggagagcggcgtgcagttccagaatgaggccgagattgctggctacatcctggagtgtgagaacctgctgcggcagcacgtgattgatgtgcagatcctgattgatggcaagtactaccaggccgaccagctggtgcagagggtggccaagctgagagatgagatcatggccctgagaaatgaatgttcttctgtgtacagcaagggccgcatcctgaccacagagcagaccaagctgatgatcagcggcatcacccagagcctgaacagcggctttgcccagaccctgcaccccagcctgaccagcggcctgacccagagcctgacccccagcctgaccagcagctccatgaccagcggcctgagcagcggcatgaccagccggctgacccccagcgtgaccccagcctacaccccaggcttccccagcggcctggtgcccaacttcagcagtggagtggagcccaacagcctgcagaccctgaagctgatgcagatcaggaagcccctgctgaagagcagcctgctggaccagaacctgacagaggaggagatcaacatgaagtttgtgcaggacctgctgaactgggtggatgagatgcaggtgcagctggacagaacagagtggggcagtgacctgcccagcgtggagagccacctggagaaccacaagaatgtgcaccgggccatcgaggagtttgagagcagcctgaaggaggccaagatcagcgagatccagatgacagcccccctgaagctgacctacgccgagaagctgcaccggctggagagccagtatgccaagctgctgaacaccagcaggaaccaggagcggcacctggacaccctgcacaactttgtgtcccgggccaccaatgagctgatctggctgaatgagaaggaggaggaggaggtggcctatgactggagcgagaggaacaccaacatcgccaggaagaaggactaccacgccgagctgatgagggagctggaccagaaggaggagaacatcaagtctgtgcaggagattgctgagcagctgctgctggagaaccacccagcccggctgaccatcgaggcctacagagctgccatgcagacccagtggagctggatcctgcagctgtgccagtgtgtggagcagcacatcaaggaaaatacagcctactttgagttcttcaatgatgccaaggaggccacagactacctgaggaacctgaaggatgccatccagaggaagtacagctgtgacaggagcagcagcatccacaagctggaggacctggtgcaggagagcatggaggagaaggaggagctgctgcagtacaagagcaccatcgccaacctgatgggcaaggccaagaccatcatccagctgaagcccaggaacagcgactgccccctgaagaccagcatccccatcaaggccatctgtgactaccggcagatcgagatcaccatctacaaggatgatgaatgtgtgctggccaacaacagccaccgggccaagtggaaggtgatcagccccactggaaatgaggccatggtgcccagcgtgtgcttcaccgtgcccccacccaacaaggaggccgtggacctggccaacagaattgagcagcagtaccagaatgtgctgaccctgtggcatgagagccacatcaacatgaagtctgtggtgtcctggcactacctgatcaatgaaattgaccgcatccgggccagcaatgtggccagcatcaagaccatgctgcccggggagcaccagcaggtgctgagcaacctgcagagcagatttgaggacttcctggaggacagccaggagagccaggtgttcagcggcagtgacatcacccagctggagaaggaggtgaatgtgtgcaagcagtactaccaggagctgctgaagtctgctgagcgggaggagcaggaggagagcgtgtacaacctgtacatcagcgaggtgaggaacatccggctgcggctggagaactgtgaagatagactcatccggcagatccgcacccccctggagagagatgacctgcacgagagcgtcttccgcatcacagagcaggagaagctgaagaaggagctggagcggctgaaggatgacctgggcaccatcaccaacaagtgtgaggagttcttcagccaggccgccgccagcagctctgtgcccaccctgcggtctgagctgaatgtggtgctgcagaacatgaaccaggtgtacagcatgagcagcacctacatcgacaagctgaagacagtgaacctggtgctgaagaacacccaggccgctgaggccctggtgaagctgtatgagaccaagctgtgtgaggaggaggccgtgattgctgacaagaacaacattgaaaatctcatcagcaccctgaagcagtggaggtctgaggtggatgagaagaggcaggtgttccacgccctggaggatgagctgcagaaggccaaggccatcagtgatgagatgttcaagacctacaaggagcgggacctggactttgactggcacaaggagaaggctgaccagctggtggagcgctggcagaatgtgcacgtgcagattgacaaccggctgcgggacctggagggcatcggcaagagcctgaagtactacagagacacctaccaccccctggatgactggatccagcaggtggagaccacccagaggaagatccaggagaaccagcctgagaacagcaagaccctggccacccagctgaaccagcagaagatgctggtgtctgaaattgagatgaagcagagcaagatggatgagtgccagaagtatgcagagcagtacagcgccaccgtgaaggactatgagctgcagaccatgacctaccgggccatggtggacagccagcagaagagccctgtgaagagaagaaggatgcagagcagcgctgacctgatcatccaggagttcatggacctgcggacccgctacacagccctggtgaccctgatgacccagtacatcaagtttgctggggacagcctgaagaggctggaggaggaggagaagagcctggaggaggagaagaaggagcacgtggagaaggccaaggagctgcagaagtgggtgagcaacatcagcaagaccctgaaggatgctgagaaggccggcaagccacccttcagcaagcagaagatcagcagcgaggagatcagcaccaagaaggagcagctgtctgaggccctgcagaccatccagctgttcctggccaagcacggggacaagatgacagatgaggagagaaatgagctggagaagcaggtgaagaccctgcaggagagctacaacctgctcttcagcgagagcctgaagcagctgcaggagagccagaccagcggagatgtgaaggtggaggagaagctggacaaggtgattgctggcaccatcgaccagaccactggagaggtgctgagcgtcttccaggccgtgctgcggggcctgattgattatgacaccggcatccggctgctggagacccagctgatgatcagcggcctcatcagccctgagctgaggaaatgttttgacctgaaggatgccaagagccacggcctgattgatgagcagatcctgtgccagctgaaggagctgagcaaggccaaggagatcatctctgctgccagccccaccaccatccctgtgctggatgccctggcccagagcatgatcacagagagcatggccatcaaggtgctggagatcctgctgagcacaggcagcctggtgatcccagccaccggggagcagctgaccctgcagaaggccttccagcagaacctggtgtcctctgccctcttcagcaaggtgctggagcggcagaacatgtgcaaggacctgattgacccctgcaccagcgagaaggtgtccctgattgacatggtgcagaggagcaccctgcaggagaacacaggcatgtggctgctgcctgtgcggccccaggagggcggccgcatcaccctgaagtgtggcaggaacatcagcatcctgcgggccgcccacgagggcctgattgaccgggagaccatgttccggctgctgagcgcccagctgctgagcggcggcctcatcaacagcaacagcggccagaggatgacagtggaggaggccgtgcgggagggcgtgattgaccgggacacagccagcagcatcctgacctaccaggtgcagacaggaggcatcatccagagcaacccagccaagaggctgactgtggatgaagctgtgcagtgtgacctgatcaccagcagcagcgccctgctggtgctggaggcccagaggggctacgtgggcctcatctggccccacagcggggagatcttccccaccagcagcagcctgcagcaggagctgatcaccaatgagctggcctacaagatcctgaatggccggcagaagattgctgccctgtacatccctgagagcagccaggtgattggcctggatgctgccaagcagctgggcatcatcgacaacaacacagccagcatcctgaagaacatcaccctgcctgacaagatgccagacctgggggacctggaggcctgcaagaatgcccggcgctggctgtccttctgcaagttccagcccagcacagtgcatgactaccggcaggaggaggatgtgtttgatggagaggagcctgtgaccacccagaccagcgaggagaccaagaagctgttcctgagctacctgatgatcaacagctacatggatgccaacacaggccagaggctgctgctgtatgatggagacctggatgaggccgtgggcatgctgctggagggctgccacgccgagtttgatggcaacacagccatcaaggagtgcctggatgtgctgagcagcagcggggtcttcctgaacaatgccagcggccgggagaaggatgagtgcacagccacccccagcagcttcaacaagtgccactgtggggagcctgagcacgaggagaccccagaaaatagaaaatgtgccattgatgaggagttcaatgagatgaggaacacagtcatcaacagcgagttcagccagagcggcaagctggccagcaccatcagcattgaccccaaggtgaacagcagccccagcgtgtgtgtgcccagcctcatctcctacctgacccagacagagctggccgacatctccatgctgcggagtgacagcgagaacatcctgaccaactatgagaaccagagccgggtggagaccaatgaaagagccaatgaatgtagccacagcaagaacatccagaacttccccagcgacctgattgagaaccccatcatgaagagcaagatgagcaagttctgtggggtgaatgaaacagaaaatgaagacaacaccaacagagacagccccatctttgactacagcccccggctgagcgccctgctgagccatgacaagctgatgcacagccagggcagcttcaatgacacccacaccccagagagcaatggaaacaagtgtgaggccccagccctgtccttcagtgacaagaccatgctgagcggccagagaattggagagaagttccaggaccagttcctgggcattgctgccatcaacatcagcctgcccggggagcagtatggccagaagagcctgaacatgatcagcagcaacccccaggtgcagtaccacaatgacaagtacatcagcaacaccagcggggaggatgagaagacccaccctggcttccagcagatgcctgaggacaaggaggatgaaagtgaaattgaggagtacagctgtgctgtgaccccaggaggagacacagacaatgccatcgtgtccctgacctgtgccacccccctgctggatgagaccatcagcgccagtgactatgagaccagcctgctgaatgaccagcagaacaacacaggaacagacacagacagtgatgatgacttctatgacacccccctgtttgaagatgatgaccatgacagcctgctgctggatggagatgaccgggactgcctgcaccctgaggactatgacaccctgcaggaggagaatgatgaaacagccagccctgcagatgtgttctatgatgtgtccaaagaaaatgaaaattccatggtgccccagggcgcccctgtgggcagcctgtctgtgaagaacaaggcccactgcctgcaggacttcctgatggatgtggagaaggatgagctggacagcggggagaagatccacctgaaccctgtgggcagtgacaaggtgaatggccagagcctggagaccggcagcgagagagaatgtaccaacatcctggagggagatgaaagtgacagcctgacagattatgacatcgtgggcggcaaggagagcttcaccgccagcctgaagtttgatgattctggctcctggaggggcaggaaggaggagtatgtgacaggccaggagttccacagcgacacagaccacctggacagcatgcagagcgaggagagctatggagactacatctatgacagcaatgaccaggatgatgatgatgatgatggcattgatgaggagggcggcggcatcagagatgaaaatggcaagccccgctgccagaatgtggccgaggacatggacatccagctgtgtgccagcatcctgaatgaaaattctgatgaaaatgaaaacatcaacaccatgatcctgctggacaagatgcacagctgcagcagcctggagaagcagcagagggtgaatgtggtgcagctggccagccccagcgagaacaacctggtgacagagaagagcaacctgcctgagtacaccacagaaattgctgggaagagcaaagaaaacctgctgaaccacgagatggtgctgaaggatgtgctgccccccatcatcaaggacacagaaagtgagaagacctttggacctgccagcatcagccatgacaacaacaacatcagcagcaccagcgagctgggcacagacctggccaacaccaaggtgaagctgatccagggcagcgagctgcctgagctgacagacagcgtgaagggcaaggatgagtacttcaagaacatgacccccaaggtggacagcagcctggaccacatcatctgcacagagccagacctgattggcaagccagctgaggagagccacctgagcctcatcgcctctgtgacagacaaggacccccagggcaatggaagtgacctgatcaagggcagagatggcaagagtgacatcctgattgaagatgagaccagcatccagaagatgtacctgggggagggggaggtgctggtggagggcctggtggaggaggagaacagacacctgaagctgctgcccgggaagaacacccgggacagcttcaagctgatcaacagccagttccccttcccccagatcaccaacaatgaggagctgaaccagaagggcagcctgaagaaggccaccgtgaccctgaaggatgagcccaacaacctgcagatcatcgtgtccaagagccctgtgcagtttgagaacctggaggagatctttgacacctctgtgtccaaggagatcagtgatgacatcaccagtgacatcacctcctgggagggcaacacccactttgaggagagcttcacagatggccctgagaaggagctggacctcttcacctacctgaagcactgtgccaagaacatcaaggccaaggatgtggccaagcccaatgaagatgtgcccagccacgtgctgatcacagccccacccatgaaggagcacctgcagctgggcgtgaacaacaccaaggagaagagcaccagcacccagaaggacagccccctgaatgacatgatccagagcaatgacctgtgcagcaaggagagcatcagcggcggcggcacagagatcagccagttcaccccagagagcattgaggccaccctgagcatcctgagcaggaagcacgtggaggatgtgggcaagaatgacttcctgcagagcgagcgctgtgccaacggcctgggcaatgacaacagcagcaacaccctgaacacagactacagcttcctggagatcaacaacaagaaggagcgcatcgagcagcagctgcccaaggagcaggccctgagccccaggagccaggagaaggaggtgcagatccctgagctgagccaggtgtttgtggaggatgtgaaggacatcctgaagagccggctgaaggagggccacatgaacccccaggaggtggaggagcccagcgcctgtgccgacaccaagatcctgatccagaacctgatcaagaggatcaccaccagccagctggtgaatgaggccagcacagtgcccagcgacagccagatgtctgacagcagcggcgtgagccccatgaccaacagcagcgagctgaagccagagagcagagatgaccccttctgcatcggcaacctgaagtctgagctgctgctgaacatcctgaagcaggaccagcacagccagaagatcaccggggtgtttgagctgatgagggagctgacccacatggagtatgacctggagaagaggggcatcaccagcaaggtgctgcccctgcagctggagaacatcttctacaagctgctggctgatggctacagcgagaagattgagcacgtgggggacttcaaccagaaggcctgcagcaccagcgagatgatggaggagaagccccacatcctgggggacatcaagagcaaggagggcaactactacagccccaacctggagaccgtgaaggagatcggcctggagagcagcacagtgtgggccagcaccctgcccagagatgagaagctgaaggacctgtgcaatgacttccccagccacctggagtgcaccagcggcagcaaggagatggccagcggggacagcagcacagagcagttcagcagcgagctgcagcagtgcctgcagcacacagagaagatgcatgagtacctgaccctgctgcaggacatgaagccacccctggacaaccaggagagcctggacaacaacctggaggccctgaagaaccagctgcggcagctggagacctttgagctgggcctggcccccatcgccgtcatcctgaggaaggacatgaagctggccgaggagttcctgaagagcctgcccagcgacttcccccggggccacgtggaggagctgagcatcagccaccagagcctgaagacagccttcagcagcctgagcaatgtgagcagcgagaggaccaagcagatcatgctggccatcgacagcgagatgagcaagctggccgtgtcccatgaggagttcctgcacaagctgaagagcttcagtgactgggtgtctgagaagagcaagtctgtgaaggacattgaaattgtgaatgtgcaggacagtgaatatgtgaagaagaggctggagttcctgaaggccaacaacgtgctgaaggacctgggccacaccaagatgcagctggagaccacagcctttgatgtgcagttcttcatcagtgaatatgcccaggacctgagccccaaccagagcaagcagctgctgcggctgctgaacaccacccagaagtgcttcctggatgtgcaggagagcgtgaccacccaggtggagcggctggagacccagctgcacctggagcaggacctggatgaccagaagatcgtggccgagcggcagcaggagtacaaggagaagctgcagggcatctgtgacctgctgacccagacagagaacagactcatcggccaccaggaggccttcatgattggagatggcaccgtggagctgaagaagtaccagagcaagcaggaggagctgcagaaggacatgcagggcagcgcccaggccctggccgaggtggtgaagaacacagagaacttcctgaaggaaaatggagagaagctgagccaggaggacaaggccctgattgagcagaagctgaatgaggccaagatcaagtgtgagcagctgaacctgaaggccgagcagagcaagaaggagctggacaaggtggtgaccacagccatcaaggaggagacagagaaggtggccgctgtgaagcagctggaggagagcaagaccaagattgagaacctgctggactggctgagcaatgtggacaaggacagcgagcgggccggcaccaagcacaagcaggtgattgagcagaatggcacccacttccaggagggagatggcaagagcgccatcggggaggaggatgaggtgaatggaaacctgctggagacagatgtggatggccaggtgggcaccacccaggagaacctgaaccagcagtaccagaaggtgaaggcccagcacgagaagatcatcagccagcaccaggccgtcatcatcgccacccagagcgcccaggtgctgctggagaagcagggccagtacctgagccctgaggagaaggagaagctgcagaagaacatgaaggagctgaaggtgcactatgaaacagccctggccgagagcgagaagaagatgaagctgacccacagcctgcaggaggagctggagaagtttgatgctgactacacagaatttgagcactggctgcagcagagcgagcaggagctggagaacctggaggccggggctgatgacatcaatggcctgatgaccaagctgaagaggcagaagagcttctctgaagatgtgatcagccacaagggggacctgcgctacatcaccatcagcggcaacagagtgctggaggccgccaagagctgcagcaagagagatggcggcaaggtggacaccagcgccacccaccgggaggtgcagaggaagctggaccacgccacagaccgcttccgcagcctgtacagcaaatgtaatgtgctgggcaacaacctgaaggacctggtggacaagtaccagcactatgaagatgccagctgtggcctgctggccggcctgcaggcctgtgaggccacagccagcaagcacctgtctgagcccatcgctgtggaccccaagaacctgcagaggcagctggaggagaccaaggccctgcagggccagatcagcagccagcaggtggccgtggagaagctgaagaagacagctgaggtgctgctggatgcccggggcagcctgctgcctgccaagaatgacatccagaagaccctggatgacatcgtgggccgctatgaggacctgagcaagtctgtgaatgaaagaaatgagaagctgcagatcaccctgaccaggagcctgtctgtgcaggacggcctggatgagatgctggactggatgggaaatgtggagagcagcctgaaggagcagggccaggtgcccctgaacagcacagccctgcaggacatcatcagcaagaacatcatgctggagcaggacattgctggccggcagagcagcatcaatgccatgaatgagaaggtgaagaagttcatggagaccacagaccccagcacagccagcagcctgcaggccaagatgaaggacctgagcgcccgcttcagcgaggccagccacaagcacaaggagaccctggccaagatggaggagctgaagaccaaggtggagctgtttgagaacctgtctgagaagctgcagaccttcctggagaccaagacccaggccctgacagaggtggatgtgcctgggaaggatgtgacagagctgagccagtacatgcaggagagcaccagcgagttcctggagcacaagaagcacctggaggtgctgcacagcctgctgaaggagatcagcagccacggcctgcccagcgacaaggccctggtgctggagaagaccaacaacctgagcaagaagttcaaggagatggaggacaccatcaaggagaagaaggaggccgtgaccagctgccaggagcagctggatgccttccaggtgctggtgaagagcctgaagtcctggatcaaggagaccaccaagaaggtgcccatcgtgcagcccagctttggagctgaggacctgggcaagagcctggaggacaccaagaagctgcaggagaagtggagcctgaagaccccagagatccagaaggtgaacaacagcggcatcagcctgtgcaacctgatctctgctgtgaccaccccagccaaggccatcgctgctgtgaagtctggaggagctgtgctgaatggagagggcacagccaccaacacagaggagttctgggccaacaagggcctgaccagcatcaagaaggacatgacagacatcagccacggctatgaggacctgggcctgctgctgaaggacaagattgctgagctgaacaccaagctgagcaagctgcagaaggcccaggaggagagcagcgccatgatgcagtggctgcagaagatgaacaagacagccaccaagtggcagcagaccccagcccccacagacacagaggccgtgaagacccaggtggagcagaacaagagctttgaagctgagctgaagcagaatgtgaacaaggtgcaggagctgaaggacaagctgacagagctgctggaggagaacccagacaccccagaggccccccgctggaagcagatgctgacagaaattgacagcaagtggcaggagctgaaccagctgaccatcgaccggcagcagaagctggaggagagcagcaacaacctgacccagttccagacagtggaggcccagctgaagcagtggctggtggagaaggagctgatggtgtctgtgctgggccccctgagcattgaccccaacatgctgaacacccagaggcagcaggtgcagatcctgctgcaggagtttgccaccaggaagccccagtatgagcagctgacagctgctggccagggcatcctgagcaggcctggagaggaccccagcctgcggggcatcgtgaaggagcagctggccgctgtgacccagaagtgggacagcctgaccggccagctgagtgacagatgtgactggattgaccaggccatcgtgaagagcacccagtaccagagcctgctgcggagcctgagtgacaagctgagtgacctggacaacaagctgagcagcagcctggccgtgtccacccacccagatgccatgaaccagcagctggagacagcccagaagatgaagcaggagatccagcaggagaagaagcagatcaaggtggcccaggccctgtgtgaggacctgagcgccctggtgaaggaggagtacctgaaggccgagctgagccggcagctggagggcatcctgaagagcttcaaggatgtggagcagaaggcagaaaatcatgtgcagcacctgcagagcgcctgtgccagcagccaccagttccagcagatgagccgggacttccaggcctggctggacaccaagaaggaggagcagaacaagagccaccccatcagcgccaagctggatgtgctggagagcctcatcaaggaccacaaggacttcagcaagaccctgacagcccagagccacatgtatgagaagaccatcgccgagggggagaacctgctgctgaagacccagggcagcgagaaggccgccctgcagctgcagctgaacaccatcaagaccaactgggacaccttcaacaagcaggtgaaggagcgggagaacaagctgaaggagagcctggagaaggccctgaagtacaaggagcaggtggagaccctgtggccctggattgacaagtgccagaacaacctggaggagatcaagttctgcctggaccctgcagaaggagaaaattccatcgccaagctgaagagcctgcagaaggagatggaccagcacttcggcatggtggagctgctgaacaacacagccaacagcctgctgtctgtgtgtgaaattgacaaggaggtggtgacagatgagaacaagagcctcatccagaaggtggacatggtgacagagcagctgcacagcaagaagttctgcctggagaacatgacccagaagttcaaggagttccaggaggtgtccaaggagagcaagaggcagctgcagtgtgccaaggagcagctggacatccatgacagcctgggcagccaggcctacagcaacaagtacctgaccatgctgcagacccagcagaagagcctgcaggccctgaagcaccaggtggacctggccaagaggctggcccaggacctggtggtggaggccagtgacagcaagggcaccagtgatgtgctgctgcaggtggagaccatcgcccaggagcacagcaccctgagccagcaggtggatgagaagtgcagcttcctggagaccaagctgcagggcatcggccacttccagaacaccatccgggagatgttcagccagtttgctgagtttgatgatgagctggacagcatggcccctgtgggcagagatgctgagaccctgcagaagcagaaggagaccatcaaggccttcctgaagaagctggaggccctgatggccagcaatgacaatgccaacaagacctgcaagatgatgctggccacagaggagaccagcccagacctggtgggcatcaagagggacctggaggccctgagcaagcagtgcaacaagctgctggaccgggcccaggcccgggaggagcaggtggagggcaccatcaagaggctggaggagttctacagcaagctgaaggagttcagcatcctgctgcagaaggccgaggagcacgaggagagccagggccctgtgggcatggagacagagaccatcaaccagcagctgaacatgttcaaggtgttccagaaggaggagattgagcccctgcagggcaagcagcaggatgtgaactggctgggccagggcctcatccagagcgctgccaagagcaccagcacccagggcctggagcatgacctggatgatgtgaatgcccgctggaagaccctgaacaagaaggtggcccagagagctgcccagctgcaggaggccctgctgcactgcggccgcttccaggatgccctggagagcctgctgtcctggatggtggacacagaggagctggtggccaaccagaagccacccagcgctgagttcaaggtggtgaaggcccagatccaggagcagaagctgctgcagaggctgctggatgacaggaagagcacagtggaggtgatcaagcgggagggggagaagatcgccaccacagctgagcctgctgacaaggtgaagatcctgaagcagctgagcctgctggacagccgctgggaggccctgctgaacaaggccgagaccaggaaccggcagctggagggcatctctgtggtggcccagcagttccacgagaccctggagcccctgaatgagtggctgaccaccatcgagaagaggctggtgaactgtgagcccatcggcacccaggccagcaagctggaggagcagatcgcccagcacaaggccctggaggatgacatcatcaaccacaacaagcacctgcaccaggccgtgtccatcggccagagcctgaaggtgctgagcagccgggaggacaaggacatggtgcagagcaagctggacttcagccaggtgtggtacatcgagatccaggagaagagccacagccgctctgagctgctgcagcaggccctgtgcaatgccaagatctttggagaagatgaggtggagctgatgaactggctgaatgaggtgcatgacaagctgagcaagctgtctgtgcaggactacagcacagagggcctgtggaagcagcagagcgagctgcgggtgctgcaggaggacatcctgctgaggaagcagaatgtggaccaggccctgctgaatggcctggagctgctgaagcagaccactggagatgaggtgctgatcatccaggacaagctggaggccatcaaggcccgctacaaggacatcaccaagctgagcacagatgtggccaagaccctggagcaggccctgcagctggcccggcggctgcacagcacccatgaggagctgtgcacctggctggacaaggtggaggtggagctgctgtcctatgagacccaggtgctgaagggggaggaggccagccaggcccagatgaggcccaaggagctgaagaaggaggccaagaacaacaaggccctgctggacagcctgaatgaggtgagcagcgccctgctggagctggtgccctggagggcccgggagggcctggagaagatggtggccgaggacaatgaaagataccgcctggtgtctgacaccatcacccagaaggtggaggagattgatgctgccatcctgcggagccagcagtttgaccaggccgcagatgctgagctgtcctggatcacagaaacagagaagaagctgatgagcctgggggacatccggctggagcaggaccagaccagcgcccagctgcaggtgcagaagaccttcaccatggagatcctgcggcacaaggacatcattgatgacctggtgaagagcggccacaagatcatgacagcctgcagcgaggaggagaagcagagcatgaagaagaagctggacaaggtgctgaagaactatgacaccatctgccagatcaacagcgagcgctacctgcagctggagcgggcccagagcctggtgaaccagttctgggagacctatgaggagctgtggccctggctgacagagacccagagcatcatcagccagctgcctgccccagccctggagtatgagaccctgcggcagcagcaggaggagcaccggcagctgcgggagctgattgctgagcacaagccccacatcgacaagatgaacaagacaggcccccagctgctggagctgagccctggagagggcttcagcatccaggagaagtatgtggccgctgacaccctgtacagccagatcaaggaggatgtgaagaagagagctgtggccctggatgaggccatcagccagagcacccagttccatgacaagattgaccagatcctggagagcctggagcgcatcgtggagcggctgcggcagcccccatccatctctgctgaggtggagaagatcaaggagcagatcagcgagaacaagaatgtgtctgtggacatggagaagctgcagcccctgtatgagaccctgaagcagagaggagaggagatgattgcccggagcggcggcacagacaaggacatcagcgccaaggctgtgcaggacaagctggaccagatggtgttcatctgggagaacatccacaccctggtggaggagcgggaggccaagctgctggatgtgatggagctggccgagaagttctggtgtgaccacatgagcctgattgtgaccatcaaggacacccaggacttcatccgggacctggaggaccccggcatcgaccccagcgtggtgaagcagcagcaggaggccgctgagaccatccgggaggagattgatggcctgcaggaggagctggacatcgtcatcaacctgggcagcgagctgattgctgcctgtggggagccagacaagcccatcgtgaagaagagcattgatgagctgaacagcgcctgggacagcctgaacaaggcctggaaggacagaattgacaagctggaggaggccatgcaggccgctgtgcagtaccaggacggcctgcaggccgtgtttgactgggtggacattgctgggggcaagctggcctccatgagccccatcggcacagacctggagaccgtgaagcagcagatcgaggagctgaagcagttcaagtctgaggcctaccagcagcagatcgagatggagcggctgaaccaccaggccgagctgctgctgaagaaggtgacagaggagagtgacaagcacacagtgcaggaccccctgatggagctgaagctgatctgggacagcctggaggagcgcatcatcaaccggcagcacaagctggagggcgccctgctggccctgggccagttccagcacgccctggatgagctgctggcctggctgacccacacagagggcctgctgtctgagcagaagcctgtgggcggggaccccaaggccattgaaattgagctggccaagcaccacgtgctgcagaatgatgtgctggcccaccagagcacagtggaggccgtgaacaaggctggaaatgacctgattgagagcagcgctggggaggaggccagcaacctgcagaacaagctggaggtgctgaaccagcgctggcagaatgtgctggagaagacagagcagaggaagcagcagctggatggagccctgcggcaggccaagggcttccacggggagattgaggacctgcagcagtggctgacagacacagagcggcacctgctggccagcaagcccctgggcggcctgcctgagacagccaaggagcagctgaatgtgcacatggaggtgtgtgccgcctttgaggccaaggaggagacctacaagagcctgatgcagaagggccagcagatgctggcccgctgccccaagtctgctgagaccaacatcgaccaggacatcaacaacctgaaggagaagtgggagagcgtggagaccaagctgaatgaaaggaagaccaagctggaggaggccctgaacctggccatggagttccacaacagcctgcaggacttcatcaactggctgacccaggccgagcagaccctgaatgtggccagccggcccagcctcatcctggacacagtgctcttccagattgatgagcacaaggtgtttgccaatgaggtgaacagccaccgggagcagatcatcgagctggacaagacaggcacccacctgaagtacttcagccagaagcaggatgtggtgctgatcaagaacctgctgatctctgtgcagagccgctgggagaaggtggtgcagaggctggtggagcggggccgcagcctggatgatgccaggaagagggccaagcagttccacgaggcctggagcaagctgatggagtggctggaggagagcgagaagagcctggacagcgagctggagatcgccaatgaccctgacaagatcaagacccagctggcccagcacaaggagttccagaagagcctgggcgccaagcacagcgtgtatgacaccaccaacagaacaggccgcagcctgaaggagaagaccagcctggctgatgacaacctgaagctggatgacatgctgtctgagctgcgggacaagtgggacaccatctgtgggaagtctgtggagcggcagaacaagctggaggaggccctgctcttcagcggccagttcacagatgccctgcaggccctgattgactggctgtacagagtggagccccagctggccgaggaccagcctgtgcacggggacatcgacctggtgatgaacctgattgacaaccacaaggccttccagaaggagctgggcaagaggaccagctctgtgcaggccctgaagaggtctgcccgggagctgattgagggcagcagagatgacagctcctgggtgaaggtgcagatgcaggagctgagcacccgctgggagaccgtgtgtgccctgagcatcagcaagcagacccggctggaggccgccctgcggcaggccgaggagttccacagcgtggtgcacgccctgctggagtggctggccgaggccgagcagaccctgcgcttccacggcgtgctgcctgatgatgaagatgccctgcggaccctgattgaccagcacaaggagttcatgaagaagctggaggagaagagagctgagctgaacaaggccaccaccatgggagacacagtgctggccatctgccacccagacagcatcaccaccatcaagcactggatcaccatcatccgggccaggtttgaggaggtgctggcctgggccaagcagcaccagcagaggctggccagcgccctggccggcctcatcgccaagcaggagctgctggaggccctgctggcctggctgcagtgggccgagaccaccctgacagacaaggacaaggaggtgatcccccaggagattgaggaggtgaaggccctgattgctgagcaccagaccttcatggaggagatgaccaggaagcagccagatgtggacaaggtgaccaagacctacaagagaagagctgctgaccccagcagcctgcagagccacatccctgtgctggacaagggccgggccggcaggaagcgcttccctgccagcagcctgtaccccagcggcagccagacccagatcgagaccaagaacccccgggtgaacctgctggtgtccaagtggcagcaggtgtggctgctggccctggagaggaggaggaagctgaatgatgccctggaccggctggaggagctgcgggagtttgccaactttgattttgacatctggaggaagaagtacatgcgctggatgaaccacaagaagagccgggtgatggacttcttcagaagaattgacaaggaccaggacggcaagatcacccggcaggagttcattgatggcatcctgagcagcaagttccccaccagccggctggagatgtctgctgtggccgacatctttgacagagatggagatggctacatcgactactatgaatttgtggccgccctgcaccccaacaaggatgcctacaagcccatcacagatgctgacaagattgaagatgaggtgacccggcaggtggccaagtgcaagtgtgccaagcgcttccaggtggagcagatcggggacaacaagtacagagtgtccttccagagcaactttggagacagccagcagctgcggctggtgcgcatcctgcggagcacagtgatggtgcgggtgggcggcggctggatggccctggatgagttcctggtgaagaatgacccctgccgggtgcaccaccacggcagcaagatgctgcggtctgagagcaacagcagcatcaccaccacccagcccaccatcgccaagggccgcaccaacatggagctgcgggagaagttcatcctggctgatggagccagccagggcatggccgccttccggccccggggccgccgcagccggcccagcagcagaggagccagccccaacagaagcacctctgtgagcagccaggccgcccaggccgccagcccccaggtgcctgccaccaccacccccaagggcacccccatccagggcagcaagctgcggctgcccggctacctgagcggcaagggcttccacagcggggaggacagcggcctcatcaccacagctgctgcccgggtgaggacccagtttgctgacagcaagaagacccccagccggcccggcagccgggccggcagcaaggccggcagccgggccagcagcagaagaggaagtgatgccagtgactttgacatcagcgagatccagagcgtgtgcagtgatgtggagaccgtgccccagacccaccggcccaccccccgggccggcagccggcccagcacagccaagcccagcaagatccccaccccccagaggaagagccctgccagcaagctggacaagagcagcaagaggtag

SEQ ID NO: 269266 - DNA, 9183 bp, Artificial Sequence
  derived and/or modified sequence
atgcacagcagcagctacagctaccggagcagcgacagcgtgttctccaatacaacaagcacacggacatcactggactcaaatgaaaatctcctcctcgtgcactgtggccctaccctgatcaattcctgcatatccttcggctctgagtccttcgatggtcacagattagaaatgctccagcagattgctaacagagttcagcgggattctgtaatctgcgaggacaagctgatcctggccggcaacgcccttcaatccgactccaaaagacttgaatctggtgttcagttccagaacgaagccgagatcgcgggctatatactggaatgcgagaacctcctaaggcaacatgtcatcgatgtgcaaatactcattgacggcaagtattatcaggccgaccagctggttcaaagagtcgctaagttgcgggacgagattatggccctgagaaacgaatgcagcagtgtctattccaaagggagaatactcacaactgagcagacaaagctcatgataagtgggatcacacaatccttaaatagcgggttcgctcagaccttacatccgtccctgacttccggactaacacagagtctgactccttcgcttaccagttcctcaatgacaagcggcctatcttccggaatgactagtcggctgaccccttcggtcactcctgcttatactcctgggtttccttccggcctggtgccaaatttttcctctggggtcgaacctaatagcttacaaactcttaagttaatgcagattcgtaaacctctgctcaagtcttccttactggatcaaaacctcaccgaagaggagatcaatatgaagtttgtgcaggatctcctgaactgggtcgatgagatgcaggtgcagttagaccgtactgagtggggctcagatctgccgtccgtagaaagtcatcttgagaaccataaaaatgtccatcgcgccatcgaggagttcgaaagctccctgaaagaggcgaagattagcgagattcagatgacagctcctctcaagctgacttatgcggagaagcttcacaggttagagtcccaatacgcaaaactgttaaacacaagcaggaatcaggagcgccatctggacacactccacaacttcgtgtcccgggctacaaatgaacttatttggttgaacgagaaagaggaagaggaggtagcgtatgattggtcggaaagaaacacaaatatcgccagaaaaaaggattaccacgccgagcttatgcgtgaattggatcagaaggaagaaaacatcaagagtgtgcaagaaatagccgagcagctccttctggagaaccaccctgcacgactgacgatagaagcttacagagcggcaatgcaaacccagtggtcatggattctccaactctgtcagtgcgttgagcagcacattaaggagaataccgcctatttcgagttcttcaatgacgcgaaggaggcgacagactatctaaggaacctcaaagacgccatacagcgtaaatatagttgcgaccgctcatcgtccattcacaaacttgaagatctggttcaagagagcatggaggaaaaggaagaactcttacagtataagagtactatcgcgaacctgatgggtaaagcaaaaactattatccagttgaaaccccggaatagcgactgccccctgaagacatcgataccaatcaaagctatctgtgattaccgccaaatcgagatcactatttacaaagacgacgagtgcgtactagcaaataattctcatcgggctaagtggaaagtgatcagcccgactggcaacgaagccatggtaccaagtgtgtgctttactgtcccacctccaaataaggaagcagtggacctcgctaacagaattgagcagcaataccagaacgtcttaacgctttggcacgaatctcacatcaacatgaaatctgtcgtctcctggcactacctcatcaatgagatcgaccggattcgggcgtcaaatgttgcaagtatcaaaaccatgctgccaggcgagcaccagcaagtcctgagtaacctgcagagccgatttgaggatttcctggaggattcacaggagtctcaggtgttctcaggatctgacataactcagctggaaaaggaggttaacgtctgcaagcagtactaccaggaactgttaaagagtgccgagagagaagagcaggaggaatctgtgtacaacctttacataagcgaggtgcgtaacattcggctgagactagagaactgcgaagacaggctcataagacagatccgtacacccctggaacgagatgatctgcatgagtctgtgtttagaataactgagcaggaaaaactcaagaaagagctggagcggcttaaggatgacctgggaacgatcactaacaagtgtgaggagtttttctcacaagcagctgcttcttcatctgtgccaactcttaggtctgaactgaacgtcgtgctccaaaatatgaaccaagtttacagtatgtcctcgacttacatagacaaactgaagacagtcaatctcgtgttgaagaacacccaggcagcggaagctcttgtcaagctgtatgaaactaaactctgtgaagaagaggccgtgattgctgataagaacaatatcgaaaatttgatctccactctgaaacaatggcggagcgaggtcgacgaaaaaagacaagtgttccatgcccttgaagatgaactgcaaaaagccaaggctatctcagatgaaatgttcaaaacttacaaggagagggatctggatttcgactggcacaaggaaaaggccgatcagctcgtggaacggtggcagaacgtccacgtgcagattgacaaccgcctgcgagatctggaagggatcggcaaaagtctcaagtactacagggatacttatcaccctcttgatgattggatacagcaggtggaaacaactcagagaaagatccaggaaaatcaaccagagaatagcaaaaccctggcaacccagcttaaccagcagaagatgctggtgagcgaaatcgagatgaaacagagcaaaatggatgagtgtcagaagtatgccgagcaatacagcgcaaccgtgaaagactacgagctgcagactatgacatacagggcaatggttgattctcagcagaaaagcccagtcaagaggaggagaatgcagagtagcgcagatcttatcatccaggaatttatggatctgagaactcgctatactgccctagtgactttaatgacgcagtacatcaaattcgccggagactcgctgaaacgactggaagaagaggagaagtcactggaggaagagaaaaaggaacacgtggagaaagccaaggaactgcagaaatgggtcagcaatatctcaaaaacattgaaagatgccgagaaggcaggaaagcctccattttcaaaacagaaaatcagttcagaggaaatttccaccaagaaggagcaattgagcgaggcgctgcaaactatccagctgtttctggccaaacatggtgacaaaatgactgacgaagagaggaacgagctcgaaaagcaggtgaagacactgcaggaaagctacaaccttctgttcagtgagtccctaaaacagctgcaggagtctcagacctcaggtgatgtcaaggtggaagagaagctggataaggtgattgccggcaccatcgatcagacaactggggaagtgctgtccgtgtttcaggcagtccttcgcggcctgatcgactatgacaccggcattaggctgttggaaacccaactgatgatcagcggcctaatttcacccgagctgcggaagtgtttcgacctcaaagacgccaaaagccacggactgatcgacgagcaaatcctctgccagctgaaggagctgtctaaggctaaggagattatcagcgccgcttcacctactaccattcctgtgcttgatgcgctggcacagagcatgataaccgagtcgatggctatcaaggtgctggaaatcctgttgtctactggctccctcgtcatccccgcgacgggcgagcagttaacgctgcagaaggccttccagcagaacctggtgtcttccgcattattcagcaaagtgctggagcgacaaaacatgtgcaaggatcttattgacccgtgcacttctgagaaagtctcactgatcgacatggtgcagaggtctacccttcaggagaatactggaatgtggctgttgccggtgcgcccccaagagggggggagaattactttgaagtgtggaagaaatataagcatactgcgggccgctcacgaaggactgatcgaccgggagaccatgtttaggttactgagcgcccagctcctgagcggcggacttattaatagcaatagcggacagagaatgacggtcgaggaagccgtgcgagagggtgtgattgacagggacacagcttctagtatcctgacctatcaggttcaaactggaggcataatccaaagcaatccagccaagaggctcacagttgacgaagccgtacagtgcgatttaatcacaagctcatccgcacttttagtgctagaggcacaaagaggttatgtgggattaatatggccccactctggcgagatattcccgacttcttcctctctccaacaggaactcatcacgaatgaactcgcctacaagatactcaatggaagacagaaaatcgcagctctgtacattcctgagtcttcccaggtgatcggcctggacgccgcaaagcagctgggaataatcgataacaatacggcaagcatactgaagaacatcaccctccccgacaaaatgcccgaccttggcgacctggaggcttgtaagaatgctcgaaggtggctatctttctgtaaattccaaccatctacggtccacgactatcggcaagaggaggatgtgttcgacggtgaggaaccagttacgacccagacttccgaagagaccaagaagctgtttctatcctacctgatgatcaattcctatatggacgcaaacactggccagcggctcctgttgtacgatggggatctggatgaggcagtcggtatgctacttgaaggatgtcatgcggaattcgacggcaatacagccataaaagagtgcctggatgtcctgtcaagctccggagttttcctcaacaacgccagcggtagggagaaggacgaatgcaccgcaacaccgtcttcctttaataaatgccattgtggggagccagagcatgaggagacaccagaaaacagaaaatgcgctatagatgaagagtttaacgaaatgcggaacacggtcatcaacagcgagttttcccagtccggcaagctcgctagtaccatatctattgatcccaaagtgaactcctcaccgtccgtgtgcgtgccttctctgatatcctatctcacacagacggaattggctgacatctccatgctccgttccgattcagaaaacattttgactaattatgaaaatcagtcccgggtcgagacaaatgagagagccaacgagtgctctcacagcaaaaatatccaaaactttccctcagatctgattgagaaccctattatgaagtccaaaatgagcaagttctgtggagttaatgagacggaaaatgaggacaataccaacagggatagcccaatttttgactactccccaaggctaagcgcgttactaagccatgataaactcatgcactcgcagggctcctttaatgacacacacactccagagtccaacggaaacaagtgtgaggctccagccctgagttttagcgacaagacgatgctgagcggccagcgcatcggcgagaagttccaggaccaatttctgggcatcgcggcaattaacatttctctgcccggcgaacagtatgggcaaaagtccctgaatatgattagttccaacccacaggtgcaataccataacgataaatacatatcgaatacatccggcgaggacgagaaaacccatccaggttttcaacagatgccagaggacaaggaggatgagtccgaaatagaagagtactcctgtgcggtcactcccggaggagatacagataatgccatcgtttcgctcacttgcgcaaccccactccttgacgagactatatccgcctctgactatgaaactagtttactgaacgatcagcagaacaatactggcacagatacagattccgatgatgacttttacgatacacctcttttcgaggatgacgaccatgactccctgcttcttgatggtgatgatagggactgcctgcaccccgaggactacgacaccctccaggaggagaacgacgagaccgcatctcctgctgatgtgttctatgacgtcagcaaggaaaatgagaactcaatggtgccgcagggagccccggttggatcactgagtgtaaagaataaagcgcactgtctgcaggacttccttatggacgtagagaaagatgaacttgactcgggcgagaagatccacctcaatcctgttggcagcgacaaagtaaacggccagagcctggaaacgggatcagaacgcgagtgcacgaatatcttagaaggagatgaatctgatagcctaaccgactacgacattgtcggcggcaaagagtcctttacagccagcctgaaatttgatgatagcggctcctggagaggcaggaaagaagagtatgttaccgggcaggagtttcactctgacacagatcacttagactctatgcaatcagaggaatcctatggggattatatctacgactctaacgatcaggacgacgacgacgacgacggaattgacgaggagggcggcggcattagggatgaaaatggcaagcctcgttgccagaatgtcgctgaagatatggatatccagctatgcgcaagcatcttgaacgagaacagcgatgagaacgagaatatcaacaccatgatccttctggataagatgcactcctgctctagcctggaaaaacaacaaagagtgaacgttgtacaactggcctcgccttccgagaataacctggtgacagaaaagtctaatctgcctgagtataccaccgaaattgctggcaagtcaaaagagaatctccttaatcatgagatggtgttaaaggatgtgttgccccctatcattaaggacaccgaaagtgaaaaaactttcggcccagcctccattagccacgataacaataacattagtagcacaagcgaactcgggactgacttggcaaacaccaaagtgaagctgattcagggttccgaacttcctgaactgacagatagcgtgaagggcaaggatgaatatttcaagaatatgacccccaaggtggactcctcactggatcacataatctgtaccgaacccgacctgattggcaaaccggctgaggagtcccatttatcactgatcgcaagcgtgaccgataaggaccctcagggaaacggcagtgacctcatcaaaggtagagacggcaagagcgatatactgattgaggatgagacatccattcagaaaatgtaccttggggaaggcgaagtgctagtggagggactcgtcgaagaggaaaatcgccacctaaagctcctgccaggcaagaatacccgagactcctttaaattaattaatagccagtttcccttccctcagattactaacaacgaagagctgaatcagaagggaagtttgaaaaaggctaccgtcaccttgaaagatgagcccaacaacctccagatcatcgtcagcaagtcacccgtccaattcgagaacttagaggaaatctttgatacttcggtctcaaaggagatatccgacgacatcacatccgatatcacctcgtgggaaggaaatacccattttgaagaatccttcactgacggaccagaaaaggaattagacctgtttacttacttaaaacactgtgctaaaaacatcaaggccaaagacgttgccaaaccgaatgaagacgtaccgagccacgtccttatcacagcaccgcctatgaaagagcatctgcaactgggagtgaacaacactaaggaaaagagcacctctacacagaaagattccccgcttaatgatatgatacagtcaaatgacttgtgctctaaagagagtatcagcggaggcgggaccgaaataagtcagttcactccggagtctatcgaggctaccttgagcatattaagccgaaagcatgtcgaagacgtcggcaaaaacgacttcctacagtccgagcgctgtgctaacgggttgggcaatgacaactcttcaaacactctcaacacagactacagcttcttggagattaataataagaaggagagaattgaacaacagctgcctaaggaacaggctttgtcccccaggagccaggaaaaagaagtacagattccggaattgtcccaggtgtttgtagaggacgttaaggatattctgaaatcccgactgaaggaaggacacatgaaccctcaagaagtggaagagccttcagcttgcgcagacaccaaaatacttattcaaaaccttataaagcgcatcacgacttcccagttggtcaacgaagctagcactgtcccatcagacagtcagatgagcgatagttccggtgtttcccccatgaccaacagctctgagttaaagcctgaaagtagagacgaccctttttgcatcggcaacttgaagtctgagttgctgctgaatattctgaagcaagatcagcactcccagaagatcaccggagttttcgaactcatgagggaactgacacacatggagtacgatcttgaaaagagggggatcacgtccaaggtcctaccattgcagctcgaaaacattttttataagctcctggccgacggatactctgaaaaaatcgagcatgtgggcgatttcaaccagaaagcgtgttctacttctgagatgatggaggaaaaaccacatatattgggcgatatcaaatctaaggaggggaactattatagtcccaatctggagaccgttaaagagatcggcctggagtctagtaccgtttgggcaagcacgcttccccgcgatgaaaaactgaaggacctgtgcaacgattttccctctcatctagagtgcactagtggctctaaggaaatggcctcgggcgattccagtactgagcagtag

SEQ ID NO: 269267 - DNA, 21741 bp, Artificial Sequence
  derived and/or modified sequence
atgcacagcagcagctacagctaccggagcagcgacagcgtgttctcaaacacgacttccactaggacctcactcgattccaacgaaaatcttcttctggtacactgcggacccaccctgatcaactcctgcatcagttttggatccgagtcttttgacggacacagactggagatgctgcaacagatcgcgaatagagtccagagggacagcgtgatctgtgaggataaactgattctggccggaaatgccctccaaagcgactcaaagagattggaatcgggtgtgcaatttcagaatgaggcagaaattgctggctatattctggaatgcgaaaatctgctccggcagcatgtgattgacgtgcagatcctgatcgacggaaaatactaccaagccgatcagttggtccagcgggtcgcaaagctgcgagatgaaataatggccttgaggaacgagtgcagctcagtctacagtaagggccgcatcttgaccacggaacaaacgaaactgatgatttcggggatcacacagtcattgaatagtggcttcgcccaaaccctgcacccatctctgaccagcggtctgacccaatccctgacaccgtcccttacgtcgagctctatgacaagtggactttcttctggcatgacaagtaggctaactccaagcgtgactcccgcctatacaccagggtttccatctggcttggtgcccaatttctcctctggtgtggaaccaaacagtctgcagaccctcaagttgatgcagatccggaagccgctactgaagagctcgcttctggaccagaacctcaccgaggaagagatcaatatgaagttcgtccaggacctactgaattgggtggatgagatgcaggtccagttagaccggactgagtggggctccgatctgccctccgttgaatcccacttagagaatcataaaaatgtgcacagggccatcgaagagtttgaatcatctctgaaagaagccaagatctccgagattcagatgaccgcccctttgaagttaacttatgccgagaagctgcatcggctagagagtcagtacgctaagttgcttaataccagccgcaatcaggaaagacatctggataccctccataactttgtgagtcgtgcaacaaacgagctaatctggttgaacgaaaaagaggaggaggaggtagcatatgactggtcggaacggaatactaacatcgccaggaaaaaggactaccatgccgagttgatgcgggaacttgaccagaaagaagaaaatataaaaagcgtgcaggagatagccgagcagctgttgcttgagaaccatccagcccggcttaccatcgaagcgtatagagcggccatgcaaacgcaatggagctggatcctgcagttgtgccagtgtgtcgaacagcacatcaaggaaaacaccgcatatttcgaattcttcaatgacgctaaagaagccactgattacttgaggaacttgaaggacgccatccagcggaagtactcttgcgatcgatcctcctccattcacaaactggaagacttggtgcaagagagcatggaagagaaggaagagctgcttcagtacaagtccactatcgcaaacttgatgggcaaggccaagacaattatacagctgaaaccccggaactctgactgccccctgaagactagtatccctattaaggcaatatgtgactatcgccagattgaaattacaatttacaaggacgatgagtgtgtactggcaaacaatagtcacagagctaagtggaaggtgatcagccccaccggcaacgaagccatggtccctagcgtgtgttttaccgtgcccccccctaataaggaagcagtcgacttagcaaaccgtatagaacagcagtaccagaacgttctcaccctgtggcacgaaagccacatcaacatgaagagtgtggtttcctggcattatctgatcaacgagattgatcgcatccgcgccagcaacgtggcgtcgatcaaaaccatgttgcccggtgaacatcagcaggtgttatctaacttacagtcaaggtttgaagattttttggaagactcccaagagtcacaggttttctccggttcggacattacgcaactggaaaaggaagtcaacgtgtgcaaacagtactaccaggaattactcaaatctgccgaaagggaggaacaggaggagagcgtttataacctgtacatatctgaggtccggaatatccgccttaggctcgagaattgcgaggataggttgattcgacaaatccggaccccactcgaacgagatgatctgcacgagagtgtgttccgcattaccgaacaggagaagttaaagaaagaactcgagcgactgaaagacgacctgggcacaatcactaacaagtgcgaggagtttttcagccaagccgcagccagttcttctgtgccaacacttaggagcgagttgaacgttgttctgcaaaacatgaatcaggtatatagtatgagcagtacttacatcgataagctgaagaccgtcaatctggttttgaaaaatacccaagccgctgaggcattggtcaagctatacgagacaaagctatgcgaggaggaagcggtcatagctgacaaaaacaacattgaaaatttgatctcaaccctcaaacagtggagatctgaagtagatgaaaaacgtcaggtttttcatgctctagaagatgagcttcagaaagccaaggctatcagcgatgagatgtttaagacatacaaagagcgggacctggactttgactggcacaaagaaaaagcagatcagctcgtagaacgttggcagaacgtccacgttcagatagataaccgtcttcgggatctggaagggatagggaagagcttgaaatactaccgggatacttaccaccccttagacgactggatccagcaggtggaaacaacacagcgcaaaattcaagagaaccagccagaaaactctaagactttagctacccagctgaaccagcaaaagatgttggtgtcagagatcgaaatgaaacaaagcaaaatggacgagtgccagaagtatgcggagcagtactccgcgacagtgaaggactacgagctacaaaccatgacctacagagctatggtcgattcacagcagaaatcacccgtgaaacgccgaagaatgcagtcatccgcagatttgatcatacaagaatttatggatctccggacgagatacaccgctctggtgacactcatgacgcagtatatcaaattcgctggagactctctaaaaaggctggaagaggaggagaaatccctggaggaggagaaaaaagaacatgtcgagaaagctaaagaactccaaaagtgggtttccaacatcagcaagacacttaaggacgccgaaaaagccggtaagcctcccttctccaaacaaaagatttcgagcgaagagatcagtacgaagaaggagcagctttccgaagcgcttcagaccatccaattgttcttagcaaaacatggggataaaatgaccgacgaagaaaggaatgagctggagaaacaggtgaaaaccctccaagaaagttacaaccttctgtttagcgagtcacttaagcaactccaggagagccagacctccggcgatgtaaaggtggaagaaaagctcgataaagtcattgcagggacaatcgaccaaacaaccggtgaagtgttgtccgtcttccaggctgtcctgcgtggcctgatcgattatgacaccggcatcagactgctggaaacccagctgatgatctcaggcctaatttctcctgagcttcggaagtgttttgaccttaaggacgctaagagccatggactaatcgacgagcagatattgtgccagctcaaggagctgtcaaaggctaaagaaattatttcagctgcctcacccacaaccattcccgtcctggacgctttagcacagagcatgattacagaatcaatggcaataaaagtgctcgagattctgttgtccaccgggtctctagtgatcccggctacaggcgaacagctcaccttgcagaaggcttttcagcaaaatctggtaagtagtgcattattttccaaggtgctcgagaggcagaacatgtgcaaagacttaatagacccctgcacttccgagaaggttagcctcatcgatatggtgcaacggagtacactacaagagaatactgggatgtggttgttgccagtgcggcctcaggaggggggtcgcatcaccctgaagtgtggccgcaacattagtatcttacgcgcagctcatgaaggcctgattgaccgcgaaacgatgttccgtctgctctctgcccagctgcttagtggcggactgatcaactctaacagtgggcagcgaatgactgtggaggaggctgttcgcgagggcgttattgatcgcgacaccgcttcctcaattcttacctatcaagtgcagaccggtgggatcattcaaagtaatccagccaaacggctgaccgtagacgaagccgtccagtgcgatttaattacttcctccagtgcactactggtcttggaggcccagcgcgggtacgtcggcttgatctggccgcactctggagagatttttccaacaagctcatctctacagcaggagttaataacaaacgagcttgcatataagattctgaacggaaggcagaagatcgcagccttatatattccagagagcagccaagtgatcggcctcgatgccgccaaacagcttgggatcattgataataacacagcatcaatactgaaaaatattaccctacctgacaagatgcccgatcttggggacctggaagcttgtaagaacgcacggcggtggctcagcttctgcaagttccagccatccactgtacatgattatagacaggaggaagacgtattcgacggagaagaaccagtcacaactcaaacatctgaagagacaaaaaaactcttcttatcataccttatgattaactcttacatggatgctaacacgggtcaacgtctgctcctgtatgacggtgacctggacgaggcggttgggatgttattagaaggatgtcatgcggagtttgacgggaacaccgcaatcaaggagtgtcttgatgtcctttccagctctggggttttcctgaacaatgccagtggcagagaaaaggatgagtgcacagctacaccttcaagcttcaacaagtgtcactgcggagaacctgagcacgaggagacacctgagaacagaaaatgtgctatcgacgaggagttcaacgagatgcgcaatactgtgatcaattccgagttctctcaaagcgggaaactcgcttcaaccattagcattgatcctaaagtcaactccagcccaagtgtgtgtgtgcccagcctgatctcgtacctgacacaaaccgagctagctgacatcagtatgctgcggtccgacagtgaaaatatcctcacaaattacgagaaccagtcccgggtcgaaacaaacgaaagggccaacgagtgttcacactctaaaaatatacagaatttcccttctgatcttattgagaaccccataatgaagtcgaagatgtctaagttctgtggggttaatgagaccgagaatgaggacaacacaaacagagactcacctatcttcgattatagcccccgcctttccgcgctcctcagccatgataagctcatgcatagccagggatccttcaatgatactcatacaccagagtctaatggaaataagtgcgaggcaccagcccttagtttctcagataaaaccatgctaagcgggcaaagaatcggagagaaattccaggatcaattcctgggaatagctgccatcaatatatcccttccgggggagcagtacggacagaaatccttaaatatgatttcctccaatccccaggtgcaatatcacaacgacaaatatatttctaatacctcaggcgaggatgagaaaacacatccggggtttcagcagatgcctgaagataaggaggatgaaagcgagattgaggaatactcatgcgccgtgacgccaggcggtgacaccgacaacgccatcgtgtcactcacctgcgctacacccttgctggacgaaaccatcagcgcctcagactatgagaccagcctcctgaacgaccagcagaataacaccggaacagacactgactccgatgacgatttctatgatacaccgctattcgaagatgacgaccatgattcactgctgctggatggtgatgatagagactgccttcatcctgaggattacgatactttgcaagaggaaaacgatgaaactgcttcgcccgccgacgtgttctatgacgtttctaaggagaatgagaactccatggttccccaaggcgctccagtggggtcgctgtctgtcaaaaacaaagcacactgcctgcaggacttcctaatggatgtggaaaaggacgaactggacagcggggaaaaaatacacctcaatcccgtcggtagtgacaaagtgaatggacagagccttgagacagggtccgaacgcgagtgcacaaatattttggagggagacgagtcggacagtttgactgattacgacatcgtcggaggtaaagagtcatttaccgcttctctcaaatttgatgattccgggtcttggagaggacgcaaagaggaatacgtgaccgggcaggagtttcattccgacaccgatcatctcgattcaatgcagtccgaggagagctacggggactatatctacgactctaatgatcaggacgatgacgacgacgacgggatagatgaggaaggaggcggaatacgagatgagaatggaaaaccaaggtgtcagaatgttgcagaagatatggacatccagctgtgcgcctctattctgaatgaaaactccgatgagaatgagaacataaatactatgattctgctggacaagatgcattcctgctccagcttagagaagcagcaacgggtgaacgtggtacagttggctagcccctccgagaacaatttagtcacagagaaatctaacttacccgagtacacaaccgaaatcgccgggaaatccaaggaaaacctgctgaaccacgagatggtcctgaaggatgttctccctcccatcataaaggataccgagtcagagaagacttttggacccgcaagtatttctcacgacaataacaatattagttctacctcggagttagggaccgatttagcgaatactaaagtcaaactcattcagggatctgaactaccggaactgaccgattctgttaaaggcaaggacgagtactttaagaatatgactccaaaagttgacagctcgctggatcatatcatttgtacagaacctgatttaatcggtaagccagctgaggaatcccacttgtcgctgatagcatctgtcacagataaggaccctcagggcaatgggagcgacctgattaagggtcgcgacgggaagtccgacatccttatcgaggatgagacttccattcagaagatgtacctcggcgaaggcgaggttctggttgaaggtttagtggaggaggagaatcgtcatcttaaactacttcctggcaagaacacacgggacagttttaagctgattaattctcagtttccctttccacagatcaccaataacgaggagttgaaccagaaaggctccctcaaaaaggccaccgtcaccctgaaggacgagcctaacaatctacagattatcgtatccaaaagccccgtgcagttcgagaacttggaggagatattcgatacctctgtgtcaaaggaaataagtgacgatatcacctctgacattacttcgtgggagggaaacactcattttgaagagtcttttactgatggacccgaaaaagagctagatttgtttacttacctgaagcactgtgccaaaaacattaaggccaaggacgtcgcaaaacctaacgaggatgtgcctagtcatgtgctcattaccgcaccacctatgaaagagcacctgcagcttggcgtaaacaataccaaggagaagtctacctccactcagaaggacagtccactgaacgatatgatacagagcaacgacctgtgttccaaggagtccatctccggcggcggcacggagatttcccaattcacacctgaaagcatcgaggctactttgtccatcctcagccgaaaacacgtggaagacgtggggaaaaatgacttcctccagtctgagagatgcgccaatggtctggggaatgacaactcaagtaacactctcaacacagactactcatttcttgaaataaacaataaaaaagagcgcattgaacagcagttacctaaggagcaagctctgtctcctcgttcacaggagaaggaggttcagatcccagagcttagccaggtttttgtggaagatgttaaagatattctgaaaagtcgacttaaggagggacacatgaacccccaagaagtggaagagccctctgcctgtgctgataccaagattctgatccagaatctgatcaagagaattacaacctcgcagctggtaaatgaagccagtactgtcccgagtgactcacaaatgtcggactcatcaggcgtctcaccgatgactaatagtagtgagctgaagcctgaatcaagggacgatcctttttgtataggaaatctcaaatctgaactgctcttgaacatcctgaaacaagaccaacattcgcaaaagatcacgggggtgtttgagctgatgagagagttgacacacatggaatacgacctggagaaaagaggaatcacatctaaggtgctgccactacaattggagaacatcttctacaaactcctggctgatggatactccgagaaaatcgagcatgtgggggactttaatcaaaaggcatgcagcaccagtgagatgatggaagaaaagccccatatcctcggagatatcaaaagtaaggagggcaactattatagccctaatctcgagacggtgaaagaaattgggctggagagcagcactgtttgggctagcacactcccaagagatgagaagctgaaggatctgtgcaacgacttccctagccacctcgagtgtacatctggcagtaaagagatggcctccggagatagcagcacagaacagttttcatccgagctgcagcagtgtctgcaacatacagagaaaatgcacgaataccttaccctcctgcaggacatgaaaccacccctggacaatcaggaatccctagacaataatctggaagccctgaaaaaccagcttagacagctggaaacctttgaactggggctggcacctatcgcagtgattctgagaaaggatatgaagctggctgaggagttcctgaagagtcttcccagtgattttcccaggggacatgtggaagagctgagtatcagccaccagtccctcaaaactgccttcagctccctgagtaacgtgagctctgagagaaccaagcagataatgttggccatagattccgaaatgtcaaagcttgcagtgtcccatgaagaattcctgcataagttgaaatctttttccgattgggtgtccgagaaatcaaaatcggttaaggacatcgaaatcgtgaacgtgcaggactcagaatacgtcaagaagaggctggaattcctgaaagccaacaacgttctcaaagacttaggtcacaccaaaatgcagctggaaacaaccgccttcgacgttcaattctttattagtgaatatgcgcaggacctctcgccgaatcagtctaagcagctgttgaggctcctgaatacaacacagaagtgtttcctcgatgtccaggagtccgttaccacacaagtcgaaagactggagactcaattacacttagaacaggatctcgacgaccagaagattgtcgccgagcgccagcaagaatacaaggagaagctgcaggggatttgcgacctgctgactcaaaccgagaatcggctgatcggtcaccaagaggcattcatgattggcgatggtaccgtcgaactcaaaaaataccagagcaaacaagaggagctacagaaagatatgcaaggctctgcccaagccctcgccgaggtggtgaagaatacagaaaacttcctgaaagaaaatggagaaaaattgtctcaggaggacaaggcgctgatcgaacagaaactgaacgaggcaaagattaagtgtgagcagctcaacttgaaagccgagcaatccaaaaaggaactggacaaggtagttaccaccgctattaaagaggagactgagaaagtggcggcagtgaagcagttggaggaatctaagacaaaaatcgagaatctgctggattggttatcaaatgtagacaaagactcagaacgggcaggaacaaagcacaagcaggtgattgagcagaatggaacgcattttcaggaaggcgacggtaagtccgcaattggggaggaggatgaggttaacggaaatctattagagaccgatgtagatggacaggtgggtactacccaggagaatttaaatcagcagtatcagaaggtgaaggcccagcacgagaaaatcatttcccaacatcaagccgtgataatagctacccagtccgctcaagttctcctggagaaacagggacagtatttgtccccagaagagaaggagaaactgcagaaaaacatgaaggaattaaaagtgcactacgaaactgccctggccgaaagcgagaagaagatgaagctgacgcacagcctgcaggaggagttagagaagtttgacgccgactatacagaattcgagcattggctgcagcagtcagaacaagagctggagaacctggaggcaggggcagatgatattaacgggctgatgacaaagttaaagcgccagaaatcattctctgaggatgtgatcagtcacaaaggcgatctgaggtatattacaatcagcggcaaccgcgtgctcgaggcagctaagagctgtagcaagcgcgatgggggaaaagtcgacaccagcgcgactcacagagaggttcagcgcaagttggaccatgcaacggatcgttttcgctcactgtattcgaagtgcaatgtgctcgggaacaacttaaaagacctggtggacaagtatcagcactatgaggacgcgagctgcggcctcctggctggactgcaagcttgcgaagctacagcctccaaacacttatcagagccaatagccgtggatccaaagaacctgcagaggcagctcgaagagaccaaagctttgcaggggcaaatttcaagtcaacaggtagctgtggagaagctcaagaagacagctgaagtgctgctcgacgcaagagggagcctgctgcctgcgaagaacgatattcagaagaccttggacgatatcgtcgggcggtatgaggacctgagcaaaagcgtcaatgaaagaaacgaaaagcttcagatcactcttactagatcactgtctgtccaggatggactggacgaaatgctggactggatggggaacgtcgaaagttcgctaaaagagcaaggacaggtaccactgaacagcacggctctgcaggacatcatatctaaaaatataatgttggagcaggacatagcgggccgccaatcaagtataaatgcgatgaatgagaaggttaaaaagtttatggaaacaacagatccgtctaccgcctctagtttgcaggcgaagatgaaggacctgtctgcccgcttctccgaggcttcccacaaacacaaagaaactctcgcaaaaatggaagaattaaagacgaaagtcgagctgttcgagaatctgtccgagaagctccagacgtttctggagaccaaaacacaagcactgactgaggtcgacgtccctggaaaagacgtcacagaactgtctcaatatatgcaggaaagtacttcagaattcttagaacacaaaaagcacttggaggtgctccactctctgctcaaagagatcagcagccatggattgccgagcgataaagccctggtgttggaaaagacgaataacctgtccaagaagtttaaggagatggaggatacaatcaaggagaaaaaggaagccgtcacaagctgccaagagcagttggacgctttccaggtcttggtgaagtcgctcaagtcctggatcaaggagactacaaagaaagtacccatcgtacagccctctttcggggcagaagatctgggaaagtcattggaagacaccaaaaagttgcaggagaagtggagtcttaaaactcccgagattcagaaggtcaacaactctggaatatcactgtgcaacctcatcagtgccgtaacaacacccgccaaggccattgccgcggtcaagagtggcggggcggttctgaacggtgaaggcactgccacgaatactgaagaattttgggctaataaagggctgacgagtattaagaaggatatgaccgacatctcacacgggtatgaagaccttggtctgctgttaaaggacaagattgcagaactgaacacaaagttgtctaagttgcagaaagcccaagaggagtccagcgctatgatgcagtggctgcaaaaaatgaacaagaccgccactaaatggcagcaaacccccgcccctacagacacggaggctgtgaagactcaggttgagcaaaataagtcctttgaagcagaattgaaacagaacgttaataaggtgcaggaactgaaagataaactgaccgaactcttggaagaaaacccagacactccagaggctccccggtggaagcagatgctcacagagatcgactctaagtggcaggaactgaatcagctgactatagaccgccagcagaagttggaagaaagttccaataatctgactcagttccagactgtggaggcccagcttaagcagtggctggtggaaaaagaacttatggtaagtgtcttggggccactttctattgaccctaacatgctaaatacacagcgccagcaagttcagatcctgctgcaagaatttgccacacgaaaacctcagtacgagcagctaacagccgcaggtcagggaattctgtccaggcccggggaggacccttccctgcggggcattgtaaaagagcagttagccgcagtaacacaaaagtgggactcacttacaggtcagttatccgatcggtgtgactggatcgaccaagccatcgtgaagtctacccagtaccagagccttctgcggagtctgtcagacaagctaagcgatctggataacaaattaagttccagcttggcagtttctacccaccccgatgccatgaatcagcaactcgagaccgcgcagaagatgaaacaagagattcagcaagagaaaaaacagatcaaagttgcacaagccctctgtgaggacctgagtgccctcgttaaagaggaataccttaaggccgagctctcccgacagctggaaggaatcctgaagtcattcaaggatgtggaacagaaggccgaaaatcatgtgcagcatctccagagcgcttgcgctagctcacatcagttccagcagatgtcgagagatttccaggcctggctggatacaaagaaggaagaacagaacaaatctcaccccattagtgcgaagctggatgtcctggagagccttatcaaggaccacaaagacttcagtaaaacactaaccgctcagtctcacatgtacgagaagacaatcgccgaaggcgaaaatctgctgcttaagacccaaggcagcgaaaaggccgctttgcagttgcagctgaatacaattaagaccaattgggacactttcaataagcaggtgaaggagagggagaacaaactcaaggagagtctggaaaaggctctgaagtacaaggaacaggtcgagactctgtggccctggatcgataaatgtcagaacaaccttgaggagattaaattttgcctggaccctgcggagggtgaaaacagtatagccaagcttaagtctttacagaaggaaatggaccagcatttcggcatggtcgagctcctgaataacacagccaacagtctactgagcgtgtgtgaaattgacaaggaggtggtgactgatgaaaataagtcacttattcaaaaagtcgacatggtgactgaacaacttcacagcaagaagttttgtttagagaacatgactcaaaagtttaaggagttccaggaggtgagcaaagaatctaagcgacagcttcaatgtgctaaagaacaattagacatccacgattctctcggaagccaggcctactcgaacaagtatctgacaatgcttcaaactcaacaaaagtcactgcaggctttaaaacaccaggtcgatctcgcaaaacgcctggctcaggacctggtggtggaggccagcgactccaagggcactagcgatgtgttgttgcaggtcgaaacaatcgcccaggagcattcgaccctcagccagcaggttgacgagaaatgttcctttttggaaactaaactgcagggcatcgggcactttcagaacaccatacgggaaatgtttagccagtttgccgagttcgatgacgaactggacagtatggcgcctgtcggacgagacgctgaaacacttcagaaacaaaaagagacaatcaaagcctttctcaaaaaacttgaagcgctgatggccagcaacgacaatgccaataagacatgcaaaatgatgctggctactgaagagacttcacccgatctcgttggcatcaagcgtgacctggaggcattgtccaagcagtgtaacaaactattagaccgggcacaggcccgggaagagcaagtggaggggaccatcaagaggctggaggaattttacagtaaactaaaggagtttagtattcttctgcagaaggctgaagagcacgaagaaagccagggccccgtgggtatggagaccgaaacgatcaaccagcaactgaacatgtttaaggttttccagaaggaagagatcgagcctttgcaggggaagcagcaggacgtgaattggctgggccaggggcttatccagagtgccgcaaaatcaacgtctacacaggggctggagcacgacctggatgatgtaaacgcgcgctggaagactctgaataagaaggtggctcagagggctgcacagctgcaggaagcactgctccactgcgggaggtttcaggatgccctcgaaagcttgctctcatggatggtggataccgaagaactagtagccaatcagaagccaccttctgcagaatttaaggttgtgaaagctcagattcaggagcagaaactcctccaaaggctgctcgatgaccgaaaaagtaccgtggaagtgataaaacgggaaggcgaaaaaattgcaaccactgccgagcctgcagacaaagtgaaaatcctcaagcagcttagtctgctggactctcgctgggaagcgctgcttaacaaggctgagactcggaatcgtcagcttgagggaatctctgttgtggctcagcagtttcatgagactttggaacccctaaacgaatggctaacaaccatcgaaaagaggttagtgaactgcgagcccattgggacacaagcaagtaagctcgaggagcagatcgcacagcacaaggcactcgaggacgacatcatcaaccacaataagcacctgcaccaggcagtgagcataggtcaatccctaaaagtactgagctcccgtgaagataaggacatggtgcaaagtaaactcgatttctcccaggtttggtacatagagattcaggagaaatcccacagtcggtcagaattactgcagcaggccctgtgtaatgcaaaaatcttcggcgaagacgaggttgagctcatgaactggctgaatgaggtgcatgataaactttcaaagctatcagttcaggattactcaacagaggggctctggaagcagcagtcagagctccgcgttctgcaggaagatattctcctgcgcaaacaaaatgtcgaccaggccctgttgaatgggttggagctccttaagcagacgaccggcgacgaggtcctgattatccaggacaagctggaagcaatcaaggctaggtacaaggacattaccaagttaagcaccgacgtagccaagaccctggagcaagctctgcagttggcacgaaggttgcatagcacgcacgaagagctgtgtacctggctcgataaagtggaggtcgagctgctgtcgtatgagacccaggtactcaagggtgaggaggcatcacaggctcagatgagaccaaaggagctcaagaaggaagcaaagaataacaaggccctactggactccctgaatgaagtgtccagcgcactgctggaactggttccttggcgggcgcgggagggattagaaaagatggtcgcagaagataatgagaggtaccggctcgtgagcgatacaatcactcagaaagttgaggaaattgatgcagcaatcttacggagccaacagttcgatcaagctgctgacgctgagctcagttggataaccgagacagaaaaaaaactcatgtcgcttggcgacattcgccttgagcaagatcagacatcagcgcagctgcaggtgcagaaaacgttcactatggagatcctgagacataaagacatcatcgatgacctcgtgaagtccggacacaagatcatgaccgcgtgtagcgaggaagaaaagcagagcatgaaaaaaaagctggataaggtattaaagaattatgacacaatatgccagatcaactccgagagatacctccaactggagcgcgcccagtccctggtaaaccagttctgggagacatacgaagagctgtggccctggctcaccgaaacgcagagcattatatctcagctgccagcccccgcactcgaatatgagactctgagacagcaacaggaggagcaccgccaacttcgggagctgatcgcggagcataaaccgcacattgacaaaatgaataaaaccggacctcaattgctggagctgagcccgggagagggattctcgatacaagagaagtacgtcgctgcagatacactttacagccagataaaggaggacgtgaaaaaaagggcggttgcactggacgaggcgatcagccagagtacacagttccatgataagattgaccagatactcgaaagtctggagcgtattgtcgaacggctgagacagcccccctcaattagtgcagaagtcgaaaaaattaaggaacagatttctgagaacaaaaatgtttcggtggacatggaaaaattgcaaccgctttacgaaacactgaaacaacggggagaagaaatgatagcccgtagcggcggcaccgataaagacatctctgccaaagccgtccaggacaagctcgaccagatggtgttcatttgggaaaatatccacacattagtagaagagagagaggctaaactattagacgtgatggagcttgctgagaaattttggtgtgatcacatgagtttaattgtgacaattaaagacacgcaggacttcatccgagatctcgaggacccaggaattgacccctcagtggttaaacaacaacaggaggctgcagagaccatccgggaagagatcgacgggcttcaggaggaacttgacatagtcatcaatcttggctccgaactcatcgccgcctgcggagagccagacaaacccatcgttaagaaatccatcgacgaactcaattctgcttgggactctttaaacaaggcttggaaggatagaattgacaaactggaggaggcgatgcaggcagcagttcagtatcaggatgggttacaggccgtgtttgattgggtcgatatcgcaggaggaaagttagctagcatgagccccataggtacagatcttgagactgtcaagcagcagatagaagagcttaaacagtttaaaagcgaggcataccaacagcagatcgagatggaaagattgaaccaccaggctgaactgctgctcaagaaagttacagaagaaagcgacaagcacaccgtccaggatcctctgatggagctcaaattgatatgggacagcctcgaggaaaggattataaatcgacagcataaactggaaggggcgctgctggccctggggcagttccagcacgctctggatgagttactggcatggctaactcacacagaaggactgctcagcgagcagaagccggtcggcggagaccccaaagctattgaaattgagctggccaaacaccatgttctgcagaacgacgtgctcgcacaccaaagtactgtggaagctgtgaacaaagccggaaacgacctcatcgagtcctcggccggcgaagaagccagtaatctgcagaacaaactcgaggttcttaaccagaggtggcagaatgttctagaaaagacagagcagcgcaagcagcagctggacggtgcgctacggcaggccaaagggtttcacggagagatcgaggatctgcagcagtggctcaccgatacagaacgtcacctgctcgcctctaaaccacttggaggactgcctgaaacagccaaggagcagctgaacgtacacatggaggtctgcgcagcctttgaagccaaggaggagacctacaagtctctcatgcagaagggtcagcaaatgcttgcacgctgccctaaatctgcagaaaccaatatagaccaggatataaataacctaaaggagaagtgggaatctgtggaaacaaagctgaacgagaggaaaactaaactggaagaggccctgaacctggccatggagtttcacaactctcttcaggacttcatcaactggttaactcaggctgagcaaacacttaacgtcgcgtcacggccctcattgatactggatactgtactgtttcagattgatgaacataaggttttcgcaaacgaagttaactcccacagggaacagattattgagctagacaagacagggacccatttgaaatacttttcccaaaagcaagacgttgttttaatcaaaaatttgctcattagtgtgcaaagtcggtgggagaaggtagtgcagaggctggtggagcggggacggtccttagacgacgccaggaagcgggcaaagcagttccacgaggcatggtcaaaactgatggagtggctggaagaaagcgagaagagcctggactctgagcttgagatcgccaatgatccagacaagataaagacgcagctggcccagcataaggaattccagaaaagcctcggggccaagcactccgtgtacgacactactaaccgcacggggcgatccctgaaagaaaagacatcccttgccgatgataacctgaagctggatgacatgttatccgaacttcgggataagtgggatacaatttgcggcaaatcagtggaaagacagaacaagttggaagaggcgctgctattcagtgggcagtttacagatgcgctgcaagcactcatcgattggttgtaccgtgtggaaccacagctcgccgaggatcaaccagttcacggggatattgacctggtcatgaacctcatcgataatcataaagccttccaaaaagaattgggcaaaagaacctctagtgtacaggcccttaagcggtccgccagagagctcattgagggaagccgggatgactcatcttgggttaaggtccaaatgcaggagctcagcacccgctgggagaccgtgtgcgctctgagtatatccaagcagacccgactcgaggccgccctccggcaggccgaggagttccattccgtggttcacgccctcctcgagtggctggccgaggctgagcagacgctaaggttccatggcgtcctgcccgacgatgaagacgcgctcaggaccctgatcgaccagcacaaggagttcatgaaaaaacttgaagagaagcgcgccgagcttaacaaggccaccacgatgggagacactgtcctcgccatttgccatccagatagtatcacgaccattaaacattggattaccattatcagagcgcggtttgaagaggttctagcatgggccaagcagcaccagcagcgactcgcgagtgcccttgctggtctcattgctaagcaggaactcctagaggctctactggcctggctccagtgggctgagacaactctcaccgacaaagacaaagaggtgattccacaggaaatcgaagaggtgaaggccctgattgccgaacaccagacctttatggaggagatgacccgcaagcaacccgatgtcgataaagtgactaagacctacaaacggcgggccgccgacccttcttccctgcaaagccacattcctgtcctcgataaaggccgtgcaggacgaaaaaggttccccgcttcctcactttatccctctggtagtcagacccagattgaaacaaaaaaccctcgagtcaatttgcttgtctcaaaatggcagcaggtgtggcttctggcattagagcggaggaggaagcttaatgacgctttggatcgcttggaggaattaagggagttcgcaaactttgattttgacatttggaggaagaagtacatgagatggatgaaccacaaaaaaagccgcgtgatggacttcttccgtaggattgacaaggatcaggatggaaaaattacaagacaagagttcattgatggtattttgtcctctaaattccctacgagtcgtctcgagatgagtgctgtggcagacatcttcgaccgggacggtgatggctatattgactactatgagtttgtggccgccttgcacccaaacaaagatgcatataagccaatcacagatgctgataaaatcgaggatgaagttacccggcaggtcgccaagtgcaagtgtgctaaacggtttcaagtggagcaaataggcgataataagtaccgcgtttcatttcagtccaatttcggtgattcccagcagttgaggcttgtgcgcatcctgcgctccacagttatggtccgcgtgggcggtgggtggatggccctggatgaatttctggttaagaacgacccttgccgcgtgcatcaccacgggtcgaagatgcttaggtctgaatcaaacagcagcataactacgacgcaacccactattgccaaaggaaggactaacatggagctgcgcgaaaagttcatcctcgccgacggcgctagccaaggaatggccgcatttagaccccgcggtagacggtcgagaccctcaagcaggggggcgtcgcccaatagaagcacaagcgtgagctcccaggccgcacaggctgccagcccacaggtgccggcgacaacaacacccaagggcactccgatccagggctctaagctgaggctgcccggttacctaagcggcaaaggattccacagcggggaggacagtggccttataacaacagcggcggctcgggtcaggactcagtttgcagacagtaaaaagactcctagtcggcctgggtcaagagccgggagtaaagcaggcagcagggcctccagccggagagggagcgacgcttcggactttgatatttccgagatccagtccgtgtgctccgatgtggagaccgttccccagacgcatcgtcccacaccacgggcaggcagccggccttccacagccaaaccatccaagattccaacacctcagaggaagagtcccgcctctaaactagacaagagcagtaaacggtag

SEQ ID NO: 269268 - DNA, 9182 bp, Artificial Sequence
  derived and/or modified sequence
atgcactcctcatcttattcttatcggtcatctgattcggtcttctctaacaccactagcactagaacgagcctggactctaatgagaacctcttactggtgcactgcggaccaaccctgatcaattcctgtatcagctttggctccgaatcctttgatggccacagactggagatgctgcagcagatagccaatcgcgtccaaagagattctgtaatctgcgaggacaaattaatcctcgctggcaatgctcttcagtcagacagtaagcgcttggagagcggagtccagttccagaatgaggccgagattgctggatatatcctggagtgtgaaaacctgttgcggcagcacgtgatcgacgtccaaatcctcatcgatggaaagtactatcaggccgatcaactggtccagcgagtcgctaagctccgtgacgagatcatggcacttcgaaacgagtgttcaagcgtctactctaaagggcgtatattgactacggaacagacgaaactgatgatttctggcataacccaatccctcaattccgggttcgcccagacactccacccgagtctgaccagtgggcttacccaaagcctgacccccagcctgaccagctcatctatgacatcaggactgtcctccggaatgacaagtcgccttaccccgtctgtgacccctgcttacactcctggcttcccctccggactagtccctaacttttcctctggcgtggagccaaattccctgcaaaccctgaagctaatgcaaatcagaaagccactgctgaagagtagtttactggatcagaatctgacagaggaggagatcaatatgaaatttgtgcaagatctcctcaattgggtcgacgaaatgcaggtgcagctggacaggaccgaatgggggtcagatctgccctcggtcgaaagccaccttgaaaatcataagaatgtgcatcgtgcgattgaagagttcgaaagtagcctgaaagaagccaagatctcagagattcagatgaccgcacccctgaaacttacctacgccgagaaattgcataggttggaatcccagtacgctaagctgttgaacacatcgcggaatcaggagcggcatctggataccctgcacaactttgtctccagagctaccaacgagctgatctggttgaacgaaaaagaggaagaggaagtcgcttacgactggtcagagcggaatacaaatattgctcgtaagaaagactatcacgccgaattaatgagagagctggaccaaaaagaggagaacatcaaatcggttcaggagatcgcggaacaattgctgctagaaaaccaccccgctagactgacgatagaagcgtacagagctgctatgcaaacccagtggagctggatcctgcagttgtgccagtgcgtggaacaacatatcaaggagaacaccgcatatttcgagttttttaatgatgcaaaggaggctaccgattatcttcggaacctgaaggatgcgatacagcgaaaatactcttgtgatcgcagctcctcaatccataagcttgaggatctggtgcaagagagcatggaagagaaggaggagctcctccaatacaagagcacaatagctaacctaatgggcaaagcaaaaacgatcatccagctgaagccacgtaactctgattgcccactgaaaaccagcatccccatcaaggcgatctgtgactacaggcaaatcgagataactatctataaggatgatgagtgcgtcctggctaacaactctcatagggccaaatggaaggtgatttctcctacagggaacgaagcaatggtgccgtcagtatgtttcaccgttcccccacccaacaaggaggcggtcgatctggctaatcgcatagagcagcagtatcagaatgtgttaactttatggcacgagtcccacattaatatgaagtcagtggtaagttggcactatctgattaatgagatcgatcggatccgtgcttctaacgttgcgtccataaagacaatgttgccaggggaacaccaacaggtgttgtcaaatctgcagagtagatttgaggactttctcgaggactctcaggagtcccaggttttcagcggtagtgacataactcaattggagaaggaagtcaatgtgtgcaaacagtactatcaggagctcctgaagtcagccgaaagagaagaacaagaagagtccgtgtacaacctttatatatccgaggtccgcaacatccggcttagactggaaaattgtgaggaccggctgatcaggcagattcgaacccctttggagcgagatgacctacacgaatccgtattccgcatcacggagcaggagaagcttaaaaaagagctggagagactgaaagatgatctcgggacgattacaaataaatgcgaggaatttttttcacaggcggctgccagttcctccgtaccgaccctgaggagtgagttaaatgttgttttgcaaaacatgaaccaggtgtactcaatgagcagtacttatattgataagctgaagaccgtgaatcttgtacttaagaacacccaggcggctgaggcgctggtgaagctctatgaaaccaaactctgtgaggaggaagctgtcatcgccgataaaaacaatatcgagaatctgatctcaactctgaagcaatggcgttcagaggtggatgagaagagacaggtgtttcacgcactggaggacgagcttcaaaaagcgaaggccatttcggatgagatgttcaagacatacaaagaaagggacctcgattttgactggcacaaggagaaggccgaccagctggtagagcgttggcagaatgtacatgttcagatcgataatcggttaagggatctggagggtattggaaagtcacttaagtattatagagacacataccaccccttggacgactggattcagcaggtcgaaaccactcaacggaaaattcaggagaaccagccagagaactcaaaaacacttgcaacacagctcaaccagcaaaagatgctggtcagcgagattgaaatgaagcagtctaagatggacgagtgtcagaaatacgcagagcagtactctgccaccgtgaaggattacgaactacagactatgacttacagggcgatggtggactctcagcagaagagcccggtcaaaagaagaaggatgcagagctccgccgacctgatcatccaggagttcatggatcttcgaacccgttatactgctctggtgactctcatgactcagtatatcaagttcgcaggcgattctctcaagaggctggaggaggaagaaaaaagcctggaagaggaaaagaaggaacacgtggagaaggcaaaggaactccagaaatgggtgtctaatataagtaagacactgaaagatgccgagaaggcaggcaaaccacccttcagcaagcagaagatcagcagcgaagaaatttccactaaaaaagaacagctaagcgaagccttacagactatacaactcttccttgctaagcacggcgacaaaatgacggatgaagagcgtaatgagctggagaaacaagtgaaaacactccaggagagttacaacctgctgttctccgagtcccttaaacagttacaagaatcccagaccagcggagatgtgaaggtggaagagaagctggataaagttatcgccggaactatcgaccagacgacaggggaagtgctcagcgtctttcaggccgtgttgagggggcttatcgattatgatactgggatcaggctactcgagacacaactcatgatcagtggactgatctcccctgaactgaggaaatgtttcgatctgaaggacgccaagagtcatgggttgattgatgagcagatcctgtgtcagttgaaagaacttagcaaggctaaagaaatcatctcagcggcatcacctactacaatccccgttctggacgcactggcacagagcatgatcactgagtccatggctatcaaggtcttagagattctcctgagcacggggtctctagtgattcccgcaacgggtgagcagctaactctacagaaggccttccagcaaaatctggtatcatccgctctcttctcgaaagttctggaaaggcagaatatgtgcaaggatctgattgacccatgcaccagcgaaaaagtgtctttgatagacatggtgcagcgttcaaccctccaggagaacacgggcatgtggttactgcccgttcgcccacaggaagggggacgaatcacgttgaagtgcggcaggaacatcagcatcctgcgcgctgcgcatgagggactcattgatcgagagaccatgtttcggctgttaagcgctcagcttttgagcggcggtctgataaactccaattctggccagcgcatgaccgtggaggaggcagtcagggagggagtaatcgaccgcgataccgccagttccatactgacctatcaggttcagaccggagggataattcagagcaatcccgcaaagaggttaactgtcgacgaggccgtacagtgcgacctgattactagttccagtgccctgttggttctggaggctcagaggggttacgttggactgatatggccccactcgggagaaatctttccaactagcagcagtttacagcaggaacttatcacaaacgagttggcatacaagatcctgaatggaaggcagaaaattgccgcactctatattcccgagagttctcaagtaatcggactggatgccgctaagcaactcggaatcatagacaataacaccgcctcaatactgaagaacattaccctgccggataaaatgcccgatctcggcgacctggaagcctgtaaaaacgctcgtcgatggctgtccttctgcaaattccagccatccaccgtacatgattacagacaggaggaggacgtgtttgatggggaggagcccgttacgacacagacatccgaggagaccaaaaaacttttcttaagttacctgatgattaatagctacatggacgcgaatacaggacagagactgttgctgtatgatggtgatcttgacgaggcagtcggcatgctattggagggttgtcacgccgagtttgatggcaacaccgccatcaaggagtgtctggatgtactttcttcatcaggggtgtttctgaataatgcaagcggacgggaaaaggacgagtgtacagccactccctcgtcctttaacaagtgtcattgcggagagcccgaacatgaagaaacccctgagaatcgcaagtgcgccatcgatgaggaatttaatgagatgaggaacacagttatcaacagtgaatttagccagtctggcaagctggcgagtactatatctatcgatccaaaggttaacagcagcccctcggtatgtgtaccttctctgattagctatctgacacaaaccgaacttgctgatatctctatgctgaggtcagactccgagaatatcttgacgaactacgaaaaccagagtagagtcgaaaccaacgagcgcgcaaatgagtgctcgcattctaagaatatccagaacttcccctccgacttaatagagaaccctataatgaagtctaagatgagcaagttctgtggggtaaatgagaccgaaaacgaagacaacacaaatagagactcacctatctttgattatagcccccgtctctctgccctgctatcacatgacaaactcatgcatagtcagggctcgttcaacgatacacatacacctgagagcaacgggaacaaatgtgaagctccagccctttcattctctgacaagacgatgctgtccggtcagcgaatcggagagaaatttcaagatcagtttttgggaatcgctgcgataaatatttccctgccaggcgagcaatacggtcaaaagtccttgaacatgattagttccaacccacaggtgcagtaccataatgacaaatatatttctaatacttccggggaagatgagaaaacccacccaggatttcagcagatgcccgaggacaaggaggacgaatctgagattgaagagtattcttgcgccgttactcctggcggagacactgataacgccatagtgagcctgacatgtgcaacaccgcttttagacgaaaccatctctgcaagtgactatgaaacttcattactaaatgaccagcagaataacaccggcacagataccgacagcgatgatgacttctatgatactccactttttgaagatgatgatcatgacagcctcttgttggatggggatgaccgggattgtctccatcccgaggactacgacacattgcaggaggagaatgatgagactgcaagccctgcagatgtgttttacgatgtcagcaaggaaaatgagaacagcatggtcccccagggcgcaccggttgggtccctttctgtgaagaataaagcccactgtcttcaggattttctgatggatgtggaaaaggatgagctggattctggggagaagattcacctgaacccagtgggcagcgataaggtgaacggtcagagtctggaaactggatcagaaagagaatgcacaaacatcctcgaaggtgacgagagtgattccctcaccgattacgacatagtcggcggaaaggagagctttaccgcctctttaaagtttgacgacagtggaagttggaggggcagaaaagaggagtatgtaaccggacaagaatttcattcggacacagaccatctggactcaatgcagtcagaagaatcatatggggactacatctacgattccaacgaccaggacgatgatgacgatgatggtatcgatgaggaaggaggcggaatacgtgatgaaaacgggaagcctcggtgtcagaacgtggccgaggatatggacatccaactgtgcgcatccattctgaatgaaaattccgacgagaacgagaacatcaacacgatgattcttctggacaaaatgcatagctgttctagccttgaaaagcaacagcgcgttaacgtcgtccaactggcttccccaagtgagaacaacctggtgacagaaaagagcaatctccctgaatataccacagaaattgccggaaaaagtaaggagaatctgctgaatcatgaaatggtcctgaaggatgttcttcctccaataattaaggataccgagtcggagaagaccttcggacctgccagtatcagccatgacaacaacaatataagctctacttctgagctgggaaccgacctcgccaatacaaaagtaaaattgattcagggatcagaactgccagaactgaccgatagtgttaaaggcaaagacgaatatttcaagaacatgacacctaaggtcgactcatctctggaccacatcatctgcaccgaacccgatctcatcggaaagccggctgaagagtcgcaccttagcctgattgcatccgtgacagacaaggatccgcagggtaacggttcagacctgattaaaggccgtgacggcaaatctgatatcctgatcgaggatgagacatccatccagaagatgtatcttggggagggagaagtattagtggaaggcttggttgaagaggaaaatcggcacctgaagctcctgcctggaaagaatacacgcgatagcttcaagttaattaactctcaattcccatttccacagatcacgaataatgaggagctcaaccagaagggtagcttaaaaaaggccactgtcacgttaaaggacgagccaaacaatctacaaattattgtgagcaaatcccctgtgcagtttgagaacctggaggagattttcgacactagcgtgtcaaaggagattagcgatgatattactagcgacatcaccagttgggaaggtaatacccattttgaagagtcttttactgatggccctgagaaagaactggacctgttcacctaccttaaacactgtgcaaagaacatcaaagctaaggatgtcgcaaaacctaacgaagatgtgccgtcccatgtgctaattacagctccccctatgaaggagcatctgcaattgggagtgaataataccaaggagaaatctacaagtactcagaaggattcccctttgaatgacatgatacaatccaacgatctgtgttcaaaggagtccatttcggggggtggaacggaaatatcccagtttacaccggaatccattgaagctactctgtccattctgtctcggaaacatgttgaagatgtcggcaagaatgactttctgcaaagcgagcggtgcgcgaacggcctcggcaatgacaacagctccaacaccctgaacaccgattattccttcctcgagatcaataacaagaaagagagaatcgaacagcagctgcccaaggagcaggctttgagcccaagatcccaagaaaaagaggtccagatacccgagttatcgcaggtttttgtggaagatgtgaaagatattctgaagtccaggctaaaagagggtcacatgaacccccaggaagtggaggagccgtccgcgtgcgcagatacaaaaattttgattcagaatctcattaaacggatcacaacatcacagcttgtgaatgaggcgtctacagtccccagcgactcccagatgagcgactcctccggtgtgtccccaatgaccaattctagcgagctgaagccagaatctagagacgatcccttctgtattggtaatttgaagagcgagctactgctcaacatcttgaagcaggaccagcacagccagaaaatcactggggtcttcgagctgatgagagagctcactcatatggagtatgacttagagaagcgcggtattacttccaaggtgctgcccctgcagttggaaaacatcttctacaaactgctggccgatgggtattctgaaaaaatcgagcacgtcggagatttcaatcaaaaggcgtgcagtacatcagagatgatggaggaaaaaccacacatcctgggggatataaaatccaaagaaggcaactactacagtcccaatctcgagactgttaaggagattggtctggaatccagtactgtttgggcaagcacactccccagagatgagaaactgaaggacttgtgtaacgattttccatcacatttagagtgcacaagtgggtccaaggagatggcctcaggggacagcagcacagaacagta

SEQ ID NO: 269269 - DNA, 21741 bp, Artificial Sequence
  derived and/or modified sequence
atgcattcttcttcttactcttaccgcagttctgattccgtgttcagcaatacgaccagtacgcggacttcactggactctaacgaaaatctattgctggtgcactgcggccctactctgattaatagctgtatttcttttggttcagagtcattcgacggccacagactggagatgctccagcagatagccaatcgcgtccaacgcgatagtgtgatttgtgaagacaagctgattctagccggaaacgccttgcaatcagacagcaaaagactggagtccggcgtgcaattccagaatgaggcggagattgctgggtacatccttgagtgcgaaaacctgctccgacaacatgtaattgacgtgcagatcctaattgatggcaagtattatcaggccgaccaactagttcagagagtagctaagcttagggatgaaattatggctctgaggaatgagtgtagttccgtgtatagcaaaggcaggatactgaccacagagcagaccaaactcatgatctccggtattacccagagcctgaactctggatttgcccaaacacttcatccctccttaacgagcgggctcacccagtcactgactccatcactaacaagctcgtctatgacgtccggactgagtagcggtatgacttcaaggctgacgccttccgtcacccccgcttataccccgggattcccgagcggtctcgtgcctaactttagcagcggtgtcgaacctaacagtctccagactctaaaactgatgcaaatcaggaagccgctgctgaagtctagcctcctggaccagaacctaaccgaagaggagatcaacatgaaatttgttcaggacttgcttaattgggtagatgagatgcaggtgcagctggaccggacagagtgggggtcggatctgccctctgtggaatcccatctcgaaaaccataagaatgttcatcgtgctatcgaggaattcgagagttctcttaaagaggcaaagatatccgaaattcagatgaccgctccactaaaactgacatacgccgagaagctccaccgactggagtcacagtatgccaaactgctcaacacgagtagaaatcaggagaggcatctcgataccctgcataactttgtgagtagagcgacaaatgagctgatctggctgaacgagaaggaagaagaggaagttgcttatgactggtctgagaggaacacaaatatcgcccgaaaaaaagattaccatgctgagctgatgcgcgagttagatcagaaggaggaaaacattaaatcggtgcaggaaattgccgagcaactgctgttggaaaatcatccagcacgccttacaattgaagcctaccgggctgcgatgcagactcagtggagctggatattgcagctgtgtcagtgtgtggaacagcatatcaaggagaacacagcttatttcgagttcttcaatgatgcgaaggaagctaccgactacctacggaaccttaaggatgccatacagcgtaagtattcatgtgaccgaagcagcagtatccataaactcgaagacttggtgcaggagtctatggaagagaaggaagaactcttgcagtataaaagcaccatcgccaatctgatgggcaaggctaagactattatccaactgaaacctcggaacagtgattgccccctgaagaccagcattcctatcaaggcaatttgcgattatagacagattgagatcacaatttataaagatgacgagtgcgtcctggccaataatagccaccgagccaaatggaaagtgatctcccccactggcaatgaggctatggttccaagcgtctgttttaccgtgccaccacctaataaggaagcagtggacctggcgaaccgtattgaacagcagtaccagaacgtcttgaccttgtggcatgagagtcacattaacatgaagtccgtcgtgagctggcactacttgatcaatgaaatcgaccgaataagggcctctaacgtggctagtatcaagacgatgcttcctggtgagcaccaacaggtcttaagcaacctgcagtcaagattcgaagatttcttggaagacagtcaggagagtcaggtcttctcgggcagtgacatcacgcagttggagaaagaagtgaacgtgtgcaagcagtattaccaagagctgctcaagtccgccgagagggaggagcaggaggaatctgtctacaatctttacatttcggaggttcgaaacatacgactgagactcgaaaattgtgaagatagacttatcagacagattcgtacacctctcgaacgggacgacctgcatgaatccgtgttcagaataacagaacaagaaaagctcaagaaggaactggaacgattaaaagacgatcttggcacaataacaaacaaatgtgaagagttttttagtcaggccgctgctagcagttcagtccctacattacggtcagagctgaacgttgtcctccagaacatgaaccaggtgtatagtatgagttccacgtatatcgataagctgaagaccgtgaacttggttctgaagaacacacaggcggctgaggccctcgtaaaattatatgagaccaaactgtgtgaggaggaagctgttatagcagacaaaaacaatattgagaacttaatttcaacattgaagcagtggcgttcagaggtggacgagaagcgccaggtttttcatgccctcgaggacgagttgcagaaggctaaggccatctcggatgagatgtttaagacttacaaggagagagatctggacttcgattggcataaagaaaaggctgatcagcttgtggaaagatggcagaatgttcacgtacagatcgacaaccgtctgcgggatttagaggggattggaaaatctctgaaatattatcgagatacctatcatccattggatgattggatccaacaggtcgagactacccaacgcaagatccaggagaaccagcctgagaactctaaaactctcgctacgcagcttaatcagcaaaaaatgctggtatccgaaattgagatgaagcagagtaagatggatgaatgtcagaagtacgctgaacaatattccgcaaccgtaaaagactacgagcttcagacaatgacctatcgagcgatggttgattcacagcaaaaatctccggtgaaaaggcggagaatgcagtcttccgccgacctgataatccaggaattcatggacctgaggacaagatacacagctctcgtgacattgatgacacagtacatcaagttcgccggagactctctgaaacgtctggaggaagaggagaaatcattggaggaagagaaaaaggagcatgtggaaaaagctaaagagctgcaaaaatgggtgtccaatatctctaagacgctcaaggacgccgaaaaggctggaaaacctccctttagtaagcagaaaatctccagtgaggaaatttctacgaagaaggaacagctttccgaagccctgcaaactatccaactattcctcgccaaacatggggacaagatgaccgatgaggagagaaatgagctcgagaaacaggttaaaactctgcaggagtcctacaacctgttgttttcagaaagcctcaagcagctccaagagtcacaaactagcggtgatgtgaaagtggaggaaaagctggacaaggttatcgcaggcaccattgatcagaccacaggagaggtgctgagcgtctttcaggcagtgctgcggggactcatcgactatgacacaggcatccgacttttagagactcagctgatgatatcagggctgatttctcccgagcttagaaaatgctttgatttaaaagacgcaaagagtcatggcctgatcgacgagcagattctatgccaactcaaagagctctcaaaagcaaaagaaataatctctgccgcttctcccacgaccattccagtgttggatgccctggctcagtccatgattactgagagcatggctatcaaagtgctggagatacttcttagcaccggctcactggtgatcccggctacgggtgaacagttaaccttgcagaaagccttccagcaaaatctggtttcatctgcgctgttcagtaaggtgctagagcgccagaatatgtgtaaggaccttattgatccttgcacatctgaaaaggtcagcctaattgacatggtacagcgcagcaccttgcaggaaaacaccggcatgtggcttcttcccgtgaggccgcaggaagggggacgcataacgttgaagtgcggcagaaacataagtattttgcgagcggctcacgagggccttattgaccgtgaaacgatgtttcgtctgctctctgcccagctgctgtctggtggcctcatcaattcaaattcaggacagagaatgaccgtagaggaggctgtgcgtgagggagtgatagatagagataccgcctctagtatcctcacataccaggtccaaacaggaggcattatccagagcaacccagcgaagaggctaactgtcgacgaggcagttcaatgtgacctgattacaagctcctccgctttattggtgctcgaggcacagcgcggttatgtaggcctgatctggccacattctggtgagatctttccaacctcgtcctcattgcagcaggaattgataacgaacgagttggcttacaaaattctcaacggtcgccagaaaattgctgccctctatatcccggagagcagccaggtgattgggctagacgccgctaagcagctaggtattatcgataataatactgcgtcaattttgaaaaatatcaccttgcctgacaagatgccagatctcggggatcttgaggcctgcaaaaatgcccgtcggtggctgagtttctgtaaattccagcccagcactgtgcacgactaccgccaagaagaagacgtgtttgacggtgaggagccggttaccactcagacatccgaagaaacgaaaaagctgttcctgtcctacctcatgattaattcatacatggacgcaaacaccgggcaaaggctcttgctgtacgatggagacctggacgaagccgtgggcatgctccttgaaggctgccacgccgagttcgatggcaatactgctattaaggagtgtttagacgttctatcctcctcaggcgtgttccttaacaacgcctctggaagggagaaggatgagtgcacggccacaccttcaagttttaataagtgccattgtggtgaaccagagcatgaggagactcctgaaaaccgcaagtgtgcaatcgacgaggagtttaacgagatgcgaaatacagtgataaattccgaattttcccagtcagggaagctcgcaagcacgatttcaattgacccgaaggtcaacagtagcccttcagtgtgcgtccccagcctgatctcttatctgacccaaactgagctggcagatatctcaatgctcagatcagattcagagaatatcctcactaactacgagaatcagtcaagggtggagacaaatgaaagagcgaatgaatgctctcactccaagaatattcagaacttcccctctgatttgattgagaaccctatcatgaagagtaaaatgtctaaattttgtggagttaacgaaaccgagaacgaagataatactaatcgcgactcaccaatcttcgactactcaccgaggctgtctgctctgctgtcccatgacaagctgatgcactctcagggctcctttaatgacacgcacactccggaaagcaacggtaataagtgcgaagcccctgctttatcttttagtgacaaaactatgctcagtggacagcgcattggcgagaagtttcaagaccagttcttagggattgccgctatcaacatatccctccctggcgagcagtacggccagaaatctctcaacatgatcagttccaaccctcaagttcagtatcacaatgacaagtatatttccaatacttcgggggaggatgagaagacccaccctggtttccaacagatgccagaagacaaggaagacgagtcagaaatcgaagagtacagttgtgctgtcacacctggcggagatacggataatgctatagtcagcctaacctgtgccacccccctcctggacgaaactatctccgcgtcagactacgagacctccctccttaatgaccagcagaacaataccggaacagatactgactccgacgatgatttctatgatactcccctgtttgaggacgacgatcacgattccctgctcctggatggagatgatcgagactgtctgcacccagaagattacgacacactgcaagaagagaacgatgagacagcctctcctgctgacgtgttttatgatgtgtccaaggaaaacgagaactccatggtccctcaaggcgctcccgtagggtccctgtctgtcaagaacaaggcccactgtctgcaggacttcctgatggacgtggaaaaagacgagctggatagcggggaaaaaatccatctgaatccggtgggcagcgataaggtcaatggtcagagtctggagacgggatctgaacgagaatgcacaaacatactggaaggcgatgaaagcgacagtctgacggattacgatattgtgggtggaaaagagtcctttacggctagtctgaagttcgatgactccggcagttggcggggaaggaaggaagaatacgtaacaggccaagagttccactctgacaccgatcaccttgactccatgcaaagtgaagaaagctacggcgattatatttatgactcaaatgaccaggacgacgatgacgatgacgggatagatgaagagggagggggtattcgagatgagaatggaaagccccgatgccagaatgtggccgaggacatggacatacagctctgtgcatctatattgaacgaaaacagcgatgagaacgagaacatcaacaccatgatccttctggacaagatgcactcctgcagcagcctcgaaaaacagcagcgcgtgaatgtagtgcagctcgcctcacccagtgagaacaatctcgtgactgaaaagagcaatttgccagaatacacaacggaaattgctggtaaatcaaaggaaaatctgctgaaccacgaaatggtgctgaaagacgttctgccgcctatcattaaagacactgagtcagaaaaaaccttcggtccagcgagtattagccatgataataacaacattagttccacatctgaactgggcacagacctggccaacaccaaggtcaaattgattcaaggaagtgagctgccagaattaactgacagtgtcaaggggaaggacgaatactttaaaaacatgactccaaaagtggacagtagtttagatcacatcatttgcaccgaaccagatctaattggcaagcccgcagaggagagtcacctctcactcatcgcttccgtgactgacaaggatccccagggcaacggctctgacctgataaagggcagagacgggaagagtgacattctgatagaggacgaaacttcaatacagaaaatgtatctcggcgagggtgaggtgctggtcgaggggctcgtggaggaggagaatcgtcacctgaaacttttaccgggaaaaaatacccgggactcgttcaaacttatcaacagccagttccccttccctcaaatcaccaacaacgaggaactaaaccagaaagggtctctaaagaaggccacagtcacattaaaagacgagcctaataacctgcagattattgtatctaaatccccagtacaatttgagaacctggaggagatttttgatacatcagtaagcaaggagatctctgacgacatcacatcagacatcacttcttgggaggggaacacccactttgaggaatcattcacagatgggccagagaaggagctcgacttatttacatacctgaaacactgtgccaaaaatattaaggctaaggacgttgcgaagccaaatgaggacgtgccatctcatgtactgataacagctcctcctatgaaggagcatctccagcttggcgtgaacaataccaaggaaaagagtacaagtacacagaaagattcccctctgaatgacatgatccagtctaacgacctgtgttcaaaagagagcatctcaggaggtgggacagagatctctcaattcaccccagaatcaatcgaggccacgctatccatcctgagtcgcaaacacgtagaggatgtgggcaaaaatgatttcttacagagtgaaaggtgtgcgaacggtctcgggaacgacaattcgtctaacacattgaatacagactatagcttccttgaaattaataataaaaaggagcgcatcgaacagcagctcccaaaggagcaggccctgagtccgagaagccaggagaaagaggtccagatcccagagctgtcacaggtgtttgtggaggacgtcaaggatatcctaaaatctcggttaaaggagggacacatgaaccctcaggaggtggaggagcctagtgcttgtgcagatactaaaatcttgatccagaatcttataaaacgaatcaccacctctcagcttgtcaatgaagcctctacagtcccatcagattcccagatgtctgactcctcaggggtctctcccatgactaattcatccgagctcaagcctgagagccgggacgatcctttttgcattgggaacctcaagagcgagctgctgctgaatatcctgaaacaggatcaacatagccaaaaaattaccggggtgttcgagctgatgcgtgaattgacacacatggagtacgatctcgaaaagcgcggaatcacctccaaggtgctcccactccagctggagaacatattctataagctcttggcagatggttactctgaaaaaattgagcacgttggagacttcaaccagaaggcttgctccacctccgagatgatggaggaaaagccgcacattttgggcgatattaaatcaaaggaggggaattattatagccctaatctcgagacggttaaggaaatcgggctggagtcctctactgtctgggcttcaaccttacctagggatgaaaagttgaaagatctgtgtaatgactttccttcccaccttgaatgtacatccggctccaaggagatggccagcggtgactccagtactgaacagtttagctcagaattgcaacagtgccttcagcacaccgagaagatgcatgagtatctgactctgctccaagacatgaagccccctctggacaatcaggaatcgttagataacaatctggaggcactgaagaatcagctgagacaactggaaacctttgagctgggtctagcccctattgcggttatcctgaggaaagatatgaagctagctgaggagttcctgaaatccctgcccagtgactttccgcgagggcatgtggaagaattgagtatcagccatcagagcctgaagacagcttttagttccttatccaatgtttcctctgaacggaccaaacagataatgctggccatcgattctgaaatgtccaagctcgcagtgtctcacgaggagtttctccacaaactgaagtctttctcggattgggttagcgagaagtccaagtctgtgaaggacattgagattgtcaatgtccaagactccgagtatgtaaaaaagcggcttgagtttctcaaggcgaataacgtgctcaaggacctgggacataccaagatgcagcttgaaaccactgctttcgacgttcagtttttcatatcagagtatgcccaggatctgtcccccaaccagagcaagcaactgcttagattgctcaatacaactcagaagtgcttcttggatgtccaggagtcggtaaccactcaagtggaacgactcgagacccagctgcatctagaacaagacctggatgaccaaaagattgtggccgagaggcagcaagagtacaaggagaaactccaagggatctgcgatctcctaacccagactgaaaacagattaattggtcaccaagaggccttcatgatcggtgacggaactgttgagctcaaaaagtaccagtcaaagcaagaggaattacaaaaagacatgcagggcagtgcgcaggcacttgcagaggtggttaaaaatacagagaactttctgaaagagaacggggaaaagctttctcaggaggacaaggccctgatagagcaaaagctgaatgaggcgaagatcaaatgtgagcagctgaaccttaaagccgaacagagtaagaaagaattggataaggtcgtgacaaccgccatcaaagaggaaacagaaaaggtcgctgctgtgaagcagctggaagaaagcaagaccaagatcgaaaatcttttagactggttgtcaaatgtggataaggatagtgagcgggcaggtaccaagcataagcaggtcatcgagcagaatggtactcactttcaggagggtgacggtaaaagtgctattggagaagaggacgaggttaatggaaatctgctggagactgatgtagatggccaggtgggtactacacaggagaacctcaatcagcagtaccagaaggtgaaagcgcagcacgagaagatcattagccaacaccaagccgttattattgctactcagtccgcgcaggtcctgttagagaagcaagggcaatatctgagccccgaggaaaaggagaagctgcagaagaacatgaaggagttgaaagtccattacgagaccgcactggccgaaagcgaaaaaaagatgaagttaactcacagcctgcaggaggaactggaaaagtttgacgctgattataccgagttcgaacactggcttcagcagagtgaacaggagctcgagaacttggaggccggagcagatgacattaatggactcatgacaaagttaaagcgtcagaaaagcttctcggaggacgtgatttcccacaaaggcgatctgcggtatatcacgatatcgggtaatcgcgtcctcgaagccgctaaaagttgttccaagagagatggagggaaggtggatacatcagccacccacagagaggtgcagagaaagctggatcacgctactgaccgcttcaggtccctttattcaaaatgcaatgtcctcgggaataatctcaaagatttggtagacaagtatcagcattacgaggatgcaagttgtggactcctcgccggattacaggcctgcgaggccactgcttctaaacacctttccgaacctatagccgtggaccccaagaacctccagcgacagctcgaggagacaaaggccctgcagggacagatatcctctcaacaggtggccgtcgaaaagttgaagaagacggcagaggtcctgctggatgcccgaggatcattgctccccgcaaagaacgacattcagaaaacactcgacgacattgtggggcgatacgaagatctgagtaaaagtgtcaatgagagaaacgaaaaactacaaattacactcacgcgctctctgagcgtgcaggatggcctggacgagatgctggattggatgggcaatgttgagtcaagtctgaaggagcagggacaagtacctttgaatagcacggccctccaggatatcatctcgaagaacataatgctcgagcaggacattgcgggaagacaatcctccataaatgccatgaacgagaaggttaaaaagttcatggaaacaaccgaccccagtacagcaagctctctgcaggccaaaatgaaagatctttctgcacgtttctcggaggctagccataagcacaaggaaacgctggcaaaaatggaggaactgaaaacaaaagtggaactattcgagaatctgagcgaaaagctccagacgttcttagaaactaaaacgcaagcactgaccgaggtggacgtccccggtaaggacgtcaccgaactctcccagtacatgcaggagtcgacctctgaatttctggagcacaaaaaacatctcgaggttctccactctctgttaaaagagatctcatcacatggtcttccaagtgacaaagccctggtgttggaaaagaccaacaacctctccaaaaagttcaaagagatggaggacaccatcaaggaaaaaaaggaggctgttacgagctgccaagaacagctcgacgcatttcaagtgctcgtgaaaagcctcaagagctggatcaaggagaccactaaaaaggttcctattgtgcagccatcctttggggcagaggacctggggaaatcactggaggacactaaaaagttgcaagagaagtggagcctgaaaacaccagaaattcagaaggtaaacaactccggaatatccctctgtaacctaatctcagcggtgactacacctgcaaaagctattgcggcagtgaaatccggtggcgctgtgctaaatggcgagggcacggccaccaacactgaggaattctgggcaaacaaaggtctgacatccatcaagaaggatatgacagacatttctcatggatacgaggacttgggcctgcttttgaaagataaaatcgcagaactgaacactaaacttagcaaattgcagaaggcccaggaggaatctagcgccatgatgcagtggctgcaaaaaatgaacaagaccgccaccaaatggcagcaaacacccgctccaacggacaccgaggctgtcaagacgcaggtggaacagaataaatctttcgaggcagaacttaaacagaacgttaataaagtacaggagttgaaggacaagcttactgaattactggaagaaaacccagacacacctgaagcgccacgctggaaacagatgctgactgaaattgactctaaatggcaagaactcaaccagctgacgatcgaccgacagcagaaactggaggagagttccaataatcttacacagtttcagaccgtcgaagcccagttaaagcagtggctcgtggaaaaagaacttatggtaagtgtgctgggccctttaagcattgatcctaatatgctcaatacacagcgtcagcaggttcagatccttctccaggagttcgctacgaggaagccgcagtacgagcaattaactgcagccggtcagggcatactctctcgtccaggcgaggatccctcgctgcggggaatcgtgaaagagcaactggctgcggtcacccagaaatgggacagcctgaccggccagctctcagaccgatgcgattggatagaccaggcaatagtgaagagcacacaatatcagagcttactgcggagcctctccgacaagctcagtgacttggacaacaagctgagtagctcactagctgtgtccacacaccctgacgccatgaatcagcaactagagacagcacagaagatgaaacaggagatccagcaagaaaagaagcaaatcaaagtcgcacaggccctctgcgaagaccttagcgccctcgtaaaagaggaatacctcaaggcagagctgtctcgacaactggagggtattctaaagagctttaaggacgtcgagcagaaagctgaaaaccacgtccagcacctccagagtgcctgtgcatcttcacaccaatttcaacagatgtcccgggactttcaagcttggctggataccaagaaggaggagcagaacaaaagccaccccatcagtgccaagctggatgtcttagagagtctcattaaagatcataaagacttttcaaaaacactcactgcccagagccatatgtacgagaaaacaatagcggaaggagaaaatctgctgctgaagactcagggatcagaaaaggcagctctccagctgcagctcaatacaatcaaaaccaattgggacacatttaataagcaagtgaaagaacgggaaaacaaactcaaggagtcgctggagaaggctcttaagtacaaagaacaggtggagactctgtggccttggatagacaagtgtcagaacaatctggaggagattaaattctgtctggatcctgcggagggcgaaaatagtatcgccaaacttaaaagtctgcagaaggagatggatcaacactttgggatggtggaacttttgaataataccgccaactctctcctgagcgtctgtgagatcgataaggaagtggtcaccgacgagaacaagagtctgatccagaaggtggacatggtaaccgagcagttgcacagcaaaaagttctgtctggagaatatgacccagaaatttaaggagtttcaggaggtgtctaaggaatcaaaaagacagctgcagtgtgccaaggagcagcttgacatacacgacagcttgggcagccaggcctattctaacaaatacctcactatgctgcagacccaacagaaaagtctgcaagcactgaaacaccaggtggatctggccaaacgcttagctcaggacctggtcgtggaggcaagtgattccaaaggtacatccgacgtgcttctccaggtggaaacaattgcacaggagcactcgacattgtcccaacaggttgatgagaaatgtagttttctggagacaaagctccaggggatcgggcattttcaaaacacaatcagagagatgttttcccagttcgcagaattcgatgacgaacttgattctatggcacctgttggaagggatgcagaaacactgcaaaagcagaaagagaccatcaaagccttcttgaagaagctggaggcattaatggccagcaatgataatgctaataagacctgcaagatgatgcttgctaccgaggagactagccccgaccttgtaggcattaagcgtgatctggaagctttatcaaaacagtgcaataaattgctggacagagcccaggccagggaagagcaggtagagggcaccatcaagcggctcgaagagttttactcaaagttgaaggagttcagcatcctcttgcagaaggccgaggagcacgaagagtctcagggccctgtgggaatggaaactgagacaatcaaccagcagcttaacatgttcaaagtgtttcagaaagaagaaattgaacccctgcaggggaagcaacaggacgttaattggctgggccagggacttatccagtcagcagcaaagtctacatctacacagggtttggagcatgacctggacgacgtgaatgcacggtggaagactttgaacaagaaggtggcccaacgggcagctcagttacaggaggccctgctccactgtggtcggttccaagacgccctggaaagcctgctgagctggatggtcgacacagaagagctcgtggctaaccagaagcctcccagcgcggaatttaaggtggtcaaggctcagattcaggagcagaagttgctgcagcgcctgctagacgaccgaaagtccactgtggaagtcatcaagcgtgaaggcgagaaaattgctaccacagccgaacccgctgacaaagttaagatccttaaacaactgtctttgctggactcgcgttgggaggctctactaaataaagcagagacgagaaaccgccaactggagggcatatctgtggtggcacagcagttccacgaaactctggagccactcaacgaatggctgaccaccattgagaagcggcttgttaattgtgaacccattggaacccaggctagtaagctggaagagcaaatagcccaacacaaggcgctcgaagatgacatcattaatcacaacaagcatctgcaccaggcagtttcaatcggacagagtttaaaagtgctctctagcagggaggataaggatatggtacaatctaaattggatttcagtcaggtctggtatatcgaaattcaggagaagagtcactcaaggagcgaactcctccagcaggcgctctgcaacgctaagatcttcggagaagacgaagtggagttgatgaactggctgaatgaagtgcacgacaagctgtcaaaactgtccgtccaagattacagcacagagggcctgtggaaacagcagtccgagctgcgggttctgcaggaggatatccttctccggaagcaaaatgtagatcaggcactcttgaatgggctggagctcctcaagcagaccaccggggatgaggttctgatcattcaggataaactcgaagccataaaagcaaggtataaagatatcactaagctgtcgacggatgtcgccaaaactctggaacaggcattgcagctagcgagacgccttcattcaacccatgaggaactctgtacatggctcgacaaagtggaggttgaactgttaagctacgaaacccaggtactcaagggagaggaagcctctcaggcgcagatgcgacctaaggagctaaagaaagaagccaagaacaacaaagcccttctcgactctcttaatgaagtatccagcgccttgctggagcttgtcccgtggcgggctagagaggggctggaaaagatggtggctgaggacaatgagaggtacaggctggtgtcagacacaatcacacagaaggtggaggagatcgacgcagccatcctcaggtctcagcagttcgaccaggccgctgatgccgaactcagctggatcaccgagaccgagaagaaactcatgtcgctgggcgatatcagactggaacaagatcagacgtcagcgcaactccaggtccaaaaaacctttacaatggagatactgaggcacaaggacattattgacgacctggtcaaatccggccacaaaattatgacagcttgttcagaagaagaaaaacagtccatgaagaagaagctggataaggttctgaagaactatgacaccatctgccagataaactcagagaggtacttgcagctggaacgcgctcagagcctggtgaaccagttctgggaaacatacgaagaactgtggccctggttgacagagacccagagtatcataagccagctgcccgctccggctctcgagtacgagacactgcggcaacagcaggaggaacatcggcagctcagagaactcatagctgagcataagccacacatcgacaagatgaacaagacgggtccacagttgttggaactgtcacccggagagggcttcagtatacaggaaaaatacgttgctgccgacaccctttattcccagatcaaagaggatgttaaaaaacgcgcagtcgcacttgatgaagccatctcccaaagtacacaattccatgataagatcgaccagatcctggaaagtctggaaaggattgtggagcggctccgccagcctccctcaatttccgctgaggtggagaaaatcaaggagcagataagcgagaataaaaacgtgtctgttgacatggagaagcttcaacccttgtacgaaacattaaaacagcgcggtgaagagatgattgctagatctggagggacagataaagatatctccgccaaggcggttcaggacaaactagaccagatggtatttatctgggaaaacatccacaccctcgttgaagaacgggaggccaagctccttgatgtgatggagttagcggagaagttctggtgcgatcatatgagcttgattgtaacaatcaaggacacccaagacttcatcagagacctggaggaccctgggattgacccttccgtggtcaagcaacagcaggaagccgcagagaccatcagagaggaaatcgatgggctccaggaagagttagacatcgtaattaacctcggaagcgagctgatcgccgcttgcggagaacccgataaacctatcgttaagaagtctattgatgaattgaattcagcctgggattcactaaataaagcgtggaaagaccggattgacaaacttgaagaagcaatgcaagcagccgtgcagtaccaggatggccttcaggctgtgttcgactgggtagatattgctggtggaaaattagcgtccatgtcgcccatcggcaccgatctagagactgttaaacaacagattgaggaactgaagcaattcaagagcgaggcttaccagcagcagatcgagatggagcggctaaatcaccaggcggagcttctattgaagaaagtgacagaagaatctgacaaacacacagtgcaggaccccctgatggaattgaagctcatctgggattctctcgaagaaaggatcatcaatcgccaacataagcttgaaggcgctctcctggctctgggccagttccagcatgcattggatgaattactcgcctggctcactcatacggagggactgctgagtgagcagaaaccagtgggaggcgaccctaaggcaatcgaaatcgaactcgcaaagcaccatgttctgcagaatgacgtgctcgcccatcagagcacagtcgaggctgttaataaggccggtaacgatctcatcgagtcgtccgcgggagaggaggcgtccaatttgcagaataagctggaagtgctgaatcagcggtggcagaatgtactggagaagaccgaacaacggaagcagcagctggacggagccctgagacaggctaagggctttcacggcgagattgaggacctccagcagtggttgaccgacactgaaagacacttgctggcctccaagccactcggcggattgcccgagaccgctaaagagcaactgaacgtccatatggaagtgtgtgctgccttcgaggctaaagaagagacctacaaaagccttatgcagaaaggccaacaaatgctggcacggtgcccaaagagcgccgagactaatatcgatcaggacatcaacaatctgaaagagaagtgggagagtgtcgaaaccaagcttaatgagcggaagacgaagctggaggaagccttgaacttagccatggagttccataattcccttcaggatttcataaactggctgacccaagccgagcaaaccctgaatgtcgccagccgcccttccctgatactggacaccgtgttgtttcagattgatgaacacaaagtgttcgcaaatgaggtgaacagccatagggagcagatcattgagttggacaagacgggcactcacctgaagtacttttcccagaagcaggatgttgtccttattaagaatcttctgatatccgtgcagtcacgctgggagaaagtggtacagagactcgtagagcggggaaggtccctggacgacgcaagaaagcgagccaaacagtttcacgaggcatggtcgaaattgatggagtggctggaggagtccgaaaagtccctggattcagagctggaaatagcaaatgacccagataaaattaaaacccagctcgcccagcacaaggagtttcagaaaagccttggtgccaagcatagcgtttacgacacgactaatcgcactggccgaagtctgaaggagaagacatccctggcggacgataacctaaagctggacgacatgctgtctgaattgagagacaagtgggacacaatttgtggcaaatccgtggagcggcagaacaaactggaagaggctctgctcttctccgggcaattcaccgacgccctgcaggcccttatagactggctctacagggtggagccccagcttgccgaggaccagcccgttcatggggacatcgatttggtcatgaacctcatagataatcacaaggcctttcagaaagaactgggcaaaaggacatctagtgtgcaggcactaaagcgctccgcccgtgagcttatagagggctcgagagatgacagctcttgggtgaaagttcagatgcaggagctctctaccagatgggaaacagtatgcgcattaagcattagtaaacagacccggctggaggccgctctgagacaggcggaagaatttcattctgtcgtgcatgccctgctagagtggctggctgaagccgaacagactttgagatttcatggcgtgttacccgacgacgaggacgctcttcggacacttatcgatcaacataaggagttcatgaagaaactcgaagagaagagggccgagctcaacaaggcgactactatgggcgatacagtactggctatctgccaccccgattcaatcacaacaatcaaacattggatcaccattatcagagcccgtttcgaagaggtgttggcctgggccaagcagcaccagcaaaggcttgcgagtgcccttgccggactgatagctaagcaggagttgctggaggcacttttggcctggctccagtgggctgaaacaacactgacagataaggacaaggaggtgatcccccaggagatcgaggaggtgaaagccctcattgccgaacaccagacatttatggaagagatgactcgcaagcagcccgatgtggataaggtaaccaagacatacaaaaggcgggctgccgacccttctagtcttcaaagccatatacccgtgcttgataaggggcgagccggaaggaagagattcccagccagcagcctgtaccctagcggcagtcaaactcagattgagactaaaaaccccagagtcaacctgctcgtcagtaaatggcaacaggtttggctcctagctcttgagagacggcgaaaactgaatgacgctctcgaccggctggaagagctgagggagttcgccaatttcgacttcgatatttggcgcaagaaatatatgagatggatgaaccataagaagagtagagtaatggactttttccgcaggatcgacaaagatcaggacggcaagataacgagacaagagttcatcgatggcattctgtcgagtaagttccctacaagtagactggaaatgagcgcggtcgcagacatatttgatcgcgacggggacggatacatcgactactacgagtttgttgctgctctgcaccccaacaaggatgcgtataagcccattactgatgccgacaagattgaagacgaagtgacgagacaggtggctaagtgtaagtgcgctaagagatttcaggtggagcaaattggggataacaagtatagagtgtcgttccagagcaatttcggcgactctcaacagttgcgcctggttcgtattctgagatcaaccgtcatggtccgcgtgggagggggttggatggcgttagacgaattcctggtcaaaaacgatccttgccgtgtgcaccatcacggctctaagatgctgcgttctgagtcaaactcaagcataaccactactcagcccacaatcgccaaaggccgaactaacatggagttgcgagaaaagttcatattggctgatggtgcctctcaaggcatggcagccttccgtccacgcggtaggcggtcacggccatcctcccggggagcctcaccaaatagaagcacttccgtgagcagtcaagcggctcaggccgctagtccacaagtacccgctacaaccaccccaaagggcacaccaatccagggtagcaaactgcggctgcccggttatctgagcggcaagggtttccacagtggggaagactctggcctcataaccaccgccgctgccagagttaggacacagtttgcggattccaaaaagaccccttcgaggcctggcagcagggctgggtccaaggctgggtcaagggcctcatcccggagaggcagtgatgctagtgacttcgatattagcgaaatccagagtgtgtgttctgatgtagagactgtgcctcagactcacagaccaacacctcgtgccggtagccgacccagtacagcaaaacctagtaagatcccaactccacagagaaagtcacccgcttctaagctggataaatcttcaaagcgctac

SEQ ID NO: 269270 - DNA, 9183 bp, Artificial Sequence
  derived and/or modified sequence
atgcacagcagcagctacagctacagaagcagcgacagcgtgttcagcaacaccaccagcaccagaaccagcctggacagcaacgagaacctgctgctggtgcactgcggccccaccctgatcaacagctgcatcagcttcggcagcgagagcttcgacggccacagactggagatgctgcagcagatcgccaacagagtgcagagagacagcgtgatctgcgaggacaagctgatcctggccggcaacgccctgcagagcgacagcaagagactggagagcggcgtgcagttccagaacgaggccgagatcgccggctacatcctggagtgcgagaacctgctgagacagcacgtgatcgacgtgcagatcctgatcgacggcaagtactaccaggccgaccagctggtgcagagagtggccaagctgagagacgagatcatggccctgagaaacgagtgcagcagcgtgtacagcaagggcagaatcctgaccaccgagcagaccaagctgatgatcagcggcatcacccagagcctgaacagcggcttcgcccagaccctgcaccccagcctgaccagcggcctgacccagagcctgacccccagcctgaccagcagcagcatgaccagcggcctgagcagcggcatgaccagcagactgacccccagcgtgacccccgcctacacccccggcttccccagcggcctggtgcccaacttcagcagcggcgtggagcccaacagcctgcagaccctgaagctgatgcagatcagaaagcccctgctgaagagcagcctgctggaccagaacctgaccgaggaggagatcaacatgaagttcgtgcaggacctgctgaactgggtggacgagatgcaggtgcagctggacagaaccgagtggggcagcgacctgcccagcgtggagagccacctggagaaccacaagaacgtgcacagagccatcgaggagttcgagagcagcctgaaggaggccaagatcagcgagatccagatgaccgcccccctgaagctgacctacgccgagaagctgcacagactggagagccagtacgccaagctgctgaacaccagcagaaaccaggagagacacctggacaccctgcacaacttcgtgagcagagccaccaacgagctgatctggctgaacgagaaggaggaggaggaggtggcctacgactggagcgagagaaacaccaacatcgccagaaagaaggactaccacgccgagctgatgagagagctggaccagaaggaggagaacatcaagagcgtgcaggagatcgccgagcagctgctgctggagaaccaccccgccagactgaccatcgaggcctacagagccgccatgcagacccagtggagctggatcctgcagctgtgccagtgcgtggagcagcacatcaaggagaacaccgcctacttcgagttcttcaacgacgccaaggaggccaccgactacctgagaaacctgaaggacgccatccagagaaagtacagctgcgacagaagcagcagcatccacaagctggaggacctggtgcaggagagcatggaggagaaggaggagctgctgcagtacaagagcaccatcgccaacctgatgggcaaggccaagaccatcatccagctgaagcccagaaacagcgactgccccctgaagaccagcatccccatcaaggccatctgcgactacagacagatcgagatcaccatctacaaggacgacgagtgcgtgctggccaacaacagccacagagccaagtggaaggtgatcagccccaccggcaacgaggccatggtgcccagcgtgtgcttcaccgtgcccccccccaacaaggaggccgtggacctggccaacagaatcgagcagcagtaccagaacgtgctgaccctgtggcacgagagccacatcaacatgaagagcgtggtgagctggcactacctgatcaacgagatcgacagaatcagagccagcaacgtggccagcatcaagaccatgctgcccggcgagcaccagcaggtgctgagcaacctgcagagcagattcgaggacttcctggaggacagccaggagagccaggtgttcagcggcagcgacatcacccagctggagaaggaggtgaacgtgtgcaagcagtactaccaggagctgctgaagagcgccgagagagaggagcaggaggagagcgtgtacaacctgtacatcagcgaggtgagaaacatcagactgagactggagaactgcgaggacagactgatcagacagatcagaacccccctggagagagacgacctgcacgagagcgtgttcagaatcaccgagcaggagaagctgaagaaggagctggagagactgaaggacgacctgggcaccatcaccaacaagtgcgaggagttcttcagccaggccgccgccagcagcagcgtgcccaccctgagaagcgagctgaacgtggtgctgcagaacatgaaccaggtgtacagcatgagcagcacctacatcgacaagctgaagaccgtgaacctggtgctgaagaacacccaggccgccgaggccctggtgaagctgtacgagaccaagctgtgcgaggaggaggccgtgatcgccgacaagaacaacatcgagaacctgatcagcaccctgaagcagtggagaagcgaggtggacgagaagagacaggtgttccacgccctggaggacgagctgcagaaggccaaggccatcagcgacgagatgttcaagacctacaaggagagagacctggacttcgactggcacaaggagaaggccgaccagctggtggagagatggcagaacgtgcacgtgcagatcgacaacagactgagagacctggagggcatcggcaagagcctgaagtactacagagacacctaccaccccctggacgactggatccagcaggtggagaccacccagagaaagatccaggagaaccagcccgagaacagcaagaccctggccacccagctgaaccagcagaagatgctggtgagcgagatcgagatgaagcagagcaagatggacgagtgccagaagtacgccgagcagtacagcgccaccgtgaaggactacgagctgcagaccatgacctacagagccatggtggacagccagcagaagagccccgtgaagagaagaagaatgcagagcagcgccgacctgatcatccaggagttcatggacctgagaaccagatacaccgccctggtgaccctgatgacccagtacatcaagttcgccggcgacagcctgaagagactggaggaggaggagaagagcctggaggaggagaagaaggagcacgtggagaaggccaaggagctgcagaagtgggtgagcaacatcagcaagaccctgaaggacgccgagaaggccggcaagccccccttcagcaagcagaagatcagcagcgaggagatcagcaccaagaaggagcagctgagcgaggccctgcagaccatccagctgttcctggccaagcacggcgacaagatgaccgacgaggagagaaacgagctggagaagcaggtgaagaccctgcaggagagctacaacctgctgttcagcgagagcctgaagcagctgcaggagagccagaccagcggcgacgtgaaggtggaggagaagctggacaaggtgatcgccggcaccatcgaccagaccaccggcgaggtgctgagcgtgttccaggccgtgctgagaggcctgatcgactacgacaccggcatcagactgctggagacccagctgatgatcagcggcctgatcagccccgagctgagaaagtgcttcgacctgaaggacgccaagagccacggcctgatcgacgagcagatcctgtgccagctgaaggagctgagcaaggccaaggagatcatcagcgccgccagccccaccaccatccccgtgctggacgccctggcccagagcatgatcaccgagagcatggccatcaaggtgctggagatcctgctgagcaccggcagcctggtgatccccgccaccggcgagcagctgaccctgcagaaggccttccagcagaacctggtgagcagcgccctgttcagcaaggtgctggagagacagaacatgtgcaaggacctgatcgacccctgcaccagcgagaaggtgagcctgatcgacatggtgcagagaagcaccctgcaggagaacaccggcatgtggctgctgcccgtgagaccccaggagggcggcagaatcaccctgaagtgcggcagaaacatcagcatcctgagagccgcccacgagggcctgatcgacagagagaccatgttcagactgctgagcgcccagctgctgagcggcggcctgatcaacagcaacagcggccagagaatgaccgtggaggaggccgtgagagagggcgtgatcgacagagacaccgccagcagcatcctgacctaccaggtgcagaccggcggcatcatccagagcaaccccgccaagagactgaccgtggacgaggccgtgcagtgcgacctgatcaccagcagcagcgccctgctggtgctggaggcccagagaggctacgtgggcctgatctggccccacagcggcgagatcttccccaccagcagcagcctgcagcaggagctgatcaccaacgagctggcctacaagatcctgaacggcagacagaagatcgccgccctgtacatccccgagagcagccaggtgatcggcctggacgccgccaagcagctgggcatcatcgacaacaacaccgccagcatcctgaagaacatcaccctgcccgacaagatgcccgacctgggcgacctggaggcctgcaagaacgccagaagatggctgagcttctgcaagttccagcccagcaccgtgcacgactacagacaggaggaggacgtgttcgacggcgaggagcccgtgaccacccagaccagcgaggagaccaagaagctgttcctgagctacctgatgatcaacagctacatggacgccaacaccggccagagactgctgctgtacgacggcgacctggacgaggccgtgggcatgctgctggagggctgccacgccgagttcgacggcaacaccgccatcaaggagtgcctggacgtgctgagcagcagcggcgtgttcctgaacaacgccagcggcagagagaaggacgagtgcaccgccacccccagcagcttcaacaagtgccactgcggcgagcccgagcacgaggagacccccgagaacagaaagtgcgccatcgacgaggagttcaacgagatgagaaacaccgtgatcaacagcgagttcagccagagcggcaagctggccagcaccatcagcatcgaccccaaggtgaacagcagccccagcgtgtgcgtgcccagcctgatcagctacctgacccagaccgagctggccgacatcagcatgctgagaagcgacagcgagaacatcctgaccaactacgagaaccagagcagagtggagaccaacgagagagccaacgagtgcagccacagcaagaacatccagaacttccccagcgacctgatcgagaaccccatcatgaagagcaagatgagcaagttctgcggcgtgaacgagaccgagaacgaggacaacaccaacagagacagccccatcttcgactacagccccagactgagcgccctgctgagccacgacaagctgatgcacagccagggcagcttcaacgacacccacacccccgagagcaacggcaacaagtgcgaggcccccgccctgagcttcagcgacaagaccatgctgagcggccagagaatcggcgagaagttccaggaccagttcctgggcatcgccgccatcaacatcagcctgcccggcgagcagtacggccagaagagcctgaacatgatcagcagcaacccccaggtgcagtaccacaacgacaagtacatcagcaacaccagcggcgaggacgagaagacccaccccggcttccagcagatgcccgaggacaaggaggacgagagcgagatcgaggagtacagctgcgccgtgacccccggcggcgacaccgacaacgccatcgtgagcctgacctgcgccacccccctgctggacgagaccatcagcgccagcgactacgagaccagcctgctgaacgaccagcagaacaacaccggcaccgacaccgacagcgacgacgacttctacgacacccccctgttcgaggacgacgaccacgacagcctgctgctggacggcgacgacagagactgcctgcaccccgaggactacgacaccctgcaggaggagaacgacgagaccgccagccccgccgacgtgttctacgacgtgagcaaggagaacgagaacagcatggtgccccagggcgcccccgtgggcagcctgagcgtgaagaacaaggcccactgcctgcaggacttcctgatggacgtggagaaggacgagctggacagcggcgagaagatccacctgaaccccgtgggcagcgacaaggtgaacggccagagcctggagaccggcagcgagagagagtgcaccaacatcctggagggcgacgagagcgacagcctgaccgactacgacatcgtgggcggcaaggagagcttcaccgccagcctgaagttcgacgacagcggcagctggagaggcagaaaggaggagtacgtgaccggccaggagttccacagcgacaccgaccacctggacagcatgcagagcgaggagagctacggcgactacatctacgacagcaacgaccaggacgacgacgacgacgacggcatcgacgaggagggcggcggcatcagagacgagaacggcaagcccagatgccagaacgtggccgaggacatggacatccagctgtgcgccagcatcctgaacgagaacagcgacgagaacgagaacatcaacaccatgatcctgctggacaagatgcacagctgcagcagcctggagaagcagcagagagtgaacgtggtgcagctggccagccccagcgagaacaacctggtgaccgagaagagcaacctgcccgagtacaccaccgagatcgccggcaagagcaaggagaacctgctgaaccacgagatggtgctgaaggacgtgctgccccccatcatcaaggacaccgagagcgagaagaccttcggccccgccagcatcagccacgacaacaacaacatcagcagcaccagcgagctgggcaccgacctggccaacaccaaggtgaagctgatccagggcagcgagctgcccgagctgaccgacagcgtgaagggcaaggacgagtacttcaagaacatgacccccaaggtggacagcagcctggaccacatcatctgcaccgagcccgacctgatcggcaagcccgccgaggagagccacctgagcctgatcgccagcgtgaccgacaaggacccccagggcaacggcagcgacctgatcaagggcagagacggcaagagcgacatcctgatcgaggacgagaccagcatccagaagatgtacctgggcgagggcgaggtgctggtggagggcctggtggaggaggagaacagacacctgaagctgctgcccggcaagaacaccagagacagcttcaagctgatcaacagccagttccccttcccccagatcaccaacaacgaggagctgaaccagaagggcagcctgaagaaggccaccgtgaccctgaaggacgagcccaacaacctgcagatcatcgtgagcaagagccccgtgcagttcgagaacctggaggagatcttcgacaccagcgtgagcaaggagatcagcgacgacatcaccagcgacatcaccagctgggagggcaacacccacttcgaggagagcttcaccgacggccccgagaaggagctggacctgttcacctacctgaagcactgcgccaagaacatcaaggccaaggacgtggccaagcccaacgaggacgtgcccagccacgtgctgatcaccgccccccccatgaaggagcacctgcagctgggcgtgaacaacaccaaggagaagagcaccagcacccagaaggacagccccctgaacgacatgatccagagcaacgacctgtgcagcaaggagagcatcagcggcggcggcaccgagatcagccagttcacccccgagagcatcgaggccaccctgagcatcctgagcagaaagcacgtggaggacgtgggcaagaacgacttcctgcagagcgagagatgcgccaacggcctgggcaacgacaacagcagcaacaccctgaacaccgactacagcttcctggagatcaacaacaagaaggagagaatcgagcagcagctgcccaaggagcaggccctgagccccagaagccaggagaaggaggtgcagatccccgagctgagccaggtgttcgtggaggacgtgaaggacatcctgaagagcagactgaaggagggccacatgaacccccaggaggtggaggagcccagcgcctgcgccgacaccaagatcctgatccagaacctgatcaagagaatcaccaccagccagctggtgaacgaggccagcaccgtgcccagcgacagccagatgagcgacagcagcggcgtgagccccatgaccaacagcagcgagctgaagcccgagagcagagacgaccccttctgcatcggcaacctgaagagcgagctgctgctgaacatcctgaagcaggaccagcacagccagaagatcaccggcgtgttcgagctgatgagagagctgacccacatggagtacgacctggagaagagaggcatcaccagcaaggtgctgcccctgcagctggagaacatcttctacaagctgctggccgacggctacagcgagaagatcgagcacgtgggcgacttcaaccagaaggcctgcagcaccagcgagatgatggaggagaagccccacatcctgggcgacatcaagagcaaggagggcaactactacagccccaacctggagaccgtgaaggagatcggcctggagagcagcaccgtgtgggccagcaccctgcccagagacgagaagctgaaggacctgtgcaacgacttccccagccacctggagtgcaccagcggcagcaaggagatggccagcggcgacagcagcaccgagcagtag

SEQ ID NO: 269271 - DNA, 21741 bp, Artificial Sequence
  derived and/or modified sequence
atgcacagcagcagctacagctacagaagcagcgacagcgtgttcagcaacaccaccagcaccagaaccagcctggacagcaacgagaacctgctgctggtgcactgcggccccaccctgatcaacagctgcatcagcttcggcagcgagagcttcgacggccacagactggagatgctgcagcagatcgccaacagagtgcagagagacagcgtgatctgcgaggacaagctgatcctggccggcaacgccctgcagagcgacagcaagagactggagagcggcgtgcagttccagaacgaggccgagatcgccggctacatcctggagtgcgagaacctgctgagacagcacgtgatcgacgtgcagatcctgatcgacggcaagtactaccaggccgaccagctggtgcagagagtggccaagctgagagacgagatcatggccctgagaaacgagtgcagcagcgtgtacagcaagggcagaatcctgaccaccgagcagaccaagctgatgatcagcggcatcacccagagcctgaacagcggcttcgcccagaccctgcaccccagcctgaccagcggcctgacccagagcctgacccccagcctgaccagcagcagcatgaccagcggcctgagcagcggcatgaccagcagactgacccccagcgtgacccccgcctacacccccggcttccccagcggcctggtgcccaacttcagcagcggcgtggagcccaacagcctgcagaccctgaagctgatgcagatcagaaagcccctgctgaagagcagcctgctggaccagaacctgaccgaggaggagatcaacatgaagttcgtgcaggacctgctgaactgggtggacgagatgcaggtgcagctggacagaaccgagtggggcagcgacctgcccagcgtggagagccacctggagaaccacaagaacgtgcacagagccatcgaggagttcgagagcagcctgaaggaggccaagatcagcgagatccagatgaccgcccccctgaagctgacctacgccgagaagctgcacagactggagagccagtacgccaagctgctgaacaccagcagaaaccaggagagacacctggacaccctgcacaacttcgtgagcagagccaccaacgagctgatctggctgaacgagaaggaggaggaggaggtggcctacgactggagcgagagaaacaccaacatcgccagaaagaaggactaccacgccgagctgatgagagagctggaccagaaggaggagaacatcaagagcgtgcaggagatcgccgagcagctgctgctggagaaccaccccgccagactgaccatcgaggcctacagagccgccatgcagacccagtggagctggatcctgcagctgtgccagtgcgtggagcagcacatcaaggagaacaccgcctacttcgagttcttcaacgacgccaaggaggccaccgactacctgagaaacctgaaggacgccatccagagaaagtacagctgcgacagaagcagcagcatccacaagctggaggacctggtgcaggagagcatggaggagaaggaggagctgctgcagtacaagagcaccatcgccaacctgatgggcaaggccaagaccatcatccagctgaagcccagaaacagcgactgccccctgaagaccagcatccccatcaaggccatctgcgactacagacagatcgagatcaccatctacaaggacgacgagtgcgtgctggccaacaacagccacagagccaagtggaaggtgatcagccccaccggcaacgaggccatggtgcccagcgtgtgcttcaccgtgcccccccccaacaaggaggccgtggacctggccaacagaatcgagcagcagtaccagaacgtgctgaccctgtggcacgagagccacatcaacatgaagagcgtggtgagctggcactacctgatcaacgagatcgacagaatcagagccagcaacgtggccagcatcaagaccatgctgcccggcgagcaccagcaggtgctgagcaacctgcagagcagattcgaggacttcctggaggacagccaggagagccaggtgttcagcggcagcgacatcacccagctggagaaggaggtgaacgtgtgcaagcagtactaccaggagctgctgaagagcgccgagagagaggagcaggaggagagcgtgtacaacctgtacatcagcgaggtgagaaacatcagactgagactggagaactgcgaggacagactgatcagacagatcagaacccccctggagagagacgacctgcacgagagcgtgttcagaatcaccgagcaggagaagctgaagaaggagctggagagactgaaggacgacctgggcaccatcaccaacaagtgcgaggagttcttcagccaggccgccgccagcagcagcgtgcccaccctgagaagcgagctgaacgtggtgctgcagaacatgaaccaggtgtacagcatgagcagcacctacatcgacaagctgaagaccgtgaacctggtgctgaagaacacccaggccgccgaggccctggtgaagctgtacgagaccaagctgtgcgaggaggaggccgtgatcgccgacaagaacaacatcgagaacctgatcagcaccctgaagcagtggagaagcgaggtggacgagaagagacaggtgttccacgccctggaggacgagctgcagaaggccaaggccatcagcgacgagatgttcaagacctacaaggagagagacctggacttcgactggcacaaggagaaggccgaccagctggtggagagatggcagaacgtgcacgtgcagatcgacaacagactgagagacctggagggcatcggcaagagcctgaagtactacagagacacctaccaccccctggacgactggatccagcaggtggagaccacccagagaaagatccaggagaaccagcccgagaacagcaagaccctggccacccagctgaaccagcagaagatgctggtgagcgagatcgagatgaagcagagcaagatggacgagtgccagaagtacgccgagcagtacagcgccaccgtgaaggactacgagctgcagaccatgacctacagagccatggtggacagccagcagaagagccccgtgaagagaagaagaatgcagagcagcgccgacctgatcatccaggagttcatggacctgagaaccagatacaccgccctggtgaccctgatgacccagtacatcaagttcgccggcgacagcctgaagagactggaggaggaggagaagagcctggaggaggagaagaaggagcacgtggagaaggccaaggagctgcagaagtgggtgagcaacatcagcaagaccctgaaggacgccgagaaggccggcaagccccccttcagcaagcagaagatcagcagcgaggagatcagcaccaagaaggagcagctgagcgaggccctgcagaccatccagctgttcctggccaagcacggcgacaagatgaccgacgaggagagaaacgagctggagaagcaggtgaagaccctgcaggagagctacaacctgctgttcagcgagagcctgaagcagctgcaggagagccagaccagcggcgacgtgaaggtggaggagaagctggacaaggtgatcgccggcaccatcgaccagaccaccggcgaggtgctgagcgtgttccaggccgtgctgagaggcctgatcgactacgacaccggcatcagactgctggagacccagctgatgatcagcggcctgatcagccccgagctgagaaagtgcttcgacctgaaggacgccaagagccacggcctgatcgacgagcagatcctgtgccagctgaaggagctgagcaaggccaaggagatcatcagcgccgccagccccaccaccatccccgtgctggacgccctggcccagagcatgatcaccgagagcatggccatcaaggtgctggagatcctgctgagcaccggcagcctggtgatccccgccaccggcgagcagctgaccctgcagaaggccttccagcagaacctggtgagcagcgccctgttcagcaaggtgctggagagacagaacatgtgcaaggacctgatcgacccctgcaccagcgagaaggtgagcctgatcgacatggtgcagagaagcaccctgcaggagaacaccggcatgtggctgctgcccgtgagaccccaggagggcggcagaatcaccctgaagtgcggcagaaacatcagcatcctgagagccgcccacgagggcctgatcgacagagagaccatgttcagactgctgagcgcccagctgctgagcggcggcctgatcaacagcaacagcggccagagaatgaccgtggaggaggccgtgagagagggcgtgatcgacagagacaccgccagcagcatcctgacctaccaggtgcagaccggcggcatcatccagagcaaccccgccaagagactgaccgtggacgaggccgtgcagtgcgacctgatcaccagcagcagcgccctgctggtgctggaggcccagagaggctacgtgggcctgatctggccccacagcggcgagatcttccccaccagcagcagcctgcagcaggagctgatcaccaacgagctggcctacaagatcctgaacggcagacagaagatcgccgccctgtacatccccgagagcagccaggtgatcggcctggacgccgccaagcagctgggcatcatcgacaacaacaccgccagcatcctgaagaacatcaccctgcccgacaagatgcccgacctgggcgacctggaggcctgcaagaacgccagaagatggctgagcttctgcaagttccagcccagcaccgtgcacgactacagacaggaggaggacgtgttcgacggcgaggagcccgtgaccacccagaccagcgaggagaccaagaagctgttcctgagctacctgatgatcaacagctacatggacgccaacaccggccagagactgctgctgtacgacggcgacctggacgaggccgtgggcatgctgctggagggctgccacgccgagttcgacggcaacaccgccatcaaggagtgcctggacgtgctgagcagcagcggcgtgttcctgaacaacgccagcggcagagagaaggacgagtgcaccgccacccccagcagcttcaacaagtgccactgcggcgagcccgagcacgaggagacccccgagaacagaaagtgcgccatcgacgaggagttcaacgagatgagaaacaccgtgatcaacagcgagttcagccagagcggcaagctggccagcaccatcagcatcgaccccaaggtgaacagcagccccagcgtgtgcgtgcccagcctgatcagctacctgacccagaccgagctggccgacatcagcatgctgagaagcgacagcgagaacatcctgaccaactacgagaaccagagcagagtggagaccaacgagagagccaacgagtgcagccacagcaagaacatccagaacttccccagcgacctgatcgagaaccccatcatgaagagcaagatgagcaagttctgcggcgtgaacgagaccgagaacgaggacaacaccaacagagacagccccatcttcgactacagccccagactgagcgccctgctgagccacgacaagctgatgcacagccagggcagcttcaacgacacccacacccccgagagcaacggcaacaagtgcgaggcccccgccctgagcttcagcgacaagaccatgctgagcggccagagaatcggcgagaagttccaggaccagttcctgggcatcgccgccatcaacatcagcctgcccggcgagcagtacggccagaagagcctgaacatgatcagcagcaacccccaggtgcagtaccacaacgacaagtacatcagcaacaccagcggcgaggacgagaagacccaccccggcttccagcagatgcccgaggacaaggaggacgagagcgagatcgaggagtacagctgcgccgtgacccccggcggcgacaccgacaacgccatcgtgagcctgacctgcgccacccccctgctggacgagaccatcagcgccagcgactacgagaccagcctgctgaacgaccagcagaacaacaccggcaccgacaccgacagcgacgacgacttctacgacacccccctgttcgaggacgacgaccacgacagcctgctgctggacggcgacgacagagactgcctgcaccccgaggactacgacaccctgcaggaggagaacgacgagaccgccagccccgccgacgtgttctacgacgtgagcaaggagaacgagaacagcatggtgccccagggcgcccccgtgggcagcctgagcgtgaagaacaaggcccactgcctgcaggacttcctgatggacgtggagaaggacgagctggacagcggcgagaagatccacctgaaccccgtgggcagcgacaaggtgaacggccagagcctggagaccggcagcgagagagagtgcaccaacatcctggagggcgacgagagcgacagcctgaccgactacgacatcgtgggcggcaaggagagcttcaccgccagcctgaagttcgacgacagcggcagctggagaggcagaaaggaggagtacgtgaccggccaggagttccacagcgacaccgaccacctggacagcatgcagagcgaggagagctacggcgactacatctacgacagcaacgaccaggacgacgacgacgacgacggcatcgacgaggagggcggcggcatcagagacgagaacggcaagcccagatgccagaacgtggccgaggacatggacatccagctgtgcgccagcatcctgaacgagaacagcgacgagaacgagaacatcaacaccatgatcctgctggacaagatgcacagctgcagcagcctggagaagcagcagagagtgaacgtggtgcagctggccagccccagcgagaacaacctggtgaccgagaagagcaacctgcccgagtacaccaccgagatcgccggcaagagcaaggagaacctgctgaaccacgagatggtgctgaaggacgtgctgccccccatcatcaaggacaccgagagcgagaagaccttcggccccgccagcatcagccacgacaacaacaacatcagcagcaccagcgagctgggcaccgacctggccaacaccaaggtgaagctgatccagggcagcgagctgcccgagctgaccgacagcgtgaagggcaaggacgagtacttcaagaacatgacccccaaggtggacagcagcctggaccacatcatctgcaccgagcccgacctgatcggcaagcccgccgaggagagccacctgagcctgatcgccagcgtgaccgacaaggacccccagggcaacggcagcgacctgatcaagggcagagacggcaagagcgacatcctgatcgaggacgagaccagcatccagaagatgtacctgggcgagggcgaggtgctggtggagggcctggtggaggaggagaacagacacctgaagctgctgcccggcaagaacaccagagacagcttcaagctgatcaacagccagttccccttcccccagatcaccaacaacgaggagctgaaccagaagggcagcctgaagaaggccaccgtgaccctgaaggacgagcccaacaacctgcagatcatcgtgagcaagagccccgtgcagttcgagaacctggaggagatcttcgacaccagcgtgagcaaggagatcagcgacgacatcaccagcgacatcaccagctgggagggcaacacccacttcgaggagagcttcaccgacggccccgagaaggagctggacctgttcacctacctgaagcactgcgccaagaacatcaaggccaaggacgtggccaagcccaacgaggacgtgcccagccacgtgctgatcaccgccccccccatgaaggagcacctgcagctgggcgtgaacaacaccaaggagaagagcaccagcacccagaaggacagccccctgaacgacatgatccagagcaacgacctgtgcagcaaggagagcatcagcggcggcggcaccgagatcagccagttcacccccgagagcatcgaggccaccctgagcatcctgagcagaaagcacgtggaggacgtgggcaagaacgacttcctgcagagcgagagatgcgccaacggcctgggcaacgacaacagcagcaacaccctgaacaccgactacagcttcctggagatcaacaacaagaaggagagaatcgagcagcagctgcccaaggagcaggccctgagccccagaagccaggagaaggaggtgcagatccccgagctgagccaggtgttcgtggaggacgtgaaggacatcctgaagagcagactgaaggagggccacatgaacccccaggaggtggaggagcccagcgcctgcgccgacaccaagatcctgatccagaacctgatcaagagaatcaccaccagccagctggtgaacgaggccagcaccgtgcccagcgacagccagatgagcgacagcagcggcgtgagccccatgaccaacagcagcgagctgaagcccgagagcagagacgaccccttctgcatcggcaacctgaagagcgagctgctgctgaacatcctgaagcaggaccagcacagccagaagatcaccggcgtgttcgagctgatgagagagctgacccacatggagtacgacctggagaagagaggcatcaccagcaaggtgctgcccctgcagctggagaacatcttctacaagctgctggccgacggctacagcgagaagatcgagcacgtgggcgacttcaaccagaaggcctgcagcaccagcgagatgatggaggagaagccccacatcctgggcgacatcaagagcaaggagggcaactactacagccccaacctggagaccgtgaaggagatcggcctggagagcagcaccgtgtgggccagcaccctgcccagagacgagaagctgaaggacctgtgcaacgacttccccagccacctggagtgcaccagcggcagcaaggagatggccagcggcgacagcagcaccgagcagttcagcagcgagctgcagcagtgcctgcagcacaccgagaagatgcacgagtacctgaccctgctgcaggacatgaagccccccctggacaaccaggagagcctggacaacaacctggaggccctgaagaaccagctgagacagctggagaccttcgagctgggcctggcccccatcgccgtgatcctgagaaaggacatgaagctggccgaggagttcctgaagagcctgcccagcgacttccccagaggccacgtggaggagctgagcatcagccaccagagcctgaagaccgccttcagcagcctgagcaacgtgagcagcgagagaaccaagcagatcatgctggccatcgacagcgagatgagcaagctggccgtgagccacgaggagttcctgcacaagctgaagagcttcagcgactgggtgagcgagaagagcaagagcgtgaaggacatcgagatcgtgaacgtgcaggacagcgagtacgtgaagaagagactggagttcctgaaggccaacaacgtgctgaaggacctgggccacaccaagatgcagctggagaccaccgccttcgacgtgcagttcttcatcagcgagtacgcccaggacctgagccccaaccagagcaagcagctgctgagactgctgaacaccacccagaagtgcttcctggacgtgcaggagagcgtgaccacccaggtggagagactggagacccagctgcacctggagcaggacctggacgaccagaagatcgtggccgagagacagcaggagtacaaggagaagctgcagggcatctgcgacctgctgacccagaccgagaacagactgatcggccaccaggaggccttcatgatcggcgacggcaccgtggagctgaagaagtaccagagcaagcaggaggagctgcagaaggacatgcagggcagcgcccaggccctggccgaggtggtgaagaacaccgagaacttcctgaaggagaacggcgagaagctgagccaggaggacaaggccctgatcgagcagaagctgaacgaggccaagatcaagtgcgagcagctgaacctgaaggccgagcagagcaagaaggagctggacaaggtggtgaccaccgccatcaaggaggagaccgagaaggtggccgccgtgaagcagctggaggagagcaagaccaagatcgagaacctgctggactggctgagcaacgtggacaaggacagcgagagagccggcaccaagcacaagcaggtgatcgagcagaacggcacccacttccaggagggcgacggcaagagcgccatcggcgaggaggacgaggtgaacggcaacctgctggagaccgacgtggacggccaggtgggcaccacccaggagaacctgaaccagcagtaccagaaggtgaaggcccagcacgagaagatcatcagccagcaccaggccgtgatcatcgccacccagagcgcccaggtgctgctggagaagcagggccagtacctgagccccgaggagaaggagaagctgcagaagaacatgaaggagctgaaggtgcactacgagaccgccctggccgagagcgagaagaagatgaagctgacccacagcctgcaggaggagctggagaagttcgacgccgactacaccgagttcgagcactggctgcagcagagcgagcaggagctggagaacctggaggccggcgccgacgacatcaacggcctgatgaccaagctgaagagacagaagagcttcagcgaggacgtgatcagccacaagggcgacctgagatacatcaccatcagcggcaacagagtgctggaggccgccaagagctgcagcaagagagacggcggcaaggtggacaccagcgccacccacagagaggtgcagagaaagctggaccacgccaccgacagattcagaagcctgtacagcaagtgcaacgtgctgggcaacaacctgaaggacctggtggacaagtaccagcactacgaggacgccagctgcggcctgctggccggcctgcaggcctgcgaggccaccgccagcaagcacctgagcgagcccatcgccgtggaccccaagaacctgcagagacagctggaggagaccaaggccctgcagggccagatcagcagccagcaggtggccgtggagaagctgaagaagaccgccgaggtgctgctggacgccagaggcagcctgctgcccgccaagaacgacatccagaagaccctggacgacatcgtgggcagatacgaggacctgagcaagagcgtgaacgagagaaacgagaagctgcagatcaccctgaccagaagcctgagcgtgcaggacggcctggacgagatgctggactggatgggcaacgtggagagcagcctgaaggagcagggccaggtgcccctgaacagcaccgccctgcaggacatcatcagcaagaacatcatgctggagcaggacatcgccggcagacagagcagcatcaacgccatgaacgagaaggtgaagaagttcatggagaccaccgaccccagcaccgccagcagcctgcaggccaagatgaaggacctgagcgccagattcagcgaggccagccacaagcacaaggagaccctggccaagatggaggagctgaagaccaaggtggagctgttcgagaacctgagcgagaagctgcagaccttcctggagaccaagacccaggccctgaccgaggtggacgtgcccggcaaggacgtgaccgagctgagccagtacatgcaggagagcaccagcgagttcctggagcacaagaagcacctggaggtgctgcacagcctgctgaaggagatcagcagccacggcctgcccagcgacaaggccctggtgctggagaagaccaacaacctgagcaagaagttcaaggagatggaggacaccatcaaggagaagaaggaggccgtgaccagctgccaggagcagctggacgccttccaggtgctggtgaagagcctgaagagctggatcaaggagaccaccaagaaggtgcccatcgtgcagcccagcttcggcgccgaggacctgggcaagagcctggaggacaccaagaagctgcaggagaagtggagcctgaagacccccgagatccagaaggtgaacaacagcggcatcagcctgtgcaacctgatcagcgccgtgaccacccccgccaaggccatcgccgccgtgaagagcggcggcgccgtgctgaacggcgagggcaccgccaccaacaccgaggagttctgggccaacaagggcctgaccagcatcaagaaggacatgaccgacatcagccacggctacgaggacctgggcctgctgctgaaggacaagatcgccgagctgaacaccaagctgagcaagctgcagaaggcccaggaggagagcagcgccatgatgcagtggctgcagaagatgaacaagaccgccaccaagtggcagcagacccccgcccccaccgacaccgaggccgtgaagacccaggtggagcagaacaagagcttcgaggccgagctgaagcagaacgtgaacaaggtgcaggagctgaaggacaagctgaccgagctgctggaggagaaccccgacacccccgaggcccccagatggaagcagatgctgaccgagatcgacagcaagtggcaggagctgaaccagctgaccatcgacagacagcagaagctggaggagagcagcaacaacctgacccagttccagaccgtggaggcccagctgaagcagtggctggtggagaaggagctgatggtgagcgtgctgggccccctgagcatcgaccccaacatgctgaacacccagagacagcaggtgcagatcctgctgcaggagttcgccaccagaaagccccagtacgagcagctgaccgccgccggccagggcatcctgagcagacccggcgaggaccccagcctgagaggcatcgtgaaggagcagctggccgccgtgacccagaagtgggacagcctgaccggccagctgagcgacagatgcgactggatcgaccaggccatcgtgaagagcacccagtaccagagcctgctgagaagcctgagcgacaagctgagcgacctggacaacaagctgagcagcagcctggccgtgagcacccaccccgacgccatgaaccagcagctggagaccgcccagaagatgaagcaggagatccagcaggagaagaagcagatcaaggtggcccaggccctgtgcgaggacctgagcgccctggtgaaggaggagtacctgaaggccgagctgagcagacagctggagggcatcctgaagagcttcaaggacgtggagcagaaggccgagaaccacgtgcagcacctgcagagcgcctgcgccagcagccaccagttccagcagatgagcagagacttccaggcctggctggacaccaagaaggaggagcagaacaagagccaccccatcagcgccaagctggacgtgctggagagcctgatcaaggaccacaaggacttcagcaagaccctgaccgcccagagccacatgtacgagaagaccatcgccgagggcgagaacctgctgctgaagacccagggcagcgagaaggccgccctgcagctgcagctgaacaccatcaagaccaactgggacaccttcaacaagcaggtgaaggagagagagaacaagctgaaggagagcctggagaaggccctgaagtacaaggagcaggtggagaccctgtggccctggatcgacaagtgccagaacaacctggaggagatcaagttctgcctggaccccgccgagggcgagaacagcatcgccaagctgaagagcctgcagaaggagatggaccagcacttcggcatggtggagctgctgaacaacaccgccaacagcctgctgagcgtgtgcgagatcgacaaggaggtggtgaccgacgagaacaagagcctgatccagaaggtggacatggtgaccgagcagctgcacagcaagaagttctgcctggagaacatgacccagaagttcaaggagttccaggaggtgagcaaggagagcaagagacagctgcagtgcgccaaggagcagctggacatccacgacagcctgggcagccaggcctacagcaacaagtacctgaccatgctgcagacccagcagaagagcctgcaggccctgaagcaccaggtggacctggccaagagactggcccaggacctggtggtggaggccagcgacagcaagggcaccagcgacgtgctgctgcaggtggagaccatcgcccaggagcacagcaccctgagccagcaggtggacgagaagtgcagcttcctggagaccaagctgcagggcatcggccacttccagaacaccatcagagagatgttcagccagttcgccgagttcgacgacgagctggacagcatggcccccgtgggcagagacgccgagaccctgcagaagcagaaggagaccatcaaggccttcctgaagaagctggaggccctgatggccagcaacgacaacgccaacaagacctgcaagatgatgctggccaccgaggagaccagccccgacctggtgggcatcaagagagacctggaggccctgagcaagcagtgcaacaagctgctggacagagcccaggccagagaggagcaggtggagggcaccatcaagagactggaggagttctacagcaagctgaaggagttcagcatcctgctgcagaaggccgaggagcacgaggagagccagggccccgtgggcatggagaccgagaccatcaaccagcagctgaacatgttcaaggtgttccagaaggaggagatcgagcccctgcagggcaagcagcaggacgtgaactggctgggccagggcctgatccagagcgccgccaagagcaccagcacccagggcctggagcacgacctggacgacgtgaacgccagatggaagaccctgaacaagaaggtggcccagagagccgcccagctgcaggaggccctgctgcactgcggcagattccaggacgccctggagagcctgctgagctggatggtggacaccgaggagctggtggccaaccagaagccccccagcgccgagttcaaggtggtgaaggcccagatccaggagcagaagctgctgcagagactgctggacgacagaaagagcaccgtggaggtgatcaagagagagggcgagaagatcgccaccaccgccgagcccgccgacaaggtgaagatcctgaagcagctgagcctgctggacagcagatgggaggccctgctgaacaaggccgagaccagaaacagacagctggagggcatcagcgtggtggcccagcagttccacgagaccctggagcccctgaacgagtggctgaccaccatcgagaagagactggtgaactgcgagcccatcggcacccaggccagcaagctggaggagcagatcgcccagcacaaggccctggaggacgacatcatcaaccacaacaagcacctgcaccaggccgtgagcatcggccagagcctgaaggtgctgagcagcagagaggacaaggacatggtgcagagcaagctggacttcagccaggtgtggtacatcgagatccaggagaagagccacagcagaagcgagctgctgcagcaggccctgtgcaacgccaagatcttcggcgaggacgaggtggagctgatgaactggctgaacgaggtgcacgacaagctgagcaagctgagcgtgcaggactacagcaccgagggcctgtggaagcagcagagcgagctgagagtgctgcaggaggacatcctgctgagaaagcagaacgtggaccaggccctgctgaacggcctggagctgctgaagcagaccaccggcgacgaggtgctgatcatccaggacaagctggaggccatcaaggccagatacaaggacatcaccaagctgagcaccgacgtggccaagaccctggagcaggccctgcagctggccagaagactgcacagcacccacgaggagctgtgcacctggctggacaaggtggaggtggagctgctgagctacgagacccaggtgctgaagggcgaggaggccagccaggcccagatgagacccaaggagctgaagaaggaggccaagaacaacaaggccctgctggacagcctgaacgaggtgagcagcgccctgctggagctggtgccctggagagccagagagggcctggagaagatggtggccgaggacaacgagagatacagactggtgagcgacaccatcacccagaaggtggaggagatcgacgccgccatcctgagaagccagcagttcgaccaggccgccgacgccgagctgagctggatcaccgagaccgagaagaagctgatgagcctgggcgacatcagactggagcaggaccagaccagcgcccagctgcaggtgcagaagaccttcaccatggagatcctgagacacaaggacatcatcgacgacctggtgaagagcggccacaagatcatgaccgcctgcagcgaggaggagaagcagagcatgaagaagaagctggacaaggtgctgaagaactacgacaccatctgccagatcaacagcgagagatacctgcagctggagagagcccagagcctggtgaaccagttctgggagacctacgaggagctgtggccctggctgaccgagacccagagcatcatcagccagctgcccgcccccgccctggagtacgagaccctgagacagcagcaggaggagcacagacagctgagagagctgatcgccgagcacaagccccacatcgacaagatgaacaagaccggcccccagctgctggagctgagccccggcgagggcttcagcatccaggagaagtacgtggccgccgacaccctgtacagccagatcaaggaggacgtgaagaagagagccgtggccctggacgaggccatcagccagagcacccagttccacgacaagatcgaccagatcctggagagcctggagagaatcgtggagagactgagacagccccccagcatcagcgccgaggtggagaagatcaaggagcagatcagcgagaacaagaacgtgagcgtggacatggagaagctgcagcccctgtacgagaccctgaagcagagaggcgaggagatgatcgccagaagcggcggcaccgacaaggacatcagcgccaaggccgtgcaggacaagctggaccagatggtgttcatctgggagaacatccacaccctggtggaggagagagaggccaagctgctggacgtgatggagctggccgagaagttctggtgcgaccacatgagcctgatcgtgaccatcaaggacacccaggacttcatcagagacctggaggaccccggcatcgaccccagcgtggtgaagcagcagcaggaggccgccgagaccatcagagaggagatcgacggcctgcaggaggagctggacatcgtgatcaacctgggcagcgagctgatcgccgcctgcggcgagcccgacaagcccatcgtgaagaagagcatcgacgagctgaacagcgcctgggacagcctgaacaaggcctggaaggacagaatcgacaagctggaggaggccatgcaggccgccgtgcagtaccaggacggcctgcaggccgtgttcgactgggtggacatcgccggcggcaagctggccagcatgagccccatcggcaccgacctggagaccgtgaagcagcagatcgaggagctgaagcagttcaagagcgaggcctaccagcagcagatcgagatggagagactgaaccaccaggccgagctgctgctgaagaaggtgaccgaggagagcgacaagcacaccgtgcaggaccccctgatggagctgaagctgatctgggacagcctggaggagagaatcatcaacagacagcacaagctggagggcgccctgctggccctgggccagttccagcacgccctggacgagctgctggcctggctgacccacaccgagggcctgctgagcgagcagaagcccgtgggcggcgaccccaaggccatcgagatcgagctggccaagcaccacgtgctgcagaacgacgtgctggcccaccagagcaccgtggaggccgtgaacaaggccggcaacgacctgatcgagagcagcgccggcgaggaggccagcaacctgcagaacaagctggaggtgctgaaccagagatggcagaacgtgctggagaagaccgagcagagaaagcagcagctggacggcgccctgagacaggccaagggcttccacggcgagatcgaggacctgcagcagtggctgaccgacaccgagagacacctgctggccagcaagcccctgggcggcctgcccgagaccgccaaggagcagctgaacgtgcacatggaggtgtgcgccgccttcgaggccaaggaggagacctacaagagcctgatgcagaagggccagcagatgctggccagatgccccaagagcgccgagaccaacatcgaccaggacatcaacaacctgaaggagaagtgggagagcgtggagaccaagctgaacgagagaaagaccaagctggaggaggccctgaacctggccatggagttccacaacagcctgcaggacttcatcaactggctgacccaggccgagcagaccctgaacgtggccagcagacccagcctgatcctggacaccgtgctgttccagatcgacgagcacaaggtgttcgccaacgaggtgaacagccacagagagcagatcatcgagctggacaagaccggcacccacctgaagtacttcagccagaagcaggacgtggtgctgatcaagaacctgctgatcagcgtgcagagcagatgggagaaggtggtgcagagactggtggagagaggcagaagcctggacgacgccagaaagagagccaagcagttccacgaggcctggagcaagctgatggagtggctggaggagagcgagaagagcctggacagcgagctggagatcgccaacgaccccgacaagatcaagacccagctggcccagcacaaggagttccagaagagcctgggcgccaagcacagcgtgtacgacaccaccaacagaaccggcagaagcctgaaggagaagaccagcctggccgacgacaacctgaagctggacgacatgctgagcgagctgagagacaagtgggacaccatctgcggcaagagcgtggagagacagaacaagctggaggaggccctgctgttcagcggccagttcaccgacgccctgcaggccctgatcgactggctgtacagagtggagccccagctggccgaggaccagcccgtgcacggcgacatcgacctggtgatgaacctgatcgacaaccacaaggccttccagaaggagctgggcaagagaaccagcagcgtgcaggccctgaagagaagcgccagagagctgatcgagggcagcagagacgacagcagctgggtgaaggtgcagatgcaggagctgagcaccagatgggagaccgtgtgcgccctgagcatcagcaagcagaccagactggaggccgccctgagacaggccgaggagttccacagcgtggtgcacgccctgctggagtggctggccgaggccgagcagaccctgagattccacggcgtgctgcccgacgacgaggacgccctgagaaccctgatcgaccagcacaaggagttcatgaagaagctggaggagaagagagccgagctgaacaaggccaccaccatgggcgacaccgtgctggccatctgccaccccgacagcatcaccaccatcaagcactggatcaccatcatcagagccagattcgaggaggtgctggcctgggccaagcagcaccagcagagactggccagcgccctggccggcctgatcgccaagcaggagctgctggaggccctgctggcctggctgcagtgggccgagaccaccctgaccgacaaggacaaggaggtgatcccccaggagatcgaggaggtgaaggccctgatcgccgagcaccagaccttcatggaggagatgaccagaaagcagcccgacgtggacaaggtgaccaagacctacaagagaagagccgccgaccccagcagcctgcagagccacatccccgtgctggacaagggcagagccggcagaaagagattccccgccagcagcctgtaccccagcggcagccagacccagatcgagaccaagaaccccagagtgaacctgctggtgagcaagtggcagcaggtgtggctgctggccctggagagaagaagaaagctgaacgacgccctggacagactggaggagctgagagagttcgccaacttcgacttcgacatctggagaaagaagtacatgagatggatgaaccacaagaagagcagagtgatggacttcttcagaagaatcgacaaggaccaggacggcaagatcaccagacaggagttcatcgacggcatcctgagcagcaagttccccaccagcagactggagatgagcgccgtggccgacatcttcgacagagacggcgacggctacatcgactactacgagttcgtggccgccctgcaccccaacaaggacgcctacaagcccatcaccgacgccgacaagatcgaggacgaggtgaccagacaggtggccaagtgcaagtgcgccaagagattccaggtggagcagatcggcgacaacaagtacagagtgagcttccagagcaacttcggcgacagccagcagctgagactggtgagaatcctgagaagcaccgtgatggtgagagtgggcggcggctggatggccctggacgagttcctggtgaagaacgacccctgcagagtgcaccaccacggcagcaagatgctgagaagcgagagcaacagcagcatcaccaccacccagcccaccatcgccaagggcagaaccaacatggagctgagagagaagttcatcctggccgacggcgccagccagggcatggccgccttcagacccagaggcagaagaagcagacccagcagcagaggcgccagccccaacagaagcaccagcgtgagcagccaggccgcccaggccgccagcccccaggtgcccgccaccaccacccccaagggcacccccatccagggcagcaagctgagactgcccggctacctgagcggcaagggcttccacagcggcgaggacagcggcctgatcaccaccgccgccgccagagtgagaacccagttcgccgacagcaagaagacccccagcagacccggcagcagagccggcagcaaggccggcagcagagccagcagcagaagaggcagcgacgccagcgacttcgacatcagcgagatccagagcgtgtgcagcgacgtggagaccgtgccccagacccacagacccacccccagagccggcagcagacccagcaccgccaagcccagcaagatccccaccccccagagaaagagccccgccagcaagctggacaagagcagcaagagatag

SEQ ID NO: 269272 - DNA, 9180 bp, Artificial Sequence
  derived and/or modified sequence
atgcacagtagtagttatagttaccgtagcagtgattctgtgtttagtaacactaccagcactcgaaccagtcttgattcaaatgaaaatcttctcttggttcattgtggtccaacactgatcaactcttgcattagcttcggcagtgaatcctttgatggacacaggttagaaatgttgcaacagattgccaacagagttcagagggacagtgtcatctgtgaagacaaactgattcttgctggaaatgctcttcagtctgattctaaaagattagaatcaggagtgcagtttcagaatgaagcagaaattgctgggtatatacttgaatgtgagaaccttttacgccagcatgtaattgatgtacagattcttattgatggaaaatactaccaggcagatcaattggtacagagggttgcaaaactgcgtgacgaaattatggccttaaggaacgaatgttcttctgtgtacagcaaaggacgcatactgacaacagaacagacaaagctcatgatatcaggaatcactcaaagtttaaactcaggatttgcacagaccttacaccctagtctgacctcagggctgacccagagtttaacaccttccctaacctcttctagtatgacttctggcctgtcatcagggatgacttcccgcctgactccatctgtcactccagcttatacacctggtttcccatcaggattagttccaaatttcagttcaggagtagagccaaattcattgcaaactttgaagttgatgcagatccgaaaaccccttctaaagtcttctttgctggatcaaaatttaacagaagaagaaatcaatatgaaatttgttcaggatcttttgaattgggttgatgagatgcaggtacaactggaccgcactgagtggggctcagatttgccaagtgttgaaagccatttagaaaatcataaaaatgttcatagagctattgaagaatttgaatctagtctcaaagaagctaaaatcagtgagattcaaatgacagcacctcttaaactgacttatgcagaaaagttgcacagattagagagtcagtatgcaaaactcttgaatacatccaggaatcaagaacggcaccttgatacactccataattttgtaagtcgtgcgactaatgaacttatttggttgaatgaaaaagaagaggaggaagttgcttatgactggagtgagagaaacaccaacatagctaggaaaaaagattatcatgctgaattaatgagagaacttgatcaaaaggaagaaaatattaaatcagttcaggagatagcagagcagctacttctagaaaatcatccagcccggttaactattgaggcctacagagcggcaatgcagacgcagtggagctggatcttacagctctgccagtgtgtggagcagcacataaaggagaacacagcgtatttcgagtttttcaatgatgccaaagaagctactgattacttaaggaatctaaaagatgccattcagcggaagtacagctgtgatagatcaagcagcattcacaagctagaagaccttgttcaggaatcaatggaagagaaagaagaacttctgcagtacaaaagcactatagcaaacctaatgggaaaagcaaaaacaataattcaactgaagccaaggaattctgactgtccactcaaaacttctattccgatcaaagctatctgtgactacagacaaattgagataaccatttacaaagacgatgaatgtgttttggcgaataactctcatcgtgctaaatggaaggtcattagtcctactgggaatgaggctatggtcccatctgtgtgcttcaccgttcctccaccaaacaaagaagcggtggaccttgccaacagaattgagcaacagtatcagaatgtcctgactctttggcatgagtctcacataaacatgaagagtgtagtatcctggcattatctcatcaatgaaattgatagaattcgagctagcaatgtggcttcaataaagacaatgctacctggtgaacatcagcaagttctaagtaatctacaatctcgttttgaagattttctggaagatagccaggaatcccaagtcttttcaggctcagatataacacaactggaaaaggaggttaatgtatgtaagcagtattatcaagaacttcttaaatctgcagaaagagaggagcaagaggaatcagtttataatctctacatctctgaagttcgaaacattagacttcggttagagaactgtgaagatcggctgattagacagattcgaactcccctggaaagagatgatttgcatgaaagtgtgttcagaatcacagaacaggagaaactaaagaaagagctggaacgacttaaagatgatttgggaacaatcacaaataagtgtgaggagtttttcagtcaagcagcagcctcttcatcagtccctaccctacgatcagagcttaatgtggtccttcagaacatgaaccaagtctattctatgtcttccacttacatagataagttgaaaactgttaacttggtgttaaaaaacactcaagctgcagaagccctcgtaaaactctatgaaactaaactgtgtgaagaagaagcagttatagctgacaagaataatattgagaatctaataagtactttaaagcaatggagatctgaagtagatgaaaagagacaggtattccatgccttagaggatgagttgcagaaagctaaagccatcagtgatgaaatgtttaaaacgtataaagaacgggaccttgattttgactggcacaaagaaaaagcagatcaattagttgaaaggtggcaaaatgttcatgtgcagattgacaacaggttacgggacttagagggcattggcaaatcactgaagtactacagagacacttaccatcctttagatgattggatccagcaggttgaaactactcagagaaagattcaggaaaatcagcctgaaaatagtaaaaccctagccacacagttgaatcaacagaagatgctggtgtccgaaatagaaatgaaacagagcaaaatggacgagtgtcaaaaatatgcagaacagtactcagctacagtgaaggactatgaattacaaacaatgacctaccgggccatggtagattcacaacaaaaatctccagtgaaacgccgaagaatgcagagttcagcagatctcattattcaagagttcatggacctaaggactcgatatactgccctggtcactctcatgacacaatatattaaatttgctggtgattcattgaagaggctggaagaggaggagaagtcactggaagaagaaaagaaagaacatgttgaaaaagccaaagaattgcaaaaatgggtatcaaatatcagcaagacattgaaagatgcagagaaggctggaaaacctcccttctctaagcaaaagatttccagtgaggaaatatcaaccaagaaggaacaattatcggaagcacttcaaactatacagctttttttggcaaaacatggagacaaaatgacagatgaagaaagaaatgaattggaaaaacaagtgaaaactcttcaggaaagttataatttattattcagtgaatctctgaaacagctacaagaatcacaaacctcaggagatgtaaaggtagaggagaagctggataaagtgattgcaggcaccattgatcagacaactggagaagtcctttcagtctttcaagcagttttaagaggcctcattgactatgacacaggaattaggttgcttgagacacagctaatgatttctggtctaatttcaccagaattaagaaagtgctttgaccttaaagatgccaaaagtcatggccttattgatgaacaaattctgtgccaactcaaagaactaagtaaagctaaggagattatttctgctgcgtcacctaccacaattccagtactggatgctctagctcaaagcatgataacagaatccatggccatcaaagttcttgagatactgctttctacaggctctctggttattccagccacaggagaacagttgaccctacagaaggctttccaacagaacttggtttcctcagcattattttctaaagttctggaaaggcaaaatatgtgcaaagatcttattgacccctgcacctctgagaaggtttctttaatagatatggtacaaagaagtactttacaggaaaacacagggatgtggcttctacctgtgagaccacaagaaggaggtagaataacattaaaatgtggaagaaacataagcattttaagagcagctcatgaaggtctcatagaccgtgaaaccatgtttaggttgttaagtgcacagcttctttctggaggtctgatcaattccaactctggccaaagaatgactgttgaagaagctgtcagagaaggggtgattgacagggacactgctagcagtatcctcacatatcaggttcaaactggtggaatcatccagtcaaaccctgccaagcgtttaactgtagacgaagcagtacagtgtgatttaataacttccagcagtgctcttctggtcctggaagctcagcgaggctatgttggactcatttggccccattctggtgaaatatttcccacatcatcttccttgcagcaagaattgattacaaatgaattggcctacaaaatcctgaatggcagacaaaaaatagctgctctttatattccagaaagttctcaagtcattggtttggatgctgctaaacagctaggaattatagacaacaacacagcatcaattttaaaaaatataacactgcctgataaaatgccagatttaggagatttagaagcttgtaaaaatgccagaagatggctctctttttgtaaatttcaaccctccacagttcatgattacagacaagaagaggatgtttttgatggagaagaacctgtcactactcagacctcagaagaaactaaaaaattatttctatcttatttaatgataaatagctatatggatgcaaacacagggcaaaggcttttgctgtacgatggagacttggatgaggctgttggcatgctactggaaggctgtcatgcagaatttgatggaaacacagccataaaagaatgtctcgatgtcttaagctcatctggtgtatttcttaataatgcttcaggtagagaaaaggatgaatgtacagctacaccaagtagtttcaataaatgtcactgtggagaacctgaacatgaagagactcctgaaaatagaaagtgtgctatagatgaagaatttaatgaaatgagaaatactgttatcaatagtgaattttctcagtcaggaaaactggcaagtacaatatcaattgatcctaaagttaacagttcacccagtgtgtgtgttcccagtctcatatcatatttaacacagactgaacttgcagacattagcatgcttagaagtgactctgaaaacatacttacaaactatgaaaatcaaagccgagtggaaacaaatgaacgtgcaaatgaatgtagtcattctaaaaacattcaaaactttccaagtgatttaatagaaaatcctattatgaaatcaaaaatgagtaaattctgtggtgtgaatgaaacagagaatgaagataatacaaacagggattcacctatctttgactattcccccaggctaagtgccttgttaagtcatgataaattgatgcacagtcagggaagttttaatgatacacacaccccagagagcaatggaaataagtgtgaagccccagccttatcattcagtgacaaaaccatgttgtcaggtcaaagaataggagaaaaatttcaagaccagtttctgggaattgcagctattaacatcagtttaccaggagagcagtatggacagaaatctttaaatatgatttctagtaatcctcaagtacaatatcacaatgataaatacatttcaaatacttctggtgaggatgaaaaaacacatccaggttttcagcagatgcctgaagacaaggaagatgagtctgaaatagaagagtattcctgtgctgtgactccagggggtgatactgataatgccattgtgtctcttacttgtgctacaccattgcttgatgaaaccatcagtgctagtgactatgaaacgtcactgctgaatgatcagcagaataacacaggaacagacactgatagtgatgatgatttttatgatactcccttgtttgaagatgatgaccatgattctttgcttcttgatggtgatgatcgtgattgcctgcaccctgaggactacgacacactgcaagaggaaaatgatgagacggcttctcctgctgatgttttttatgatgtctcaaaagagaatgaaaattccatggttccccagggggcaccagttggtagcttaagtgtgaagaacaaagcacattgtcttcaggatttccttatggatgttgagaaagatgaattagattctggtgaaaaaatacatttaaatcctgttggctcagataaggtgaatggacagtcactggaaactggatcagaaagggaatgcacaaatatccttgaaggtgatgaatctgactcattgactgattatgatattgtaggaggaaaagagagcttcactgcatcattaaaatttgatgacagtggcagttggagaggaagaaaggaagagtatgtaactggacaggaatttcactccgatactgatcatttagattctatgcaaagtgaagaaagttatggggattatatatatgacagtaatgatcaggatgacgatgatgatgatggcattgatgaagaaggaggaggtataagagatgagaatggaaagcccaggtgccaaaatgtggctgaagatatggatatccagttgtgtgcctctattttaaatgaaaacagtgatgaaaatgaaaatattaatacaatgattcttctggataaaatgcacagttgtagctctttagaaaaacagcaaagggtaaatgttgtacagctagcatcacctagtgaaaataacttagttactgaaaaaagcaaccttccagaatatacaactgagattgctggaaaaagcaaagaaaatctgttgaaccatgagatggtacttaaggatgtattgccgcctatcattaaagacactgaatctgaaaaaacttttggccctgcaagtatttcacatgataataataatatcagttcaacttctgaattaggtactgatctagcaaacacaaaggttaagttgattcaagggtcagaattgccagaattgactgattctgtgaaaggtaaagatgaatattttaagaatatgacaccaaaagttgactcatctcttgatcacatcatttgtactgagcctgatttaataggaaaacctgctgaggaaagccatttgtcattgatagcctctgtaactgacaaagatcctcaaggaaatggaagcgatctcattaaagggagagatggcaaaagtgatattctaatagaagatgaaacatcaattcagaaaatgtacttgggtgaaggagaagtgcttgtagaaggtctagtagaagaagaaaataggcatctcaaacttttgcctggtaaaaatacaagggatagtttcaagttaattaatagtcagtttccatttccacaaatcacaaacaatgaagaacttaatcagaaaggaagccttaaaaaagcaactgtaactcttaaagatgaaccaaataatctacaaataatagttagtaaaagtcctgttcagtttgagaatcttgaagaaatttttgacacatcagtttccaaagagattagtgatgacattacttcagacattacatcgtgggaagggaatacacattttgaggagtcattcactgatggacctgagaaagagcttgatctgtttacttacttaaaacattgtgctaaaaatataaaagcaaaagatgtagccaaaccaaatgaagatgtcccaagccatgttttaataactgcccctcccatgaaagaacatttacaattaggagttaataatacaaaagagaagtccactagtacccaaaaagactcacctcttaatgacatgatccaaagcaatgatctttgtagtaaagaaagcatctcaggaggaggaacagaaatttctcagttcacaccagaaagtattgaagccacactttcaatattatctcgtaaacatgtagaagatgttgggaaaaatgattttctgcagtcggagcggtgtgcaaatggattaggaaatgataactccagtaacactttaaatactgactattcattcttagaaattaataataagaaagaaagaattgagcaacagctaccaaaagaacaagccttgtctccaagatcccaagaaaaggaggttcagattcctgaattgtctcaggtatttgtggaggatgtaaaggatatcttaaaaagcaggttgaaagaaggtcatatgaaccctcaagaggttgaagaaccttcagcctgtgcagacactaaaattttaattcaaaatttaattaaaaggattaccacatcacagttggtaaatgaggcatctactgtgcccagcgactctcaaatgagtgactcttctggagtttcccccatgactaactcatcagaactaaagccagaaagtagagatgatcctttctgtattggaaatcttaagtctgagcttctccttaatatattgaagcaagatcaacatagccaaaaaattacaggagtatttgaattgatgagagaattaactcatatggagtatgacctagagaaaagaggcattacgtctaaagtacttccactgcagcttgaaaatattttctacaaactgcttgctgatggatattcagagaaaatagaacatgttggagactttaatcaaaaagcatgttctacatctgagatgatggaagaaaagccacatattcttggtgatattaaaagcaaagaaggaaactactattctcctaatttagaaactgtaaaagaaattggactagaaagctctactgtgtgggcatcaacattgccaagagatgagaagctcaaggatctgtgtaatgatttcccaagccatttggaatgtacttcagggtctaaagagatggcttctggagatagctcaaccgaacaa

SEQ ID NO: 269273 - DNA, 22865 bp, Artificial Sequence
  derived and/or modified sequence
aatattcagctgccacttttcaccgttagaagtagagctttttccagacctcctaccttttagtctactttgaaaggtgaaagaaagaacatcgtttcaggaataaaaatgcacagtagtagttatagttaccgtagcagtgattctgtgtttagtaacactaccagcactcgaaccagtcttgattcaaatgaaaatcttctcttggttcattgtggtccaacactgatcaactcttgcattagcttcggcagtgaatcctttgatggacacaggttagaaatgttgcaacagattgccaacagagttcagagggacagtgtcatctgtgaagacaaactgattcttgctggaaatgctcttcagtctgattctaaaagattagaatcaggagtgcagtttcagaatgaagcagaaattgctgggtatatacttgaatgtgagaaccttttacgccagcatgtaattgatgtacagattcttattgatggaaaatactaccaggcagatcaattggtacagagggttgcaaaactgcgtgacgaaattatggccttaaggaacgaatgttcttctgtgtacagcaaaggacgcatactgacaacagaacagacaaagctcatgatatcaggaatcactcaaagtttaaactcaggatttgcacagaccttacaccctagtctgacctcagggctgacccagagtttaacaccttccctaacctcttctagtatgacttctggcctgtcatcagggatgacttcccgcctgactccatctgtcactccagcttatacacctggtttcccatcaggattagttccaaatttcagttcaggagtagagccaaattcattgcaaactttgaagttgatgcagatccgaaaaccccttctaaagtcttctttgctggatcaaaatttaacagaagaagaaatcaatatgaaatttgttcaggatcttttgaattgggttgatgagatgcaggtacaactggaccgcactgagtggggctcagatttgccaagtgttgaaagccatttagaaaatcataaaaatgttcatagagctattgaagaatttgaatctagtctcaaagaagctaaaatcagtgagattcaaatgacagcacctcttaaactgacttatgcagaaaagttgcacagattagagagtcagtatgcaaaactcttgaatacatccaggaatcaagaacggcaccttgatacactccataattttgtaagtcgtgcgactaatgaacttatttggttgaatgaaaaagaagaggaggaagttgcttatgactggagtgagagaaacaccaacatagctaggaaaaaagattatcatgctgaattaatgagagaacttgatcaaaaggaagaaaatattaaatcagttcaggagatagcagagcagctacttctagaaaatcatccagcccggttaactattgaggcctacagagcggcaatgcagacgcagtggagctggatcttacagctctgccagtgtgtggagcagcacataaaggagaacacagcgtatttcgagtttttcaatgatgccaaagaagctactgattacttaaggaatctaaaagatgccattcagcggaagtacagctgtgatagatcaagcagcattcacaagctagaagaccttgttcaggaatcaatggaagagaaagaagaacttctgcagtacaaaagcactatagcaaacctaatgggaaaagcaaaaacaataattcaactgaagccaaggaattctgactgtccactcaaaacttctattccgatcaaagctatctgtgactacagacaaattgagataaccatttacaaagacgatgaatgtgttttggcgaataactctcatcgtgctaaatggaaggtcattagtcctactgggaatgaggctatggtcccatctgtgtgcttcaccgttcctccaccaaacaaagaagcggtggaccttgccaacagaattgagcaacagtatcagaatgtcctgactctttggcatgagtctcacataaacatgaagagtgtagtatcctggcattatctcatcaatgaaattgatagaattcgagctagcaatgtggcttcaataaagacaatgctacctggtgaacatcagcaagttctaagtaatctacaatctcgttttgaagattttctggaagatagccaggaatcccaagtcttttcaggctcagatataacacaactggaaaaggaggttaatgtatgtaagcagtattatcaagaacttcttaaatctgcagaaagagaggagcaagaggaatcagtttataatctctacatctctgaagttcgaaacattagacttcggttagagaactgtgaagatcggctgattagacagattcgaactcccctggaaagagatgatttgcatgaaagtgtgttcagaatcacagaacaggagaaactaaagaaagagctggaacgacttaaagatgatttgggaacaatcacaaataagtgtgaggagtttttcagtcaagcagcagcctcttcatcagtccctaccctacgatcagagcttaatgtggtccttcagaacatgaaccaagtctattctatgtcttccacttacatagataagttgaaaactgttaacttggtgttaaaaaacactcaagctgcagaagccctcgtaaaactctatgaaactaaactgtgtgaagaagaagcagttatagctgacaagaataatattgagaatctaataagtactttaaagcaatggagatctgaagtagatgaaaagagacaggtattccatgccttagaggatgagttgcagaaagctaaagccatcagtgatgaaatgtttaaaacgtataaagaacgggaccttgattttgactggcacaaagaaaaagcagatcaattagttgaaaggtggcaaaatgttcatgtgcagattgacaacaggttacgggacttagagggcattggcaaatcactgaagtactacagagacacttaccatcctttagatgattggatccagcaggttgaaactactcagagaaagattcaggaaaatcagcctgaaaatagtaaaaccctagccacacagttgaatcaacagaagatgctggtgtccgaaatagaaatgaaacagagcaaaatggacgagtgtcaaaaatatgcagaacagtactcagctacagtgaaggactatgaattacaaacaatgacctaccgggccatggtagattcacaacaaaaatctccagtgaaacgccgaagaatgcagagttcagcagatctcattattcaagagttcatggacctaaggactcgatatactgccctggtcactctcatgacacaatatattaaatttgctggtgattcattgaagaggctggaagaggaggagaagtcactggaagaagaaaagaaagaacatgttgaaaaagccaaagaattgcaaaaatgggtatcaaatatcagcaagacattgaaagatgcagagaaggctggaaaacctcccttctctaagcaaaagatttccagtgaggaaatatcaaccaagaaggaacaattatcggaagcacttcaaactatacagctttttttggcaaaacatggagacaaaatgacagatgaagaaagaaatgaattggaaaaacaagtgaaaactcttcaggaaagttataatttattattcagtgaatctctgaaacagctacaagaatcacaaacctcaggagatgtaaaggtagaggagaagctggataaagtgattgcaggcaccattgatcagacaactggagaagtcctttcagtctttcaagcagttttaagaggcctcattgactatgacacaggaattaggttgcttgagacacagctaatgatttctggtctaatttcaccagaattaagaaagtgctttgaccttaaagatgccaaaagtcatggccttattgatgaacaaattctgtgccaactcaaagaactaagtaaagctaaggagattatttctgctgcgtcacctaccacaattccagtactggatgctctagctcaaagcatgataacagaatccatggccatcaaagttcttgagatactgctttctacaggctctctggttattccagccacaggagaacagttgaccctacagaaggctttccaacagaacttggtttcctcagcattattttctaaagttctggaaaggcaaaatatgtgcaaagatcttattgacccctgcacctctgagaaggtttctttaatagatatggtacaaagaagtactttacaggaaaacacagggatgtggcttctacctgtgagaccacaagaaggaggtagaataacattaaaatgtggaagaaacataagcattttaagagcagctcatgaaggtctcatagaccgtgaaaccatgtttaggttgttaagtgcacagcttctttctggaggtctgatcaattccaactctggccaaagaatgactgttgaagaagctgtcagagaaggggtgattgacagggacactgctagcagtatcctcacatatcaggttcaaactggtggaatcatccagtcaaaccctgccaagcgtttaactgtagacgaagcagtacagtgtgatttaataacttccagcagtgctcttctggtcctggaagctcagcgaggctatgttggactcatttggccccattctggtgaaatatttcccacatcatcttccttgcagcaagaattgattacaaatgaattggcctacaaaatcctgaatggcagacaaaaaatagctgctctttatattccagaaagttctcaagtcattggtttggatgctgctaaacagctaggaattatagacaacaacacagcatcaattttaaaaaatataacactgcctgataaaatgccagatttaggagatttagaagcttgtaaaaatgccagaagatggctctctttttgtaaatttcaaccctccacagttcatgattacagacaagaagaggatgtttttgatggagaagaacctgtcactactcagacctcagaagaaactaaaaaattatttctatcttatttaatgataaatagctatatggatgcaaacacagggcaaaggcttttgctgtacgatggagacttggatgaggctgttggcatgctactggaaggctgtcatgcagaatttgatggaaacacagccataaaagaatgtctcgatgtcttaagctcatctggtgtatttcttaataatgcttcaggtagagaaaaggatgaatgtacagctacaccaagtagtttcaataaatgtcactgtggagaacctgaacatgaagagactcctgaaaatagaaagtgtgctatagatgaagaatttaatgaaatgagaaatactgttatcaatagtgaattttctcagtcaggaaaactggcaagtacaatatcaattgatcctaaagttaacagttcacccagtgtgtgtgttcccagtctcatatcatatttaacacagactgaacttgcagacattagcatgcttagaagtgactctgaaaacatacttacaaactatgaaaatcaaagccgagtggaaacaaatgaacgtgcaaatgaatgtagtcattctaaaaacattcaaaactttccaagtgatttaatagaaaatcctattatgaaatcaaaaatgagtaaattctgtggtgtgaatgaaacagagaatgaagataatacaaacagggattcacctatctttgactattcccccaggctaagtgccttgttaagtcatgataaattgatgcacagtcagggaagttttaatgatacacacaccccagagagcaatggaaataagtgtgaagccccagccttatcattcagtgacaaaaccatgttgtcaggtcaaagaataggagaaaaatttcaagaccagtttctgggaattgcagctattaacatcagtttaccaggagagcagtatggacagaaatctttaaatatgatttctagtaatcctcaagtacaatatcacaatgataaatacatttcaaatacttctggtgaggatgaaaaaacacatccaggttttcagcagatgcctgaagacaaggaagatgagtctgaaatagaagagtattcctgtgctgtgactccagggggtgatactgataatgccattgtgtctcttacttgtgctacaccattgcttgatgaaaccatcagtgctagtgactatgaaacgtcactgctgaatgatcagcagaataacacaggaacagacactgatagtgatgatgatttttatgatactcccttgtttgaagatgatgaccatgattctttgcttcttgatggtgatgatcgtgattgcctgcaccctgaggactacgacacactgcaagaggaaaatgatgagacggcttctcctgctgatgttttttatgatgtctcaaaagagaatgaaaattccatggttccccagggggcaccagttggtagcttaagtgtgaagaacaaagcacattgtcttcaggatttccttatggatgttgagaaagatgaattagattctggtgaaaaaatacatttaaatcctgttggctcagataaggtgaatggacagtcactggaaactggatcagaaagggaatgcacaaatatccttgaaggtgatgaatctgactcattgactgattatgatattgtaggaggaaaagagagcttcactgcatcattaaaatttgatgacagtggcagttggagaggaagaaaggaagagtatgtaactggacaggaatttcactccgatactgatcatttagattctatgcaaagtgaagaaagttatggggattatatatatgacagtaatgatcaggatgacgatgatgatgatggcattgatgaagaaggaggaggtataagagatgagaatggaaagcccaggtgccaaaatgtggctgaagatatggatatccagttgtgtgcctctattttaaatgaaaacagtgatgaaaatgaaaatattaatacaatgattcttctggataaaatgcacagttgtagctctttagaaaaacagcaaagggtaaatgttgtacagctagcatcacctagtgaaaataacttagttactgaaaaaagcaaccttccagaatatacaactgagattgctggaaaaagcaaagaaaatctgttgaaccatgagatggtacttaaggatgtattgccgcctatcattaaagacactgaatctgaaaaaacttttggccctgcaagtatttcacatgataataataatatcagttcaacttctgaattaggtactgatctagcaaacacaaaggttaagttgattcaagggtcagaattgccagaattgactgattctgtgaaaggtaaagatgaatattttaagaatatgacaccaaaagttgactcatctcttgatcacatcatttgtactgagcctgatttaataggaaaacctgctgaggaaagccatttgtcattgatagcctctgtaactgacaaagatcctcaaggaaatggaagcgatctcattaaagggagagatggcaaaagtgatattctaatagaagatgaaacatcaattcagaaaatgtacttgggtgaaggagaagtgcttgtagaaggtctagtagaagaagaaaataggcatctcaaacttttgcctggtaaaaatacaagggatagtttcaagttaattaatagtcagtttccatttccacaaatcacaaacaatgaagaacttaatcagaaaggaagccttaaaaaagcaactgtaactcttaaagatgaaccaaataatctacaaataatagttagtaaaagtcctgttcagtttgagaatcttgaagaaatttttgacacatcagtttccaaagagattagtgatgacattacttcagacattacatcgtgggaagggaatacacattttgaggagtcattcactgatggacctgagaaagagcttgatctgtttacttacttaaaacattgtgctaaaaatataaaagcaaaagatgtagccaaaccaaatgaagatgtcccaagccatgttttaataactgcccctcccatgaaagaacatttacaattaggagttaataatacaaaagagaagtccactagtacccaaaaagactcacctcttaatgacatgatccaaagcaatgatctttgtagtaaagaaagcatctcaggaggaggaacagaaatttctcagttcacaccagaaagtattgaagccacactttcaatattatctcgtaaacatgtagaagatgttgggaaaaatgattttctgcagtcggagcggtgtgcaaatggattaggaaatgataactccagtaacactttaaatactgactattcattcttagaaattaataataagaaagaaagaattgagcaacagctaccaaaagaacaagccttgtctccaagatcccaagaaaaggaggttcagattcctgaattgtctcaggtatttgtggaggatgtaaaggatatcttaaaaagcaggttgaaagaaggtcatatgaaccctcaagaggttgaagaaccttcagcctgtgcagacactaaaattttaattcaaaatttaattaaaaggattaccacatcacagttggtaaatgaggcatctactgtgcccagcgactctcaaatgagtgactcttctggagtttcccccatgactaactcatcagaactaaagccagaaagtagagatgatcctttctgtattggaaatcttaagtctgagcttctccttaatatattgaagcaagatcaacatagccaaaaaattacaggagtatttgaattgatgagagaattaactcatatggagtatgacctagagaaaagaggcattacgtctaaagtacttccactgcagcttgaaaatattttctacaaactgcttgctgatggatattcagagaaaatagaacatgttggagactttaatcaaaaagcatgttctacatctgagatgatggaagaaaagccacatattcttggtgatattaaaagcaaagaaggaaactactattctcctaatttagaaactgtaaaagaaattggactagaaagctctactgtgtgggcatcaacattgccaagagatgagaagctcaaggatctgtgtaatgatttcccaagccatttggaatgtacttcagggtctaaagagatggcttctggagatagctcaaccgaacaattttccagtgaattacagcagtgtttacagcacactgaaaaaatgcatgagtatttgacattgcttcaagatatgaaaccccccttagacaaccaggaatctctggataacaacttggaagctttgaagaatcaacttagacagttggagacatttgaattgggattagctccaattgctgttattttaagaaaagatatgaagttggcagaagagtttttaaagtctcttcccagtgactttcccagaggccatgttgaagaattgagtattagccaccagagtttgaagaccgccttctcttccctcagcaacgtgtcttcagaaagaacgaaacagatcatgcttgcgatcgactctgaaatgtctaaactagcagtttcccatgaagaatttctgcataaacttaagtcattctcagattgggtatcagagaagagcaaatctgtgaaggatattgagattgtgaatgttcaagattctgagtatgtaaagaaacgtttggagtttctcaaggcaaataatgtattaaaagaccttggacataccaaaatgcagctggagactactgcctttgatgtgcagttcttcatttctgaatatgcacaggatctgtctcccaaccaaagcaaacaactgctgaggctcttaaatacaactcagaagtgttttcttgatgtacaggagtcagtaactacccaggtggaacgtttagagactcagttacatctagaacaagatcttgatgatcagaagattgtagcagagcgtcagcaggagtataaagagaaactccaagggatatgtgatcttcttacccaaactgaaaaccgcctaattggtcaccaagaagccttcatgattggagatggcacagttgagttaaagaaatatcagtccaagcaagaggaattacagaaagatatgcaaggaagtgcacaggcattggctgaagtagtgaaaaacacagagaacttcttaaaagagaatggtgaaaagctgtcacaggaagataaggctttgattgaacagaaacttaatgaagctaagataaagtgtgaacagcttaatttaaaagcagaacagtctaaaaaggagctggataaagttgtgacaacagcaatcaaggaagaaactgaaaaggtagcagcagtgaagcagctggaagagagcaaaaccaaaatagaaaaccttttggactggttgtcaaatgttgacaaagactcagaaagggcagggacaaaacacaaacaggtaatcgaacagaacgggacccattttcaagaaggtgatggcaagtcagcaattggagaagaggatgaagttaatggtaacctgttggagactgatgttgatgggcaagttggaaccactcaggagaatctgaatcagcaatatcagaaagttaaggcccaacacgagaagatcatctctcagcaccaagcagtgatcatagccactcagtctgcacaagtgttgcttgagaaacagggtcagtatctctctcctgaagaaaaagagaaactgcaaaagaacatgaaggaactgaaagtgcattatgaaactgcactggctgagtcagagaagaaaatgaagttaactcactctctgcaggaagaattagaaaagtttgatgctgactataccgagtttgagcactggctacagcagtcagaacaagaacttgaaaacctggaggcaggtgcagatgacatcaatggtttaatgaccaaattgaagaggcagaagagtttctcagaagacgttatttctcacaaaggtgacttgagatacatcacaatttctggaaacagagtgttggaagctgccaaatcttgcagcaagagagacggtggcaaggttgatacttctgcaacccacagagaagtgcagcgcaagttggatcatgctactgatcggttcaggtctctctactctaagtgcaatgttcttggaaataatcttaaagatctggtggataaatatcaacactatgaagatgcttcatgtggacttcttgctggactccaggcctgtgaggccacagcgagcaaacacttatctgaacctattgcggtggaccccaaaaatcttcaaaggcaattagaagagaccaaggctttgcaaggacagatatcaagtcagcaggttgctgtagagaaactgaagaaaacggctgaagtgcttttagatgccaggggatctttacttccagccaagaatgatatccagaaaacacttgatgacattgttgggagatatgaggatctgtccaagtctgttaatgaacgaaatgaaaaactccagataaccttgacccgttcactgagtgtgcaggatggcttggatgaaatgctggactggatgggaaatgtggaaagttctctgaaagaacaaggtcaagtgcctttaaactctactgctcttcaggatattatcagtaaaaacattatgttggaacaggatattgcaggtcgtcagagcagtataaatgccatgaatgaaaaagtgaagaaatttatggaaacaacagatccatccactgcatcctcactgcaagccaaaatgaaagacttgtctgctcggttttcagaagcaagtcataaacacaaagaaactcttgccaaaatggaggagctaaaaaccaaagtagaactgtttgagaacctctcagaaaagctccagacatttttagaaacaaaaactcaggctcttactgaagtagatgtgccaggaaaagatgttactgaattgtctcagtatatgcaggaatcaacttctgaatttttagaacacaagaaacatcttgaagttttgcatagtctcttgaaggagatatccagccatggcttaccaagtgataaggctttggtccttgaaaaaacaaataatttgtcaaagaaattcaaggaaatggaggataccatcaaagaaaaaaaagaagctgtaacttcttgtcaagaacagttggatgctttccaagttcttgttaaatcattgaagtcatggataaaagaaacaacaaaaaaagttcccattgtacagccttcttttggtgcagaggatttaggaaaatctttggaagacactaagaaattacaagaaaagtggagtttaaaaacaccagagattcagaaagtaaacaacagtgggatctcactatgtaacttaataagtgctgtgaccacccctgcaaaggcaatagcagcagttaaatcaggtggagcagtattaaatggtgaaggaacagccacaaatactgaggaattttgggcaaataaaggtttaacatccattaaaaaggacatgactgacataagtcatggttatgaagatcttggcctcttactcaaggacaaaatagcggaactgaacactaaactctccaaattgcaaaaggctcaggaagaatcaagtgcaatgatgcagtggttacagaaaatgaacaaaactgcaacaaaatggcagcagacacctgcacctacagatactgaagctgtgaagactcaagttgagcagaataagtcgtttgaggcagaactgaagcagaatgtaaacaaagtacaggagttgaaagacaaattgacagagctgttggaggagaacccagatactcctgaggcccccagatggaaacagatgttgacagaaatagattctaagtggcaagaactcaatcaattaacaattgatagacaacaaaaactggaagaatcctccaataatctaacccagttccagactgtagaggcccaattgaaacagtggcttgtggaaaaagaacttatggtcagtgttcttgggcccttgtcaattgacccaaatatgctaaacacacaaaggcagcaggtgcagattttgctgcaagaattcgccactcggaaacctcaatatgaacagctgacagcagctggtcagggcattctgagcaggcctggagaagacccttctttacgtgggattgtgaaagagcaactggcagctgtgacccaaaaatgggatagcctaacagggcaattgagtgacagatgtgactggattgaccaagccattgttaaaagcacacagtatcaaagcctgctgagaagcctttctgataaactgagtgacttggataataaactcagcagcagtctggctgtgagcacgcaccctgatgctatgaaccaacagttggaaacagcccaaaaaatgaagcaggagatacagcaggaaaagaagcagataaaagtggcccaggcactctgtgaggatttgtcagcactggttaaagaagagtacttgaaagcagaacttagtaggcaactagaaggcatcttaaaatcatttaaggatgttgaacagaaagcagagaatcatgtccagcaccttcagtcggcctgtgcaagctctcatcaatttcagcaaatgtctagagattttcaggcttggctggatacaaagaaagaagagcaaaacaaatctcatccaatatctgccaaactcgatgtcttggagtcattaattaaagatcataaagactttagtaaaactttgaccgctcagtctcatatgtatgaaaaaaccattgcagaaggtgaaaatctgttattaaaaacacaagggtctgagaaggcagccttacagttacagcttaatacaattaaaaccaattgggatacatttaataagcaggtgaaagaaagagaaaacaagttaaaagagtcattggaaaaagcccttaagtataaagagcaagtagagactctctggccatggatagacaaatgccaaaacaacctggaggaaataaaattttgcttggatcctgctgaaggagagaattctattgccaagttaaagtctctgcagaaggaaatggaccaacactttggtatggtagaattactgaacaacacagccaatagcttgctcagtgtctgtgagatagataaagaagttgttacagatgagaataagtcactgatccagaaggtggacatggtcactgaacaacttcacagtaagaaattctgtctggagaacatgactcagaagtttaaagaatttcaagaagtttccaaagaatctaaaaggcagcttcagtgtgcaaaggagcagctagatatccatgattcgctgggatcccaggcttacagtaacaaatacctgaccatgttgcaaactcagcagaaatcacttcaggccttgaagcatcaggtagatttggctaaaagacttgcacaggaccttgtggtagaggcctcagactcaaagggaacctctgatgttttattacaagtggaaaccatagctcaagagcatagtacactaagtcagcaggttgatgaaaagtgttctttcttagaaaccaagcttcagggcattgggcatttccagaataccattcgagaaatgttttctcagttcgcagagtttgatgatgaactggatagcatggctccagtggggagagatgcagaaacattgcaaaagcaaaaggaaactataaaagcctttctaaagaaactagaagccctcatggcaagcaatgacaatgccaataaaacctgcaagatgatgttagccacagaagaaacctctcctgaccttgttggaatcaaaagggacttggaggccttaagcaaacaatgcaacaagttactggaccgagcccaagccagagaagagcaggttgaagggacaattaagcgccttgaagaattttacagcaaattgaaagaattttctattctgctccagaaagccgaagaacatgaagagtcacaaggtcctgttggtatggaaacggagacaattaatcagcagcttaacatgttcaaggtattccagaaagaagagattgaacccttgcaaggtaaacagcaagatgtaaactggttaggtcaaggccttattcagagtgctgccaaaagcactagcactcagggcttggagcatgacctggatgatgtcaatgcacggtggaagactctcaataagaaggtggctcagcgagcagcccagctgcaggaggccttgctgcactgtgggaggttccaggatgccctggagtccctgctcagctggatggtggacactgaggagcttgtggccaatcagaagcccccgtcggctgagttcaaagtggtaaaggcccagatacaagaacaaaagcttctccagagattgttggatgaccgaaaatctacggtggaggtaatcaaacgagaaggagaaaaaattgctacaacagcagagcccgcagataaagtgaagattttgaaacagctcagtctcttggatagcagatgggaggcattgcttaataaagctgaaacaaggaatcgtcagttggaaggtatctcggtggtagcacagcaatttcatgaaaccttagaaccactgaacgagtggcttacaaccatagaaaagaggctggtgaattgtgaacccataggaacccaagcatctaaacttgaggaacaaattgcacagcacaaagccttagaagatgacatcatcaatcacaataaacatttacaccaggctgttagcattggccagtccttaaaggttttgagctccagggaggataaagatatggtgcagagtaaattagacttctctcaagtatggtacattgagattcaagagaaaagtcacagcaggtctgagctcctccagcaggccttatgtaatgctaagatttttggggaagatgaagttgaactgatgaactggctgaatgaagtgcatgacaaactgagcaagctctcagtccaggattacagcactgaggggctatggaagcagcagtctgaacttcgggttctgcaagaggacatcttactcaggaaacaaaatgtagatcaggctttactaaatggtttagaactacttaaacaaaccacaggtgatgaagttttaataattcaagataaattggaagccattaaagcaaggtacaaagacattactaaactgagcactgatgtggccaagactctggaacaggcgctgcagcttgcaaggcggctgcactccacacacgaagagctgtgtacctggctggacaaagtggaggtggaattactttcatatgaaactcaggttctgaaaggagaagaagcaagtcaagcacaaatgagaccaaaggaactgaaaaaggaagctaagaacaacaaagccttactggactcccttaatgaagtgagcagtgctttgctggaactggtaccatggagggcaagagaaggacttgagaaaatggtagctgaggacaatgagcgctaccgattagtgagcgacaccatcactcagaaggtggaggagatcgatgcagccattctgcgatcacagcagtttgaccaagcagctgatgctgagttatcctggattactgaaacagaaaaaaaattgatgtctctgggtgacatcaggcttgagcaagaccagacttctgctcagcttcaagttcaaaagacattcaccatggagattttgagacacaaggatattattgatgaccttgttaaatctgggcataaaatcatgaccgcatgcagtgaagaggaaaagcaatcaatgaagaaaaaactggacaaggtactgaagaactatgataccatctgccagattaattcagaaaggtatctgcagctggaacgggcacagtccctggttaaccaattctgggaaacatatgaagaactttggccatggctgacagaaacacaatcaatcatctctcagcttcccgccccagcccttgaatatgaaactctaaggcagcagcaggaagaacatcggcaactgcgtgagttgatagctgaacacaagcctcatatagataagatgaacaaaactgggccacagttactggaattgagccctggggaaggcttttctatccaagagaagtatgtggcagccgacaccctttacagtcaaattaaagaagatgtcaaaaagcgtgctgtggcactggatgaagccatttctcaatcaactcagttccatgacaagatagatcagatccttgagagcctggaacgcatcgtggaacgtctgaggcagccaccctctatctctgcagaggttgagaagatcaaggaacagatcagtgaaaataagaatgtgtcagtagacatggaaaagctacagccgttgtatgaaactcttaaacagaggggagaggaaatgattgctagatctggggggactgataaagacatatctgccaaagctgttcaggataagcttgaccaaatggttttcatttgggagaacatacacacactggtggaagagagggaagccaaactactggatgtgatggagctagcagaaaagttctggtgtgatcacatgtcattgatagttaccattaaagatactcaagatttcatccgggacctggaagatcctggaattgatccttcagtagtaaaacaacagcaagaagcagcagagaccataagggaagaaatagatggactacaggaggagctggatatagttattaacctaggttctgaactcattgcggcatgtggggagcctgataaacccattgtcaagaagagtatagatgagttaaattcagcatgggattctctaaataaagcttggaaagaccggattgacaaacttgaggaggcaatgcaggctgccgttcagtaccaggatggactgcaggcggtatttgactgggtagatattgcaggtggtaaattagcttcaatgtctccaattggaacagatctcgaaactgtcaagcagcagattgaagagctaaagcaatttaagtctgaggcctatcaacagcagatagaaatggaaagactgaatcatcaagcagagcttttgctaaagaaagtaacagaagagagtgacaaacacactgttcaagacccattaatggaactgaaattgatatgggatagcctggaggagagaatcatcaacagacagcataaactggagggtgctctattagccttgggtcagttccaacatgccctggatgagctcctggcatggctgacacacaccgagggcttgctaagtgagcagaaacctgttggaggagaccctaaagccattgaaattgaacttgccaagcatcatgtgctccaaaatgatgtattagcccatcagtccacagtggaagccgttaataaagcaggaaatgatctaattgaatcaagtgcaggagaagaagcaagcaaccttcagaacaagctagaggttttaaatcaacgctggcaaaatgttttggaaaaaacagaacaaaggaagcagcagctggatggtgccttgcgccaggccaaagggttccatggcgaaattgaggatttgcagcagtggctgactgacacggagcgtcatctgttggcatctaaaccgctgggaggtttaccggaaacagccaaggagcagcttaatgtccatatggaagtctgtgctgcctttgaagctaaagaagaaacatataagagtctgatgcagaaaggccagcagatgcttgcaagatgcccaaaatctgcagagacaaatattgaccaagacataaataacttgaaagaaaaatgggaatcggtggaaaccaaactcaatgaaaggaaaactaaactggaagaggctctcaacttggcaatggagttccacaattctctccaagacttcatcaactggcttactcaggctgaacagaccctaaatgtagcttctcggccaagtctcatcttggacacagtcttatttcaaattgacgaacacaaggtttttgccaatgaagtaaattctcatcgtgagcagataatagagctggacaaaactggaacccacctaaaatattttagtcagaaacaagatgttgttctaatcaagaatctacttatcagtgtacaaagtcgatgggaaaaagtggttcaacggttggtagagagaggaagatctttggatgatgcaaggaagagagccaagcagttccatgaagcttggagtaaacttatggagtggctagaagagtcagaaaagtctttggattctgaactggaaatcgcaaatgatccagacaaaataaaaacacaacttgcacaacataaggagtttcagaaatcactcggagccaagcattctgtctacgacaccaccaacaggactggacgttctctgaaggagaaaacctccctggctgatgacaacctgaaactggatgacatgctgagtgaactcagagacaaatgggataccatatgtggaaaatctgtggaaagacaaaacaaattggaggaagccctgttattttctggacaattcacagatgccctacaggctctcattgattggttatatagagttgaaccccagctggcagaagaccagcctgttcatggagacattgatttggtgatgaatctgatcgataatcacaaggccttccaaaaagagttggggaagaggaccagcagtgtgcaggccctgaagcgctcagcccgagaactcatagaaggcagtcgggatgactcctcctgggtcaaggtccagatgcaggaattaagcacacgctgggagaccgtgtgtgcactttctatatcaaagcaaacacggttagaagcagccctgcgtcaggcagaggaattccactcggtggtacatgccctcttggagtggctggctgaggcggagcaaaccctgcgtttccatggtgtcctcccagatgatgaggatgctctccggactctcattgatcagcataaagaattcatgaagaaactggaagaaaagagagctgaactaaataaagccaccactatgggcgacaccgttttggctatctgccaccccgactccatcactaccattaagcactggataacaatcatccgggcgaggtttgaggaggtgctggcctgggcaaagcaacatcagcagagattagcaagtgctctggctgggcttattgccaaacaggaattgttggaagctttgctggcttggttgcaatgggctgaaactacacttactgataaggataaagaagtcatcccccaggagatcgaagaggtgaaagcactcattgcagaacaccagaccttcatggaggaaatgaccagaaaacagcctgatgttgataaagtaacgaagacctataagaggagagctgctgatccttcctcattacaatcccatattccagtcttggataagggacgagcaggaagaaaacgctttccagcatcaagcttgtatccctctgggtcacagacacaaattgaaaccaaaaatcctagggtaaacttactggtgagcaaatggcagcaagtctggctcctggcgttggaaagaaggaggaaactcaatgatgccttggacagactagaggagctgagggaatttgctaactttgattttgatatctggcgcaaaaaatacatgcgatggatgaatcacaagaaatctcgagtgatggacttcttcaggagaattgataaagaccaggatgggaaaataacgcggcaggaatttattgatggaattctttcctcaaagtttccaaccagtcgcttggagatgagcgcagttgcagacatctttgacagagatggcgatggatatattgactactatgaatttgtagcagcccttcacccaaataaagatgcatataaacctatcacagatgccgacaaaatcgaagatgaggtgacaaggcaggtagctaagtgtaaatgtgcaaagcgatttcaagttgagcagattggtgataataaatacagggtaagttttcaaagtaattttggagactcccagcaactgcgactggtccggatcctgcggagtactgtgatggttcgtgttggaggtggatggatggcacttgatgagttcttagtgaaaaatgatccttgcagggttcatcatcatgggagtaaaatgttacgttcggaatcaaactcttcaattactactactcagcctactatagccaaaggaaggacaaacatggaactgcgtgagaagttcattttagcagatggtgccagccagggtatggctgctttccgaccccgaggccgaagatcccggccatcatcacgaggcgcttcacccaacagatccacttctgtgtccagtcaggctgcgcaggcggcctccccacaggtccctgccaccaccacacccaagggaacgccaatacaaggaagcaagcttcgacttccaggatatttatcagggaaaggcttccactctggggaggacagtggcttgataacaactgcagctgccagagtccgaacacagtttgctgattccaagaagactcccagccgaccaggaagtcgagctggaagcaaagctggcagcagggccagcagccgccgaggcagtgatgcatcagactttgacatttcagaaatccagtccgtgtgctcagatgtggaaactgtcccccagacacacagacctacaccccgagcaggttctcggccatccacagcgaagccttcaaaaatccccacgccccagaggaaatcacctgccagcaaattggacaagtcctcaaagagatagtgcaattggttctaccaaggcccttccttgagcatttattatttaagtttgaacgatgtaaaatatggtgtagaaattcttgtgaaatattgcaagaggcgagtttaaaattctgcagatggccttatttgtgtatttgtctttttattttatctgtataattttttttgtcagatattctggggttaaagtcacatcatatgtgaggaggaaaagtttaacatgaactaacatttctgcactgtaacgtgccgggcacacactaaactcagttactgtacctacaggtaagtctacatcctctctgacagccacagcactacatcaatccctgacgttagggatacctcatgacattttcctgtttttatggaaactctgagaagctgaatgatacatgcaggggatattttttgagatgatttaaatgtaaaccaaaagatggaagacaaaaagacaaacacacccacacgcagtctttgcagtatctgacagagaactcacaggaagttacttcaagcacttgccagtactatgatattcaagtaccttgcagcatttctctgccattgctttcaatgaggccagaggcatcctggatattagacctattatactgtaagaatataagtataaagtgcgttcatatacatgtgaggttttcttttgcttgagtggacagtagcacctgtatcattgaactcattttgtatcagagcaattttgcttgcagaaagctatgaaataaaacacgtcccttaactgcattgctatggaattaattttttttccccagggaaaactagtgtatttttttatgagcaatatcaatttggagtgaccaaaagatacttaaaaatgggtttattttgatttctcatctgaaataatcatgttctggtattatatctatctatatttaataaatatatacattttaatttattatgtgtactcacatactatagaaagatattagtatgcatttaataaaacatattcacttgaatatatgg

SEQ ID NO: 269274 - protein, 345 aa, Artificial Sequence
  derived and/or modified sequence
MLPCFQLLRIGGGRGGDLYTFHPPAGAGCTYRLGHRADLCDVALRPQQEPGLISGIHAELHAEPRGDDWRVSLEDHSSQGTLVNNVRLPRGHRLELSDGDLLTFGPEGPPGTSPSEFYFMFQQVRVKPQDFAAITIPRSRGEARVGAGFRPMLPSQGAPQRPLSTFSPAPKATLILNSIGSLSKLRPQPLTFSPSWGGPKSLPVPAPPGEMGTTPSAPPQRNRRKSVHRVLAELDDESEPPENPPPVLMEPRKKLRVDKAPLTPTGNRRGRPRKYPVSAPMAPPAVGGGEPCAAPCCCLPQEETVAWVQCDGCDVWFHVACVGCSIQAAREADFRCPGCRAGIQT

SEQ ID NO: 269275 - protein, 217 aa, Artificial Sequence
  derived and/or modified sequence
TLVNNVRLPRGHRLELSDGDLLTFGPEGPPGTSPSEFYFMFQQVRVKPQDFAAITIPRSRGEARVGAGFRPMLPSQGAPQRPLSTFSPAPKATLILNSIGSLSKLRPQPLTFSPSWGGPKSLPVPAPPGEMGTTPSAPPQRNRRKSVHRVLAELDDESEPPENPPPVLMEPRKKLRVDKAPLTPTGNWHIQGMQSIVKGQKERPWPREHLSGYEEAS

SEQ ID NO: 269276 - DNA, 3306 bp, Artificial Sequence
  derived and/or modified sequence
gttcgggcccgggaattccgaaggaggggtaggcgctgcccgcgcgcagaggccgcgcccctcctggccccggcttcttggctgtcaaacagatgcagcaacgtcggctcctgccgaggagcccaaggggtcccgggatccgccgcacaggctggcactgcttgaagaggaggctactcggagactgcgccgcgcggtggattcattgccctcggaggttcaaccagttatgagtgagggattggccagaagatcggggcgcaggcaagcaggagtgctctattaggataagcaagtttgacaggaagaagctactcttctccgaattacacagaggtgatgtgttcgtattgcacgtagacgtgtgtataacaggacctccttccccgcgccccgccaccccgacacacacaggagctgcctaaagtatccttgccttgcagattggaggctccccaaatattttgcgatctgaggatccagctcaagtgaggtgccataggacgtgttcctgagtttgcattgcacggagaccttcctggaatttttcatttgcaagtcggcttaaccaattttgcattgagtcctaggctgcttgcactctgaatttgggctattcaggtagtgtgctcaaagttgaaaccgcatacagcacaactcaagtttgcatcagactgggaagcgaacttaagccagcggtgcgtggcccaggagtgggaaaggaaatggatgcctgaagtggaagaggtggtgcagagggggcaccgcccatgctgccctgcttccaactgctgcgcatagggggcggcaggggcggtgatctctacaccttccacccccccgccggggctggctgcacctatcgcttgggccacagggccgacctgtgtgatgtggccctgcggccccagcaggagcctggcctcatctctgggatccacgccgaactgcatgccgagccccggggtgatgactggagggtcagcctggaagaccacagcagccaaggtactttggtcaataatgtccgactcccaagaggtcacaggctggaattgagtgatggagacctcctgacctttggccctgaagggcccccaggaaccagcccctcggagttctacttcatgttccaacaagtacgagtcaagcctcaggactttgctgccattaccatcccacggtctaggggagaagcccgggttggggctggtttccggcctatgctgccctcccagggggctccacagcggcctctcagcaccttctcccctgcccccaaggccacactgatcctaaactccataggcagcctcagcaagctccggccccagcccctcaccttctcccctagttggggtggaccaaagagcctgcctgttcccgccccacctggggaaatggggaccacgccttctgctccaccacaacgcaatcggaggaaatctgttcaccgagtgttggcggaactggatgatgagagtgagcctcctgagaacccgccaccggtccttatggagcccaggaagaaactccgtgtagacaaagccccactgactcccactggaaatcgacgtggccgtcctcggaagtacccagtgagcgctcccatggctccccctgcagttgggggcggggagccctgtgcagctccttgttgctgcctgccccaggaagagacagtggcctgggttcagtgtgatggctgtgacgtctggttccatgtggcctgtgttggctgcagcatccaggctgccagggaggccgacttccgatgcccagggtgccgggctggcattcagacctaaggtccactgccaaggcaccatcggacacacctgcccatgagtagacacagcagcgagcaaataggtctgataaataccccccttcccttccctccccaggagggaatgactacagggaagaaggatggattgatgtggactcattcagggcctggagcagaccctggtggccaagacagaagagatggtttcctgccaaagatattgccacctccaggaaattgccagtgagctggaagttcccactattacaagccataaggccatgttgccatggacaccagaatatctgtagtcagagcacctatcagttgcaaaagccatgcctgcaaccgatggaaaatgtaagagggagttcttaaggttcttggtggcatcacccaaggcattctgggaaaacctagggcctggccccaaaacttccctactctgtggctagtcctgctgccaacaaaatcgtagcgacctggcttttcacagctttgcttttatttccaagtcaaggacaagccgcttcattcactcctgggcatttactcttcttgtgggtctgtgatattccttgctttccagggagaatgtgcttggcaaggtctggagaactaattcagaatcttaggggaaggggagagatggaaatacaaacctgcttactggaaaggtgcaaatatatgggttgagctggaggtaggaatacaggtaattaaggtttctagtttaagggaaaacagatctattgccatttaaataaggtaactgggatttggttaagttcacaaagatagcagaagatttatttacaggcttcacctgtactgtcagggcaagagaaagcctggtaaaccagctacagcagtttaccagtgtgatggctgtgacacagctccactccacgggtggacacagcagagggcaactgggctggcctggttcagtgtgaatcaaaccgcttaacccacacatggtacatgtgattttcttttgtgagccttacaccaagccaaactattgtcaaagcatcatttctatagaaataaagccttatcttgacctgttctattaaaacctgccacacccgccctttcctacctagatttaatgagcccaagtttttaaaatggaagaaatgactctggggcaaagacccctaatgaactagtggcagagccaggaataaaacttgagtaactaatgagtcacttatgggcagagtatgcaaaaaccttaagtggaaaccaaatagaccctggtatcaagaaagcacaaagtattaatagaagtttctggttggggtgatctaggttcaacagaaataagatgatttctaagtataaagccatttaagaattccagagtagggtgggaaagcaaaaagccagctctgaacaggtaacagctacatggtgactgagtctatgggcaaaagttcttgcatcacaggcttttgggaactagcctatcacagggccctgtacaaataaacttggctgcaatccca

SEQ ID NO: 269277 - DNA, 1038 bp, Artificial Sequence
  derived and/or modified sequence
atgctgccctgcttccagctgctgagaatcggcggcggcagaggcggcgacctgtacaccttccacccccccgccggcgccggctgcacctacagactgggccacagagccgacctgtgcgacgtggccctgagaccccagcaggagcccggcctgatcagcggcatccacgccgagctgcacgccgagcccagaggcgacgactggagagtgagcctggaggaccacagcagccagggcaccctggtgaacaacgtgagactgcccagaggccacagactggagctgagcgacggcgacctgctgaccttcggccccgagggcccccccggcaccagccccagcgagttctacttcatgttccagcaggtgagagtgaagccccaggacttcgccgccatcaccatccccagaagcagaggcgaggccagagtgggcgccggcttcagacccatgctgcccagccagggcgccccccagagacccctgagcaccttcagccccgcccccaaggccaccctgatcctgaacagcatcggcagcctgagcaagctgagaccccagcccctgaccttcagccccagctggggcggccccaagagcctgcccgtgcccgccccccccggcgagatgggcaccacccccagcgcccccccccagagaaacagaagaaagagcgtgcacagagtgctggccgagctggacgacgagagcgagccccccgagaaccccccccccgtgctgatggagcccagaaagaagctgagagtggacaaggcccccctgacccccaccggcaacagaagaggcagacccagaaagtaccccgtgagcgcccccatggccccccccgccgtgggcggcggcgagccctgcgccgccccctgctgctgcctgccccaggaggagaccgtggcctgggtgcagtgcgacggctgcgacgtgtggttccacgtggcctgcgtgggctgcagcatccaggccgccagagaggccgacttcagatgccccggctgcagagccggcatccagacctag

SEQ ID NO: 269278 - DNA, 654 bp, Artificial Sequence
  derived and/or modified sequence
accctggtgaacaacgtgagactgcccagaggccacagactggagctgagcgacggcgacctgctgaccttcggccccgagggcccccccggcaccagccccagcgagttctacttcatgttccagcaggtgagagtgaagccccaggacttcgccgccatcaccatccccagaagcagaggcgaggccagagtgggcgccggcttcagacccatgctgcccagccagggcgccccccagagacccctgagcaccttcagccccgcccccaaggccaccctgatcctgaacagcatcggcagcctgagcaagctgagaccccagcccctgaccttcagccccagctggggcggccccaagagcctgcccgtgcccgccccccccggcgagatgggcaccacccccagcgcccccccccagagaaacagaagaaagagcgtgcacagagtgctggccgagctggacgacgagagcgagccccccgagaaccccccccccgtgctgatggagcccagaaagaagctgagagtggacaaggcccccctgacccccaccggcaactggcacatccagggcatgcagagcatcgtgaagggccagaaggagagaccctggcccagagagcacctgagcggctacgaggaggccagctag

SEQ ID NO: 269279 - DNA, 1038 bp, Artificial Sequence
  derived and/or modified sequence
atgctgccctgtttccaattactgaggatcgggggagggcgcggaggggacttgtataccttccaccctcccgcgggcgcaggatgcacttatcgactgggtcaccgggcagatttatgtgacgtcgccctgcggcctcagcaggagccaggcctcatctccggtattcatgctgaactgcacgctgagcctcgtggagatgactggcgtgtgtctctcgaagatcacagcagccagggcacactggtgaacaacgttcgattgccccggggccaccggctggagctcagcgatggagatctgctcacgttcggccccgaggggccacccgggacatcaccttcagaattctattttatgtttcaacaggttcgggtgaagccccaagactttgccgctatcactatcccaaggagtaggggcgaggctagagtgggggcagggtttcgacccatgttgccatcgcagggggcaccccaacggccgttgtccaccttctcccctgctcctaaggccactctcatcctgaatagcataggcagtctcagtaaactccggccccagcccttgacattcagcccctcttggggcgggcctaaaagcctgccagtgcccgctccccccggtgaaatgggcaccacccctagcgcgcccccccagagaaatcgccgcaagagtgtgcaccgagtcctagccgaactggatgatgagtctgagccccccgagaatccccctccggtcttgatggaacctcgcaaaaagctcagagtggacaaagctccattaaccccaaccggtaatcgcaggggcaggccacgcaagtacccggtgtccgctcctatggccccccctgccgttggcggaggcgaaccgtgtgcagccccatgttgttgtcttccgcaggaggagacagttgcttgggtgcaatgcgacggctgtgatgtctggtttcatgtcgcctgcgttggctgttccattcaggccgcccgtgaggctgattttcgctgccctgggtgtcgagccggcattcaaacctag

SEQ ID NO: 269280 - DNA, 1038 bp, Artificial Sequence
  derived and/or modified sequence
atgctgccctgctttcagttgctgcggatagggggcgggcgcgggggcgacttatatactttccatcccccagcaggagctgggtgcacatacaggctcggacaccgggccgacttgtgcgacgttgccctccgaccacagcaagagcccgggctgatcagtggtatacacgccgagctgcatgccgagccaagaggcgacgattggcgcgtctcattagaagaccactctagccagggcactctggtgaataatgtgcgattgccccgagggcatcgtcttgaactgtcggacggtgacctcttaacattcggtccggagggccctcctggaacttcgccgtcggaattctacttcatgtttcagcaggtgcgcgtgaaaccacaagacttcgcagcaataaccatccctcgctcccgtggcgaagctagggtcggagctggtttcaggcctatgctcccatcacagggggcaccacagagaccattaagcaccttcagcccagcaccaaaagccacactgattctgaactccatcggtagtctgtcgaagctcaggccccagcctcttacgttcagccccagctggggaggtcctaaatccctgccagttccagcacctcccggcgagatgggaaccacccccagcgccccccctcagagaaatcgcaggaaaagcgtgcaccgagtgctcgctgagttggacgacgaaagcgagccacctgagaaccctcctcctgtgctgatggagccgcggaaaaagttgagagtcgacaaagcgccccttacgcctacggggaatagaaggggccgcccccgcaagtaccccgtatctgccccaatggcgccacctgccgtcggagggggggagccttgcgccgctccatgttgttgcctgccccaggaagaaactgtggcctgggtacagtgcgacggctgcgacgtgtggtttcacgtggcatgcgtggggtgttctatccaagccgcacgcgaagccgatttcagatgccctgggtgtagagcaggaatccagacgtag

SEQ ID NO: 269281 - DNA, 654 bp, Artificial Sequence
  derived and/or modified sequence
acacttgtcaataacgtcagactgcctaggggccataggcttgagctttctgatggagacctgctgacttttggcccagaagggccccccggcactagcccaagcgagttctacttcatgtttcaacaggtgagagttaagccccaagattttgcggccataacaatccctcggagcaggggcgaggcacgagtcggcgctggattccggcccatgctaccctcacagggagcgccgcagcggccgttgagcaccttttcaccagcacccaaggccacacttattttgaactcaataggaagcctaagcaagctgcgacctcagcctctcactttctcaccgagctggggcggacccaagagtctgccagtgccagctcctccaggcgaaatgggtacgaccccatccgccccccctcaaaggaaccgccggaagagcgtgcacagggtgttagctgagttggacgatgagagtgagccaccggagaaccctccacctgtgttaatggaacccaggaagaagcttcgagtcgataaagcccctctgacaccaaccggtaactggcacattcaaggcatgcaatccatagtgaagggacaaaaggaaagaccctggcctcgtgaacacctcagcgggtatgaggaggcttcttag

SEQ ID NO: 269282 - DNA, 1038 bp, Artificial Sequence
  derived and/or modified sequence
atgctgccctgcttccagctgctgcgcatcggcggcggccggggcggggacctgtacaccttccaccccccagctggagctggctgcacctaccgcctgggccacagagctgacctgtgtgatgtggccctgcggccccagcaggagcccggcctcatcagcggcatccacgccgagctgcacgccgagcccagaggagatgactggagggtgtccctggaggaccacagcagccagggcaccctggtgaacaacgtgcggctgccccggggccaccggctggagctgagtgatggagacctgctgaccttcggccctgagggccccccaggcaccagccccagcgagttctacttcatgttccagcaggtgcgggtgaagccccaggactttgctgccatcaccatccccaggagcagaggagaggcccgggtgggcgccggcttccggcccatgctgcccagccagggcgccccccagaggcccctgagcaccttcagccctgcccccaaggccaccctcatcctgaacagcatcggcagcctgagcaagctgcggccccagcccctgaccttcagccccagctggggcggccccaagagcctgcctgtgcctgcccctcctggagagatgggcaccacccccagcgccccaccccagaggaacagaaggaagtctgtgcaccgggtgctggccgagctggatgatgagagcgagcccccagagaaccccccacctgtgctgatggagcccaggaagaagctgcgggtggacaaggcccccctgacccccactggaaacagaagaggccggcccaggaagtaccctgtgtctgcccccatggcccctcctgctgtgggcggcggggagccctgtgccgccccctgctgctgcctgccccaggaggagaccgtggcctgggtgcagtgtgatggctgtgatgtgtggttccacgtggcctgtgtgggctgcagcatccaggccgcccgggaggccgacttccgctgccccggctgcagagctggcatccagacctag

SEQ ID NO: 269283 - DNA, 654 bp, Artificial Sequence
  derived and/or modified sequence
accctggtgaacaacgtgcggctgccccggggccaccggctggagctgagtgatggagacctgctgaccttcggccctgagggccccccaggcaccagccccagcgagttctacttcatgttccagcaggtgcgggtgaagccccaggactttgctgccatcaccatccccaggagcagaggagaggcccgggtgggcgccggcttccggcccatgctgcccagccagggcgccccccagaggcccctgagcaccttcagccctgcccccaaggccaccctcatcctgaacagcatcggcagcctgagcaagctgcggccccagcccctgaccttcagccccagctggggcggccccaagagcctgcctgtgcctgcccctcctggagagatgggcaccacccccagcgccccaccccagaggaacagaaggaagtctgtgcaccgggtgctggccgagctggatgatgagagcgagcccccagagaaccccccacctgtgctgatggagcccaggaagaagctgcgggtggacaaggcccccctgacccccactggaaactggcacatccagggcatgcagagcatcgtgaagggccagaaggagcggccctggccccgggagcacctgagcggctatgaggaggccagctag

SEQ ID NO: 269284 - DNA, 1038 bp, Artificial Sequence
  derived and/or modified sequence
atgctgccctgcttccagctgctgcggatcggcggcggccggggcggggacctgtatacctttcaccctccggcaggagccgggtgtacttacaggctgggacacagggccgacttatgcgatgtagctctccgcccccagcaggagcccggattaatcagtggaatccacgccgagcttcacgcagagccacggggcgacgactggcgggtttcactggaggaccactcttcccagggcaccctggtcaacaacgtgcgtctcccccgagggcaccggctcgagctctctgacggggatttgctgaccttcggaccagagggaccacccggcactagcccaagcgaattctattttatgtttcaacaggtgagggttaaaccccaggactttgcagccataaccattcctagatccagaggcgaagcaagagtgggagctgggtttcgcccaatgctaccctctcagggtgcgccccagaggccgctgtctacgtttagtccagctccaaaagctactctgatactgaacagtatcggctccctatctaagttgaggccccagccacttacattcagccccagttgggggggccctaagtctctgccagtacctgcgcctcccggcgaaatgggaaccaccccatccgcccccccgcaaaggaaccggcggaaaagcgtgcaccgagtcctggctgaactggacgacgagagcgagcccccggagaatccccctccagtgctgatggagccccgaaaaaagctccgcgtggataaggcccctctgacaccaaccggaaataggagggggagacccagaaaatacccagtctctgccccaatggcgccccctgcagtgggagggggcgaaccttgtgccgctccatgctgttgcttaccccaggaggaaacagtcgcgtgggttcagtgcgacgggtgcgacgtctggtttcatgtggcgtgcgtggggtgttccatccaggcagccagggaggccgatttccgctgccctggatgtcgcgctgggatacagacatag

SEQ ID NO: 269285 - DNA, 1038 bp, Artificial Sequence
  derived and/or modified sequence
atgctgccctgcttccagctgctgcggatcggcggcggccggggcggagacctgtacacgtttcatcccccggcgggggctgggtgcacatatagactgggccatagagcagacttgtgtgatgtggccctgcgcccccagcaagagcccggtctaatctctggcattcatgccgaactccacgccgagcccaggggcgatgattggagagttagtttagaagaccattcctcgcagggaacactagtgaacaacgttcggctgccccgaggccatagactggagctgagtgacggtgatctgctgacgttcggaccggaagggcctcccggcaccagtccttcagagttctacttcatgttccagcaggtcagggtcaaaccccaagatttcgcggccattacaataccccggtctcggggcgaagctagagtaggcgcggggttcaggccaatgctcccttcgcaaggggctcctcagcgccctctgtcgacgttctcacctgcaccgaaggccaccttgattctcaatagcattggctcccttagcaaattacggccacagcctctcacgtttagcccttcatggggaggaccgaagtctttacccgtccctgccccgcccggcgaaatgggtacaacacctagtgctccccctcagcgcaacagaaggaagtccgttcatagagtgctcgcggagcttgacgacgagagcgaacctcccgagaacccaccacctgtgctcatggagcctcggaagaagctgcgtgtggataaagccccattgactcccactggcaaccgacggggcagacctagaaaatatccagtttctgcccctatggctccacctgccgtcgggggcggcgaaccttgtgctgctccgtgttgttgcctcccacaagaggagacagtggcatgggtgcaatgcgacggatgcgacgtatggttccacgtggcatgcgtggggtgcagcattcaagctgcccgcgaagctgacttccgctgccccgggtgtcgcgcaggtattcaaacatag

SEQ ID NO: 269286 - DNA, 654 bp, Artificial Sequence
  derived and/or modified sequence
accctggtgaacaacgtgcggctgccccggggccaccggctggagctgtcagatggagacctcctgaccttcggacccgagggcccccccggcacatcaccctctgagttttactttatgtttcagcaggttagggtgaaacctcaggatttcgctgccatcactatccctagatcaagaggcgaggccagagtgggcgcaggcttccgtccgatgttgccgtctcagggggcgcctcagcgtcccctgagcaccttctcacctgccccaaaagccacactcatactgaactcaatagggagtctctcaaagctgaggccacagccactgactttttccccttcttggggtggtccaaaatccctgcctgttccagctccacctggagaaatgggtactactcctagcgctcctccccagcgaaaccgcagaaagagcgtccatagggtgctggccgaactggatgatgagtcagagccacccgaaaatcctccacctgtcctgatggaaccaaggaaaaagctccgcgttgacaaggccccccttactccaactggtaattggcacattcaagggatgcaatccatagtgaagggtcagaaggagagaccctggccacgcgaacacttgtccggttacgaggaggccagctag

SEQ ID NO: 269287 - DNA, 1038 bp, Artificial Sequence
  derived and/or modified sequence
atgcttccttgtttccaactcctcagaatcgggggtggacggggaggcgatctgtacacattccatccccctgcaggggctgggtgtacctaccgactcgggcacagagccgacctgtgcgacgtggccctcaggccccagcaagaacctggactgatcagtggcatccatgccgagctccacgccgagccacggggagacgattggagggtgtcactcgaagaccactcatcccaaggtacactcgtgaataacgtgaggctgcccagaggtcaccgcctcgagctttccgacggcgatttactgaccttcggccctgaaggcccacccggaaccagtcctagtgaattctactttatgttccagcaggttagggtcaagccccaggactttgcggctataaccatcccgagatccagaggagaagcacgggtcggagccggatttcgcccaatgctgcccagccagggagctcctcagcgcccactgagcacttttagcccggcaccaaaagcgactctgatactcaattcaattgggtctctgtctaagctcaggccccagccgctgaccttcagcccatcttgggggggtcctaaatctctgcccgttccagctccccctggcgagatgggaacgaccccatctgcaccacctcagcggaacaggcgcaagtcagtccatagggtgcttgccgaacttgacgatgaatctgaaccacctgaaaatccgcctcccgtgctgatggagccgagaaaaaagctgagagtggataaagccccacttacacccaccgggaataggcggggacggccacgaaaataccccgtttcggcccctatggcgcctcccgcagtgggaggcggagagccttgcgcagccccttgctgctgtctacctcaagaggaaaccgtcgcctgggtgcagtgcgacggatgtgatgtgtggttccatgtggcatgcgtgggctgttccatccaggctgctcgggaggcagattttcgctgcccaggatgcagagctggaattcagacatag

SEQ ID NO: 269288 - DNA, 1038 bp, Artificial Sequence
  derived and/or modified sequence
atgctcccttgctttcagctcctgagaatcgggggtgggagggggggagatctctacaccttccatccgcctgccggagccggatgtacgtaccgccttgggcatcgcgctgacctgtgcgatgtggcactacggcctcaacaagaacctggcctgatttcaggtattcacgcagaactgcatgcagagccacggggagacgactggcgggtctccctagaagatcattcctcacagggcactctcgtaaacaatgtacggctcccaaggggccaccgcctggagctgagtgatggtgatctcctgacctttggaccagagggtccacctgggaccagtccatccgaattctactttatgttccaacaggtgcgggtgaagccacaggattttgcagcaattacaatccctcggagtaggggtgaggctagggtaggcgcaggatttagacctatgctaccctcccagggagcaccacagaggccactgtccacattctcacctgccccaaaggcgactttaatcctgaactccatcgggtccctgtctaagctgagacctcagccactgacattttccccctcctggggaggtccgaagagcctgcctgtacctgcaccaccaggcgaaatgggaaccacccctagcgcacccccacagagaaatcgcagaaaatccgtccaccgcgtattggcggagttggatgacgaaagtgagcctccagagaatcctccacccgtcctcatggagccgcgaaaaaagcttcgggtagataaagccccactgacacctaccggcaatcgccgaggcagacctcggaaataccctgtctccgctcccatggctccacctgctgtgggcggtggtgagccatgcgccgcaccctgttgttgcctgccccaggaagaaaccgtcgcatgggttcagtgtgacggatgcgacgtgtggtttcacgtggcgtgcgtcggttgttcaatccaggccgcacgggaggcagactttagatgccctggctgtagggccggaatccagacatag

SEQ ID NO: 269289 - DNA, 654 bp, Artificial Sequence
  derived and/or modified sequence
actcttgttaataacgtcaggttgcctcgcggacaccgcctcgagctctcggatggggatcttctcacatttgggcctgagggtccacccggaacttcgccctccgaattctattttatgttccagcaagtcagagtgaagccccaggattttgctgccataacaattccaagatctagaggtgaagcaagagtcggcgcaggcttcagacccatgctcccttctcaaggtgcccctcaaagaccactaagtacattcagccccgcaccaaaagctaccctgattttaaactcgatcggatcactgagcaaactacgcccacaaccactaaccttttcaccctcctggggcggacccaagtctctgcccgtcccagcacctcccggagagatgggtaccacaccttcagcgcctcctcagcggaatcgcaggaaaagcgtacaccgcgttctggccgagttagatgatgagtctgagccaccggagaacccaccaccagtgctcatggaaccacggaaaaagttacgcgtggacaaagctccgctgactcccacaggaaactggcatatccaggggatgcaaagcatagtgaaagggcagaaagaacgcccttggcccagggaacacctgtctggctacgaagaggccagctag

SEQ ID NO: 269290 - DNA, 3039 bp, Artificial Sequence
  derived and/or modified sequence
aggaggggtaggcgctgcccgcgcgcagaggccgcgcccctcctggccccggcttcttggctgtcaaacagatgcagcaacgtcggctcctgccgaggagcccaaggggtcccgggatccgccgcacaggctggcactgcttgaagaggaggctactcggagactgcgccgcgcggattggaggctccccaaatattttgcgatctgaggatccagctcaagtgaggtgccataggacgtgttcctgagtttgcattgcacggagaccttcctggaatttttcatttgcaagtcggcttaaccaattttgcattgagtcctaggctgcttgcactctgaatttgggctattcaggtagtgtgctcaaagttgaaaccgcatacagcacaactcaagtttgcatcagactgggaagcgaacttaagccagcggtgcgtggcccaggagtgggaaaggaaatggatgcctgaagtggaagaggtggtgcagagggggcaccgcccatgctgccctgcttccaactgctgcgcatagggggcggcaggggcggtgatctctacaccttccacccccccgccggggctggctgcacctatcgcttgggccacagggccgacctgtgtgatgtggccctgcggccccagcaggagcctggcctcatctctgggatccacgccgaactgcatgccgagccccggggtgatgactggagggtcagcctggaagaccacagcagccaaggtactttggtcaataatgtccgactcccaagaggtcacaggctggaattgagtgatggagacctcctgacctttggccctgaagggcccccaggaaccagcccctcggagttctacttcatgttccaacaagtacgagtcaagcctcaggactttgctgccattaccatcccacggtctaggggagaagcccgggttggggctggtttccggcctatgctgccctcccagggggctccacagcggcctctcagcaccttctcccctgcccccaaggccacactgatcctaaactccataggcagcctcagcaagctccggccccagcccctcaccttctcccctagttggggtggaccaaagagcctgcctgttcccgccccacctggggaaatggggaccacgccttctgctccaccacaacgcaatcggaggaaatctgttcaccgagtgttggcggaactggatgatgagagtgagcctcctgagaacccgccaccggtccttatggagcccaggaagaaactccgtgtagacaaagccccactgactcccactggaaatcgacgtggccgtcctcggaagtacccagtgagcgctcccatggctccccctgcagttgggggcggggagccctgtgcagctccttgttgctgcctgccccaggaagagacagtggcctgggttcagtgtgatggctgtgacgtctggttccatgtggcctgtgttggctgcagcatccaggctgccagggaggccgacttccgatgcccagggtgccgggctggcattcagacctaaggtccactgccaaggcaccatcggacacacctgcccatgagtagacacagcagcgagcaaataggtctgataaataccccccttcccttccctccccaggagggaatgactacagggaagaaggatggattgatgtggactcattcagggcctggagcagaccctggtggccaagacagaagagatggtttcctgccaaagatattgccacctccaggaaattgccagtgagctggaagttcccactattacaagccataaggccatgttgccatggacaccagaatatctgtagtcagagcacctatcagttgcaaaagccatgcctgcaaccgatggaaaatgtaagagggagttcttaaggttcttggtggcatcacccaaggcattctgggaaaacctagggcctggccccaaaacttccctactctgtggctagtcctgctgccaacaaaatcgtagcgacctggcttttcacagctttgcttttatttccaagtcaaggacaagccgcttcattcactcctgggcatttactcttcttgtgggtctgtgatattccttgctttccagggagaatgtgcttggcaaggtctggagaactaattcagaatcttaggggaaggggagagatggaaatacaaacctgcttactggaaaggtgcaaatatatgggttgagctggaggtaggaatacaggtaattaaggtttctagtttaagggaaaacagatctattgccatttaaataaggtaactgggatttggttaagttcacaaagatagcagaagatttatttacaggcttcacctgtactgtcagggcaagagaaagcctggtaaaccagctacagcagtttaccagtgtgatggctgtgacacagctccactccacgggtggacacagcagagggcaactgggctggcctggttcagtgtgaatcaaaccgcttaacccacacatggtacatgtgattttcttttgtgagccttacaccaagccaaactattgtcaaagcatcatttctatagaaataaagccttatcttgacctgttctattaaaacctgccacacccgccctttcctacctagatttaatgagcccaagtttttaaaatggaagaaatgactctggggcaaagacccctaatgaactagtggcagagccaggaataaaacttgagtaactaatgagtcacttatgggcagagtatgcaaaaaccttaagtggaaaccaaatagaccctggtatcaagaaagcacaaagtattaatagaagtttctggttggggtgatctaggttcaacagaaataagatgatttctaagtataaagccatttaagaattccagagtagggtgggaaagcaaaaagccagctctgaacaggtaacagctacatggtgactgagtctatgggcaaaagttcttgcatcacaggcttttgggaactagcctatcacagggccctgtacaaataaacttggctgcaatccca

SEQ ID NO: 269291 - DNA, 3290 bp, Artificial Sequence
  derived and/or modified sequence
tccgaaggaggggtaggcgctgcccgcgcgcagaggccgcgcccctcctggccccggcttcttggctgtcaaacagatgcagcaacgtcggctcctgccgaggagcccaaggggtcccgggatccgccgcacaggctggcactgcttgaagaggaggctactcggagactgcgccgcgcggtggattcattgccctcggaggttcaaccagttatgagtgagggattggccagaagatcggggcgcaggcaagcaggagtgctctattaggataagcaagtttgacaggaagaagctactcttctccgaattacacagaggtgatgtgttcgtattgcacgtagacgtgtgtataacaggacctccttccccgcgccccgccaccccgacacacacaggagctgcctaaagtatccttgccttgcagattggaggctccccaaatattttgcgatctgaggatccagctcaagtgaggtgccataggacgtgttcctgagtttgcattgcacggagaccttcctggaatttttcatttgcaagtcggcttaaccaattttgcattgagtcctaggctgcttgcactctgaatttgggctattcaggtagtgtgctcaaagttgaaaccgcatacagcacaactcaagtttgcatcagactgggaagcgaacttaagccagcggtgcgtggcccaggagtgggaaaggaaatggatgcctgaagtggaagaggtggtgcagagggggcaccgcccatgctgccctgcttccaactgctgcgcatagggggcggcaggggcggtgatctctacaccttccacccccccgccggggctggctgcacctatcgcttgggccacagggccgacctgtgtgatgtggccctgcggccccagcaggagcctggcctcatctctgggatccacgccgaactgcatgccgagccccggggtgatgactggagggtcagcctggaagaccacagcagccaaggtactttggtcaataatgtccgactcccaagaggtcacaggctggaattgagtgatggagacctcctgacctttggccctgaagggcccccaggaaccagcccctcggagttctacttcatgttccaacaagtacgagtcaagcctcaggactttgctgccattaccatcccacggtctaggggagaagcccgggttggggctggtttccggcctatgctgccctcccagggggctccacagcggcctctcagcaccttctcccctgcccccaaggccacactgatcctaaactccataggcagcctcagcaagctccggccccagcccctcaccttctcccctagttggggtggaccaaagagcctgcctgttcccgccccacctggggaaatggggaccacgccttctgctccaccacaacgcaatcggaggaaatctgttcaccgagtgttggcggaactggatgatgagagtgagcctcctgagaacccgccaccggtccttatggagcccaggaagaaactccgtgtagacaaagccccactgactcccactggaaatcgacgtggccgtcctcggaagtacccagtgagcgctcccatggctccccctgcagttgggggcggggagccctgtgcagctccttgttgctgcctgccccaggaagagacagtggcctgggttcagtgtgatggctgtgacgtctggttccatgtggcctgtgttggctgcagcatccaggctgccagggaggccgacttccgatgcccagggtgccgggctggcattcagacctaaggtccactgccaaggcaccatcggacacacctgcccatgagtagacacagcagcgagcaaataggtctgataaataccccccttcccttccctccccaggagggaatgactacagggaagaaggatggattgatgtggactcattcagggcctggagcagaccctggtggccaagacagaagagatggtttcctgccaaagatattgccacctccaggaaattgccagtgagctggaagttcccactattacaagccataaggccatgttgccatggacaccagaatatctgtagtcagagcacctatcagttgcaaaagccatgcctgcaaccgatggaaaatgtaagagggagttcttaaggttcttggtggcatcacccaaggcattctgggaaaacctagggcctggccccaaaacttccctactctgtggctagtcctgctgccaacaaaatcgtagcgacctggcttttcacagctttgcttttatttccaagtcaaggacaagccgcttcattcactcctgggcatttactcttcttgtgggtctgtgatattccttgctttccagggagaatgtgcttggcaaggtctggagaactaattcagaatcttaggggaaggggagagatggaaatacaaacctgcttactggaaaggtgcaaatatatgggttgagctggaggtaggaatacaggtaattaaggtttctagtttaagggaaaacagatctattgccatttaaataaggtaactgggatttggttaagttcacaaagatagcagaagatttatttacaggcttcacctgtactgtcagggcaagagaaagcctggtaaaccagctacagcagtttaccagtgtgatggctgtgacacagctccactccacgggtggacacagcagagggcaactgggctggcctggttcagtgtgaatcaaaccgcttaacccacacatggtacatgtgattttcttttgtgagccttacaccaagccaaactattgtcaaagcatcatttctatagaaataaagccttatcttgacctgttctattaaaacctgccacacccgccctttcctacctagatttaatgagcccaagtttttaaaatggaagaaatgactctggggcaaagacccctaatgaactagtggcagagccaggaataaaacttgagtaactaatgagtcacttatgggcagagtatgcaaaaaccttaagtggaaaccaaatagaccctggtatcaagaaagcacaaagtattaatagaagtttctggttggggtgatctaggttcaacagaaataagatgatttctaagtataaagccatttaagaattccagagtagggtgggaaagcaaaaagccagctctgaacaggtaacagctacatggtgactgagtctatgggcaaaagttcttgcatcacaggcttttgggaactagcctatcacagggccctgtacaaataaacttggctgcaatccca

SEQ ID NO: 269292 - DNA, 805 bp, Artificial Sequence
  derived and/or modified sequence
actttggtcaataatgtccgactcccaagaggtcacaggctggaattgagtgatggagacctcctgacctttggccctgaagggcccccaggaaccagcccctcggagttctacttcatgttccaacaagtacgagtcaagcctcaggactttgctgccattaccatcccacggtctaggggagaagcccgggttggggctggtttccggcctatgctgccctcccagggggctccacagcggcctctcagcaccttctcccctgcccccaaggccacactgatcctaaactccataggcagcctcagcaagctccggccccagcccctcaccttctcccctagttggggtggaccaaagagcctgcctgttcccgccccacctggggaaatggggaccacgccttctgctccaccacaacgcaatcggaggaaatctgttcaccgagtgttggcggaactggatgatgagagtgagcctcctgagaacccgccaccggtccttatggagcccaggaagaaactccgtgtagacaaagccccactgactcccactggaaactggcacatccaagggatgcagagcatcgtgaaaggacagaaagagagaccctggcctcgagaacacctgtcaggttatgaagaggcatcctaattgatttttaaattcaagagatttatcgagcaccttctataagccagcggctatacaaagtggacaaagagccctgacatccagcatgacagaagtgctatttggcacttgttcttcaagttgcccacttggatctcttccaagtgcactt

SEQ ID NO: 269293 - protein, 526 aa, Artificial Sequence
  derived and/or modified sequence
MAVFPSSGLPRCLLTLILLQLPKLDSAPFDVIGPPEPILAVVGEDAELPCRLSPNASAEHLELRWFRKKVSPAVLVHRDGREQEAEQMPEYRGRATLVQDGIAKGRVALRIRGVRVSDDGEYTCFFREDGSYEEALVHLKVAALGSDPHISMQVQENGEICLECTSVGWYPEPQVQWRTSKGEKFPSTSESRNPDEEGLFTVAASVIIRDTSAKNVSCYIQNLLLGQEKKVEISIPASSLPRLTPWIVAVAVILMVLGLLTIGSIFFTWRLYNERPRERRNEFSSKERLLEELKWKKATLHAVDVTLDPDTAHPHLFLYEDSKSVRLEDSRQKLPEKTERFDSWPCVLGRETFTSGRHYWEVEVGDRTDWAIGVCRENVMKKGFDPMTPENGFWAVELYGNGYWALTPLRTPLPLAGPPRRVGIFLDYESGDISFYNMNDGSDIYTFSNVTFSGPLRPFFCLWSSGKKPLTICPIADGPERVTVIANAQDLSKEIPLSPMGEDSAPRDADTLHSKLIPTQPSQGAP

SEQ ID NO: 269294 - protein, 494 aa, Artificial Sequence
  derived and/or modified sequence
MAVFPSSGLPRCLLTLILLQLPKLDSAPFDVIGPPEPILAVVGEDAELPCRLSPNASAEHLELRWFRKKVSPAVLVHRDGREQEAEQMPEYRGRATLVQDGIAKGRVALRIRGVRVSDDGEYTCFFREDGSYEEALVHLKVAALGSDPHISMQVQENGEICLECTSVGWYPEPQVQWRTSKGEKFPSTSESRNPDEEGLFTVAASVIIRDTSAKNVSCYIQNLLLGQEKKVEISIPASSLPRLTPWIVAVAVILMVLGLLTIGSIFFTWRLYNERPRERRNEFSSKERLLEELKWKKATLHAVDVTLDPDTAHPHLFLYEDSKSVRLEDSRQKLPEKTERFDSWPCVLGRETFTSGRHYWEVEVGDRTDWAIGVCRENVMKKGFDPMTPENGFWAVELYGNGYWALTPLRTPLPLAGPPRRVGIFLDYESGDISFYNMNDGSDIYTFSNVTVIANAQDLSKEIPLSPMGEDSAPRDADTLHSKLIPTQPSQGAP

SEQ ID NO: 269295 - DNA, 2895 bp, Artificial Sequence
  derived and/or modified sequence
atctcctaggctgaagctcctgaggggactcacatcagttatcttgctgctccagaagggtgggagatggcagttttcccaagctccggtctccccagatgtctgctcaccctcattctcctccagctgcccaaactggattcagctccctttgacgtgattggacccccggagcccatcctggccgttgtgggtgaggacgccgagctgccctgtcgcctgtctccgaacgcgagcgccgagcacttggagctacgctggttccgaaagaaggtttcgccggccgtgctggtgcatagggacgggcgcgagcaggaagccgagcagatgcccgagtaccgcgggcgggcgacgctggtccaggacggcatcgccaaggggcgcgtggccttgaggatccgtggcgtcagagtctctgacgacggggagtacacgtgctttttcagggaggatggaagctacgaagaagccctggtgcatctgaaggtggctgctctgggctctgaccctcacatcagtatgcaagttcaagagaatggagaaatctgtctggagtgcacctcagtgggatggtacccagagccccaggtgcagtggagaacttccaagggagagaagtttccatctacatcagagtccaggaatcctgatgaagaaggtttgttcactgtggctgcttcagtgatcatcagagacacttctgcgaaaaatgtgtcctgctacatccagaatctccttcttggccaggagaagaaagtagaaatatccataccagcttcctccctcccaaggctgactccctggatagtggctgtggctgtcatcctgatggttctaggacttctcaccattgggtccatatttttcacttggagactatacaacgaaagacccagagagaggaggaatgaattcagctctaaagagagactcctggaagaactcaaatggaaaaaggctaccttgcatgcagttgatgtgactctggacccagacacagctcatccccacctctttctttatgaggattcaaaatctgttcgactggaagattcacgtcagaaactgcctgagaaaacagagagatttgactcctggccctgtgtgttgggccgtgagaccttcacctcaggaaggcattactgggaggtggaggtgggagacaggactgactgggcaatcggcgtgtgtagggagaatgtgatgaagaaaggatttgaccccatgactcctgagaatgggttctgggctgtagagttgtatggaaatgggtactgggccctcactcctctccggacccctctcccattggcagggcccccacgccgggttgggattttcctagactatgaatcaggagacatctccttctacaacatgaatgatggatctgatatctatactttctccaatgtcactttctctggccccctccggcccttcttttgcctatggtctagcggtaaaaagcccctgaccatctgcccaattgctgatgggcctgagagggtcacagtcattgctaatgcccaggacctttctaaggagatcccattgtcccccatgggggaggactctgcccctagggatgcagacactctccattctaagctaatccctacccaacccagccaaggggcaccttaaggaatatctcagctcatctgttttcctttcctctaacccctctcctccatagccttctgaggcttcacctgctagctttacccagtctgtttcttcctgttgggtggcaattaattaatcctgtgaaggttacattgctgctgctagagagggtggggattgcaccttccaaatctgtttctgtaccaatatttgggggatggaggggtgactcaaactgcttctagtgttctcctaatcccttaagactagaacctataggaaactacttggagcaaactcaaaggacagattagggatcgagattgggtcaggttagcatggggttgtggttgaaatatcttggtatccaggataagggtatgtggaaaaacaggctttaggcaagtggaaaattcaaaatgtgctgtgaaaggacaatctcaggctgaaatcccataaaggaacttggagggaatattatgatggagggaagtgaggtgaatccaggcacatgatgaacacctggctcatccatagagttttcacagcctatatcgcaaattttctaagccacgtcctataggacagaggagactggccccacttctatgggtctgagctgtggaaaagggagagcagagaggaactgagatgagcagggatgaagggtcaggcagaaagcgtgatagaggagagaatttttgacaaaactcaaaagttgtttgcacagctgttctttgtaccctgttcctttctctgcgccctcctgtttctcccttgcctggaagtcattccaccctcaatttgttgatccacaagtttccagttgtcctcttctttttgttatagcatctctctatttcaaagacattcctagaagtcatccttcagtgatatcaccacttgctcagtcaccatctcaaccttatgtcacctcagccctcatctcaatgcccaaaccccttacacacaccttcagttagcttcaactgcctccgtttccacactgtgcacctttcactttccctacccagctttcctacatgctgcctctcctcagggtcccctgaatgctgcatcattgtgttcagtgcagctggactgattgcacctgtgtatttgcccctgagcactttcctttacacatgtggcttgtcttgccaatagactccaggcttataccttccatttccatcgtattctccagtttccaggatagacgttgctcatcgtctttacctaataaataagtttgtctgattgctg

SEQ ID NO: 269296 - DNA, 2266 bp, Artificial Sequence
  derived and/or modified sequence
ctgctccagaagggtgggagatggcagttttcccaagctccggtctccccagatgtctgctcaccctcattctcctccagctgcccaaactggattcagctccctttgacgtgattggacccccggagcccatcctggccgttgtgggtgaggacgccgagctgccctgtcgcctgtctccgaacgcgagcgccgagcacttggagctacgctggttccgaaagaaggtttcgccggccgtgctggtgcatagggacgggcgcgagcaggaagccgagcagatgcccgagtaccgcgggcgggcgacgctggtccaggacggcatcgccaaggggcgcgtggccttgaggatccgtggcgtcagagtctctgacgacggggagtacacgtgctttttcagggaggatggaagctacgaagaagccctggtgcatctgaaggtggctgctctgggctctgaccctcacatcagtatgcaagttcaagagaatggagaaatctgtctggagtgcacctcagtgggatggtacccagagccccaggtgcagtggagaacttccaagggagagaagtttccatctacatcagagtccaggaatcctgatgaagaaggtttgttcactgtggctgcttcagtgatcatcagagacacttctgcgaaaaatgtgtcctgctacatccagaatctccttcttggccaggagaagaaagtagaaatatccataccagcttcctccctcccaaggctgactccctggatagtggctgtggctgtcatcctgatggttctaggacttctcaccattgggtccatatttttcacttggagactatacaacgaaagacccagagagaggaggaatgaattcagctctaaagagagactcctggaagaactcaaatggaaaaaggctaccttgcatgcagttgatgtgactctggacccagacacagctcatccccacctctttctttatgaggattcaaaatctgttcgactggaagattcacgtcagaaactgcctgagaaaacagagagatttgactcctggccctgtgtgttgggccgtgagaccttcacctcaggaaggcattactgggaggtggaggtgggagacaggactgactgggcaatcggcgtgtgtagggagaatgtgatgaagaaaggatttgaccccatgactcctgagaatgggttctgggctgtagagttgtatggaaatgggtactgggccctcactcctctccggacccctctcccattggcagggcccccacgccgggttgggattttcctagactatgaatcaggagacatctccttctacaacatgaatgatggatctgatatctatactttctccaatgtcacagtcattgctaatgcccaggacctttctaaggagatcccattgtcccccatgggggaggactctgcccctagggatgcagacactctccattctaagctaatccctacccaacccagccaaggggcaccttaaggaatatctcagctcatctgttttcctttcctctaacccctctcctccatagccttctgaggcttcacctgctagctttacccagtctgtttcttcctgttgggtggcaattaattaatcctgtgaaggttacattgctgctgctagagagggtggggattgcaccttccaaatctgtttctgtaccaatatttgggggatggaggggtgactcaaactgcttctagtgttctcctaatcccttaagactagaacctataggaaactacttggagcaaactcaaaggacagattagggatcgagattgggtcaggttagcatggggttgtggttgaaatatcttggtatccaggataagggtatgtggaaaaacaggctttaggcaagtggaaaattcaaaatgtgctgtgaaaggacaatctcaggctgaaatcccataaaggaacttggagggaatattatgatggagggaagtgaggtgaatccaggcacatgatgaacacctggctcatccatagagttttcacagcctatatcgcaaattttctaagccacgtcctataggacagaggagactggccccacttctatgggtctgagctgtggaaaagggagagcagagaggaactgagatgagcagggatgaagggtcaggcagaaagcgtgatagaggagagaatttttgacaaaactcaaaagttgtttgcacagctgttctttgtaccctgttcctttctctgcgccctcctgtttctccctt

SEQ ID NO: 269297 - protein, 278 aa, Artificial Sequence
  derived and/or modified sequence
MALLPVLFLVTVLLPSLPAEGKDPAFTALLTTQLQVQREIVNKHNELRKAVSPPASNMLKMEWSREVTTNAQRWANKCTLQHSDPEDRKTSTRCGENLYMSSDPTSWSSAIQSWYDEILDFVYGVGPKSPNAVVGHYTQLVWYSTYQVGCGIAYCPNQDSLKYYYVCQYCPAMKTYLNKREGINVWKCFLRLRHFQLLRGEQLLTFSGNNMNRKNTPYQQGTPCAGCPDDCDKGLCTNSCQYQDLLSNCDSLKNTAGCEHELLKEKCKATCLCENKIY

SEQ ID NO: 269298 - DNA, 837 bp, Artificial Sequence
  derived and/or modified sequence
atggccctgctgcccgtgctgttcctggtgaccgtgctgctgcccagcctgcccgccgagggcaaggaccccgccttcaccgccctgctgaccacccagctgcaggtgcagagagagatcgtgaacaagcacaacgagctgagaaaggccgtgagcccccccgccagcaacatgctgaagatggagtggagcagagaggtgaccaccaacgcccagagatgggccaacaagtgcaccctgcagcacagcgaccccgaggacagaaagaccagcaccagatgcggcgagaacctgtacatgagcagcgaccccaccagctggagcagcgccatccagagctggtacgacgagatcctggacttcgtgtacggcgtgggccccaagagccccaacgccgtggtgggccactacacccagctggtgtggtacagcacctaccaggtgggctgcggcatcgcctactgccccaaccaggacagcctgaagtactactacgtgtgccagtactgccccgccatgaagacctacctgaacaagagagagggcatcaacgtgtggaagtgcttcctgagactgagacacttccagctgctgagaggcgagcagctgctgaccttcagcggcaacaacatgaacagaaagaacaccccctaccagcagggcaccccctgcgccggctgccccgacgactgcgacaagggcctgtgcaccaacagctgccagtaccaggacctgctgagcaactgcgacagcctgaagaacaccgccggctgcgagcacgagctgctgaaggagaagtgcaaggccacctgcctgtgcgagaacaagatctactag

SEQ ID NO: 269299 - DNA, 837 bp, Artificial Sequence
  derived and/or modified sequence
atggccctgctgcctgtgctgtttctggtgactgttctactgcccagtctccccgcagaaggaaaggaccctgctttcacagcccttctcactacccagctgcaagtccagcgggagatagtgaacaagcacaacgagctcaggaaggccgtgagtccaccagcctccaatatgctcaagatggaatggagtcgcgaagtcacaacgaatgcacaacggtgggccaataaatgtaccctgcagcactccgaccccgaggacaggaaaacatcaacccgatgtggcgaaaatctctacatgtcgagcgaccccacttcatggagtagtgctatacagtcatggtacgatgagattctggatttcgtgtacggcgtgggcccgaagtcacctaatgccgtggtcgggcattatacccagctagtgtggtatagtacataccaggtcggttgtggcatagcctactgtccaaatcaggattccttgaagtactactacgtgtgccaatactgccccgcaatgaaaacctatctcaataaacgagagggcattaacgtgtggaaatgtttcctccggttgcgacatttccaactgctacgcggggagcagttattaacattttccggaaataacatgaacaggaagaacaccccgtaccagcaaggtactccttgcgcaggatgtcctgacgactgtgacaaaggactctgtaccaactcctgccagtatcaggacctgctttccaactgcgactcactgaaaaatactgctggatgtgagcatgagttactgaaggaaaaatgcaaggccacttgcttgtgcgaaaacaagatctactag

SEQ ID NO: 269300 - DNA, 837 bp, Artificial Sequence
  derived and/or modified sequence
atggccctgctgcctgtgctcttcctggtgacagtgctgctgcccagcctgcctgctgagggcaaggaccctgccttcaccgccctgctgaccacccagctgcaggtgcagcgggagatcgtgaacaagcacaatgagctgaggaaggctgtgtccccaccagccagcaacatgctgaagatggagtggagccgggaggtgaccaccaatgcccagcgctgggccaacaagtgcaccctgcagcacagcgaccctgaggacaggaagaccagcacccgctgtggggagaacctgtacatgagcagtgaccccacctcctggagcagcgccatccagagctggtatgatgagatcctggactttgtgtatggagtgggccccaagagccccaatgctgtggtgggccactacacccagctggtgtggtacagcacctaccaggtgggctgcggcatcgcctactgccccaaccaggacagcctgaagtactactacgtgtgccagtactgcccagccatgaagacctacctgaacaagcgggagggcatcaacgtgtggaagtgcttcctgcggctgcggcacttccagctgctgcggggggagcagctgctgaccttcagcggcaacaacatgaacaggaagaacaccccctaccagcagggcaccccctgtgccggctgcccagatgactgtgacaagggcctgtgcaccaacagctgccagtaccaggacctgctgagcaactgtgacagcctgaagaacacagctggctgtgagcacgagctgctgaaggagaagtgcaaggccacctgcctgtgtgagaacaagatctactag

SEQ ID NO: 269301 - DNA, 837 bp, Artificial Sequence
  derived and/or modified sequence
atggccctgctgcccgtgctgttcctggtgaccgtgctgctgcccagcctcccagctgagggcaaggatcctgcctttaccgcgctgctgaccacacagctccaagttcagagagaaattgttaataagcacaacgaactcagaaaagccgtgtcgccacctgcctcaaatatgttgaaaatggaatggtcgcgggaagtcaccaccaacgcacagaggtgggctaacaagtgtacattgcagcactccgatccagaggacaggaaaacgtctactagatgcggagagaacctctatatgtcatctgaccccacttcttggagctctgccattcaatcatggtacgacgaaatcctcgatttcgtctatggtgtgggacctaaaagccctaatgcagttgttggacattacacacaacttgtgtggtattccacgtatcaggtcggctgcggcatcgcctactgcccaaatcaagatagccttaaatactactacgtgtgccagtactgccccgccatgaaaacctacctgaataagcgcgaagggatcaatgtctggaagtgttttttaagactgaggcacttccagcttctgcgaggagagcagcttcttaccttttccggaaacaatatgaaccggaaaaacacgccctaccagcagggaacgccatgtgccggttgcccggacgattgcgacaaggggctctgtacaaacagctgccaatatcaggacttgctgagtaactgtgacagtctgaagaatacagccggctgtgaacatgagctccttaaggaaaagtgcaaagccacctgtttgtgtgagaacaaaatctactag

SEQ ID NO: 269302 - DNA, 837 bp, Artificial Sequence
  derived and/or modified sequence
atggcacttctccccgtgctttttttggtcacggttctgctgccatccctcccagccgagggcaaggacccggctttcacggcccttctgactacccagctccaagtgcagagagaaattgtgaacaaacataacgagctcagaaaagcagtctcccctcccgctagcaacatgctgaagatggaatggtcaagggaggtcaccaccaacgcccagagatgggccaacaagtgtacactgcagcattctgatcctgaggatagaaaaacttctacccgttgtggtgagaatttgtatatgagctctgaccccaccagctggtctagtgctatacaatcttggtatgatgaaatcctcgattttgtctacggtgtgggacctaagtcaccgaacgcagtggttggccattacactcagctggtctggtactcaacttatcaggtgggttgcgggatcgcctactgtccaaaccaggactccttgaaatactactacgtctgccagtactgccccgcaatgaagacatatcttaacaagcgggaaggcattaacgtgtggaaatgtttccttagactcagacatttccagctgcttcgaggcgagcagcttctcactttctccggaaataatatgaatcgcaaaaataccccttatcagcaaggaacgccttgtgcgggatgccccgatgattgtgataagggtctgtgcacaaattcttgccagtatcaggatctcctgtcgaactgtgactcattgaagaacactgccggatgtgagcatgagctgttaaaggagaaatgtaaagccacatgtctctgtgagaacaagatctactag

SEQ ID NO: 269303 - DNA, 1439 bp, Artificial Sequence
  derived and/or modified sequence
gtggcgcctggcaagtgaacaatcgcggtgagaggggcgcgccgcagctcctcaacgccgcaacgcgccggcccaactgcaggaagggttataaaattatacaccatggccctcctaaagacactctaggaaaaccatgtcatcctgatcttaaaacacctgcaagaaagagcacagtacttcaccattagtttccagcaatggctttactaccggtgttgtttctggttactgtgctgcttccatctttacctgcagaaggaaaggatcccgcttttactgctttgttaaccacccagttgcaagtgcaaagggagattgtaaataaacacaatgaactaaggaaagcagtctctccacctgccagtaacatgctaaagatggaatggagcagagaggtaacaacgaatgcccaaaggtgggcaaacaagtgcactttacaacatagtgatccagaggaccgcaaaaccagtacaagatgtggtgagaatctctatatgtcaagtgaccctacttcctggtcttctgcaatccaaagctggtatgacgagatcctagattttgtctatggtgtaggaccaaagagtcccaatgcagttgttggacattatactcagcttgtttggtactcgacttaccaggtaggctgtggaattgcctactgtcccaatcaagatagtctaaaatactactatgtttgccaatattgtcctgcaatgaaaacatatctcaataaaagggaggggataaacgtttggaaatgttttttaaggttgagacactttcaacttctcagaggagaacaacttctcactttcagtggtaataatatgaatagaaagaataccccgtaccaacaaggaacaccttgtgccggttgccctgatgactgtgacaaaggactatgcaccaatagttgccagtatcaagatctcctaagtaactgtgattccttgaagaatacagctggctgtgaacatgagttactcaaggaaaagtgcaaggctacttgcctatgtgagaacaaaatttactgatttacctagtgagcattgtgcaagactgcatggataagggctgcatcatttaattgcgacataccagtggaaattgtatgtatgttagtgacaaatttgatttcaaagagcaatgcatcttctcccccagatcatcacagaaatcactttcaggcaatgatttacaaaagtagcatagtagatgatgacaactgtgaactctgacataaatttagtgctttataacgaactgaatcaggttgaggattttgaaaactgtataaccataggatttaggtcactaggactttggatcaaaatggtgcattacgtatttcctgaaacatgctaaagaagaagactgtaacatcattgccattcctactacctgagtttttacttgcataaacaataaattcaaag

SEQ ID NO: 269304 - protein, 174 aa, Artificial Sequence
  derived and/or modified sequence
MSTLYVSPHPDAFPSLRALIAARYGEAGEGPGWGGAHPRICLQPPPTSRTPFPPPRLPALEQGPGGLWVWGATAVAQLLWPAGLGGPGGSRAAVLVQQWVSYADTELIPAACGATLPALGLRSSAQDPQAVLGALGRALSPLEEWLRLHTYLAGEAPTLADLAAVTALLLPFRY

SEQ ID NO: 269305 - protein, 539 aa, Artificial Sequence
  derived and/or modified sequence
MATSAPLRSLEEEVTCSICLDYLRDPVTIDCGHVFCRSCTTDVRPISGSRPVCPLCKKPFKKENIRPVWQLASLVENIERLKVDKGRQPGEVTREQQDAKLCERHREKLHYYCEDDGKLLCVMCRESREHRPHTAVLMEKAAQPHREKILNHLSTLRRDRDKIQGFQAKGEADILAALKKLQDQRQYIVAEFEQGHQFLREREEHLLEQLAKLEQELTEGREKFKSRGVGELARLALVISELEGKAQQPAAELMQDTRDFLNRYPRKKFWVGKPIARVVKKKTGEFSDKLLSLQRGLREFQGKLLRDLEYKTVSVTLDPQSASGYLQLSEDWKCVTYTSLYKSAYLHPQQFDCEPGVLGSKGFTWGKVYWEVEVEREGWSEDEEEGDEEEEGEEEEEEEEAGYGDGYDDWETDEDEESLGDEEEEEEEEEEEVLESCMVGVARDSVKRKGDLSLRPEDGVWALRLSSSGIWANTSPEAELFPALRPRRVGIALDYEGGTVTFTNAESQELIYTFTATFTRRLVPFLWLKWPGTRLLLRP

SEQ ID NO: 269306 - protein, 248 aa, Artificial Sequence
  derived and/or modified sequence
MATSAPLRSLEEEVTCSICLDYLRDPVTIDCGHVFCRSCTTDVRPISGSRPVCPLCKKPFKKENIRPVWQLASLVENIERLKVDKGRQPGEVTREQQDAKLCERHREKLHYYCEDDGKLLCVMCRESREHRPHTAVLMEKAAQPHREKILNHLSTLRRDRDKIQGFQAKGEADILAALKKLQDQRQYIVAEFEQGHQFLREREEHLLEQLAKLEQELTEGREKFKSRGVGELARLALVISELEGKAQQ

SEQ ID NO: 269307 - protein, 157 aa, Artificial Sequence
  derived and/or modified sequence
MATSAPLRSLEEEVTCSICLDYLRDPVTIDCGHVFCRSCTTDVRPISGSRPVCPLCKKPFKKENIRPVWQLASLVENIERLKVDKGRQPGEVTREQQDAKLCERHREKLHYYCEDDGKLLCVMCRESREHRPHTAVLMEKAAQPHREKILNHLSTLR

SEQ ID NO: 269308 - protein, 159 aa, Artificial Sequence
  derived and/or modified sequence
MATSAPLRSLEEEVTCSICLDYLRDPVTIDCGHVFCRSCTTDVRPISGSRPVCPLCKKPFKKENIRPVWQLEKILNHLSTLRRDRDKIQGFQAKGEADILAALKKLQDQRQYIVAEFEQGHQFLREREEHLLEQLAKLEQELTEGREKFKSRGVGELAR

SEQ ID NO: 269309 - protein, 122 aa, Artificial Sequence
  derived and/or modified sequence
MATSAPLRSLEEEVTCSICLDYLRDPVTIDCGHVFCRSCTTDVRPISGSRPVCPLCKKPFKKENIRPVWQLASLVENIERLKVDKGRQPGEVTREQQDAKLCERHREKLHYYCEDDGKLLCV

SEQ ID NO: 269310 - DNA, 3499 bp, Artificial Sequence
  derived and/or modified sequence
cgggacccggaacagaccgccgtgagagaggaggggtgccggccgggattcgcggcccggagctcgggaccggagtcaggaatggagagaagggtaatggttttacctcttattgtggaaacctgttgagatcacagagaatatactgacggcataaaagggcagaaccatagcagggtgcggttgcttcattccagcctcgcagtcacctctgtgccctgctggttgtcttcccagcgctgctgtagttgccttccatggatctataggagagcaagtcctccaggagctggtggtgtctgtcgattgactgagtgctggagctggcagccctgtgcaggctgccacctttgcccctttactgtgcttgctcctgactctatgtcgcgtctccaaggagaagaagtcctcaccagtgaacggagacctctctgaactaaggataccatggccacgtcagccccactacggagcctggaagaggaggtgacctgctccatctgtcttgattacctgcgggaccctgtgaccattgactgtggccacgtcttctgccgcagctgcaccacagacgtccgccccatctcagggagccgccccgtctgcccactctgcaagaagccttttaagaaggagaacatccgacccgtgtggcaactggccagcctggtggagaacattgagcggctgaaggtggacaagggcaggcagccgggagaggtgacccgggagcagcaggatgcaaagttgtgcgagcgacaccgagagaagctgcactactactgtgaggacgacgggaagctgctgtgcgtgatgtgccgggagtcccgggagcacaggccccacacggccgtcctcatggagaaggccgcccagccccacagggaaaaaatcctgaaccacctgagtaccctaaggagggacagagacaaaattcagggcttccaggcaaagggagaagctgatatcctggccgcgctgaagaagctccaggaccagaggcagtacattgtggctgagtttgagcagggtcatcagttcctgagggagcgggaggaacacctgctggaacagctggcgaagctggagcaggagctcacggagggcagggagaagttcaagagccggggcgtcggggagcttgcccggctggccctggtcatctccgaactggagggcaaggcgcagcagccagctgcagagctcatgcaggacacgagagacttcctaaacaggtatccacggaagaagttctgggttgggaaacccattgctcgagtggttaaaaaaaagaccggagaattctcagataaactcctctctctgcaacgaggcctgagggaattccaggggaagctgctgagagacttggaatataagacagtgagcgtcaccctggacccacagtcggccagtgggtacctgcagctgtcagaggactggaagtgcgtgacctacaccagcctgtacaagagtgcctacctgcacccccagcagtttgactgtgagcctggggtgctaggcagcaagggcttcacctggggcaaggtctactgggaagtggaagtggagagggagggctggtctgaggatgaagaagagggggatgaggaggaagagggagaagaggaggaggaggaagaggaggccggctatggggatggatatgacgactgggaaacggacgaagatgaggaatcgttgggcgatgaagaggaagaagaggaggaggaagaggaggaagttctggaaagctgcatggtgggggtggctagagactctgtgaagaggaagggagacctctccctgcggccagaggatggcgtgtgggcgctgcgcctctcctcctccggcatctgggccaacaccagccccgaggctgagcttttcccagcactgcggccccggagagtgggcatcgccctggattatgaagggggcaccgtgactttcaccaacgcagagtcacaggaactcatctacaccttcactgccaccttcacccggcgcctggtccccttcctgtggctcaagtggccaggaacacgcctcctgctaagaccctgagccctgacatctgcccccagccccaaccctcagatgcttcacttctttggaattccaggactctcaatggggggacgggatgcctggcctaagcacctggagcaggggaccccatatccactggtagccacctccccattgctgtggccccctgaaatctcactcagtgctgttgctccatctactgccctaatggggctcttttcccacctcctgctggtttcccgagggaacttctgaccctggagtccatgagggctcctttcctttttgaccacgaccttggccccagctctgcactctctggaataagggcccgatgcagcattttcttgcccagtgtggcaagacctcagaaaaaccagtcaattacgcctaagatcattttgctgtccttaaaccccccaggttccttcttgcacaaatccactctgctgcccaccttccctggcattttaaacagacctaccccaccccaactcagagttaagcatacatggcaatgctgaaaataaacaaaatccactgaggcttcccaggccatttaaagcctggagtaccagcgcatatcatctcatggggtccagagtggagtccaggcttctctgaaaccagggctgagcatatttccatagccaaggaggtgggactccctggagctatctgtggtcttagggaaggatccagacatacacggctttggggtacaagctgtgatcactgatcaataaattatctctagattggtccttgtgaggggagttttaagaatccagaacatcttgctcttgatcagcacatccaaaaacaccaagacaaacatccagtggagcagaacctctcctgcctcgggagttctgaccgggttccccagcagggtgttaagcctctgtctctggccctaccagcatccaggttccactttcctaggagagagtggagatgggaagacagggaaaggaaggcagcaggaggccacaagcccaccaggtcttcatgtcaagagagggagtaacatgtcttctcattgcccacggacccaacctctgtccaggtgcccctcatcatcacagtttaacacaagctcccctgctccagccaaattgatctcccagtcttgtccttacccattccaagtgctctgccagcccctgttcatccaagttttaagtcctccaccctgttctaagagactgttccaacggctctgggcctcagtggtcacttgaccaccattgtctcagagctgcccactttgtgtgtgtcacatgctgcctgagtcacatgtacatcttatttctgcctctagttttgtaagctcctggagggcggataacatcttatactactcttgtattctcatggcacctagtgcagtgctgggcacagagtaggtgctcaataaagacttgttgaatgaaaaaaaaaaaaa

SEQ ID NO: 269311 - DNA, 1620 bp, Artificial Sequence
  derived and/or modified sequence
atggccaccagcgcccccctgagaagcctggaggaggaggtgacctgcagcatctgcctggactacctgagagaccccgtgaccatcgactgcggccacgtgttctgcagaagctgcaccaccgacgtgagacccatcagcggcagcagacccgtgtgccccctgtgcaagaagcccttcaagaaggagaacatcagacccgtgtggcagctggccagcctggtggagaacatcgagagactgaaggtggacaagggcagacagcccggcgaggtgaccagagagcagcaggacgccaagctgtgcgagagacacagagagaagctgcactactactgcgaggacgacggcaagctgctgtgcgtgatgtgcagagagagcagagagcacagaccccacaccgccgtgctgatggagaaggccgcccagccccacagagagaagatcctgaaccacctgagcaccctgagaagagacagagacaagatccagggcttccaggccaagggcgaggccgacatcctggccgccctgaagaagctgcaggaccagagacagtacatcgtggccgagttcgagcagggccaccagttcctgagagagagagaggagcacctgctggagcagctggccaagctggagcaggagctgaccgagggcagagagaagttcaagagcagaggcgtgggcgagctggccagactggccctggtgatcagcgagctggagggcaaggcccagcagcccgccgccgagctgatgcaggacaccagagacttcctgaacagataccccagaaagaagttctgggtgggcaagcccatcgccagagtggtgaagaagaagaccggcgagttcagcgacaagctgctgagcctgcagagaggcctgagagagttccagggcaagctgctgagagacctggagtacaagaccgtgagcgtgaccctggacccccagagcgccagcggctacctgcagctgagcgaggactggaagtgcgtgacctacaccagcctgtacaagagcgcctacctgcacccccagcagttcgactgcgagcccggcgtgctgggcagcaagggcttcacctggggcaaggtgtactgggaggtggaggtggagagagagggctggagcgaggacgaggaggagggcgacgaggaggaggagggcgaggaggaggaggaggaggaggaggccggctacggcgacggctacgacgactgggagaccgacgaggacgaggagagcctgggcgacgaggaggaggaggaggaggaggaggaggaggaggtgctggagagctgcatggtgggcgtggccagagacagcgtgaagagaaagggcgacctgagcctgagacccgaggacggcgtgtgggccctgagactgagcagcagcggcatctgggccaacaccagccccgaggccgagctgttccccgccctgagacccagaagagtgggcatcgccctggactacgagggcggcaccgtgaccttcaccaacgccgagagccaggagctgatctacaccttcaccgccaccttcaccagaagactggtgcccttcctgtggctgaagtggcccggcaccagactgctgctgagaccctag

SEQ ID NO: 269312 - DNA, 747 bp, Artificial Sequence
  derived and/or modified sequence
atggccaccagcgcccccctgagaagcctggaggaggaggtgacctgcagcatctgcctggactacctgagagaccccgtgaccatcgactgcggccacgtgttctgcagaagctgcaccaccgacgtgagacccatcagcggcagcagacccgtgtgccccctgtgcaagaagcccttcaagaaggagaacatcagacccgtgtggcagctggccagcctggtggagaacatcgagagactgaaggtggacaagggcagacagcccggcgaggtgaccagagagcagcaggacgccaagctgtgcgagagacacagagagaagctgcactactactgcgaggacgacggcaagctgctgtgcgtgatgtgcagagagagcagagagcacagaccccacaccgccgtgctgatggagaaggccgcccagccccacagagagaagatcctgaaccacctgagcaccctgagaagagacagagacaagatccagggcttccaggccaagggcgaggccgacatcctggccgccctgaagaagctgcaggaccagagacagtacatcgtggccgagttcgagcagggccaccagttcctgagagagagagaggagcacctgctggagcagctggccaagctggagcaggagctgaccgagggcagagagaagttcaagagcagaggcgtgggcgagctggccagactggccctggtgatcagcgagctggagggcaaggcccagcagtag

SEQ ID NO: 269313 - DNA, 1620 bp, Artificial Sequence
  derived and/or modified sequence
atggccacatcagctcctctcagatcactcgaggaagaagtcacttgtagtatttgtcttgactacttaagggaccctgtcacaatagactgtggtcatgtcttctgtaggagctgtactaccgacgtaaggcctattagtggatccagaccggtgtgtcctctctgcaagaagccctttaaaaaggaaaatattagacccgtgtggcagctggccagcctcgttgagaacatcgagcggctgaaagtagataaaggcagacagcctggagaagtcacacgtgaacagcaggacgctaagttatgcgagcgccaccgggaaaagctccactattactgcgaagatgatggcaaactgttatgtgtgatgtgcagggagtcgagggagcaccgaccacataccgccgtcctgatggagaaggccgcccagccgcatagggagaagatccttaatcacctgagcacgttgcgccgggatcgtgacaaaatccaaggttttcaggctaagggagaagcggacatactggccgctctgaaaaagctgcaggatcagcgtcagtatatagtggctgaattcgagcaggggcatcagtttcttagagaacgcgaagagcatctgctcgaacaactggccaaattagagcaggaactcactgaaggccgggagaaattcaagtctcgcggcgttggagagttggccaggctggctctggttatttctgagctcgaggggaaggcacagcagcccgccgcagaactgatgcaggatactagagactttctgaacagatacccaagaaagaagttttgggtagggaaacccattgcccgcgtggtaaaaaagaagaccggcgaatttagcgataaactgttgagtctccaaagaggtctccgcgagttccaagggaagctgctgcgtgacctcgaatacaaaactgtctctgtgacattagacccgcaaagtgcctcaggatatttacagcttagtgaggactggaagtgcgtgacctataccagtctatacaaaagcgcctatctacacccacagcagtttgactgtgagccaggagtgctggggagcaagggcttcacctggggtaaggtgtactgggaggttgaggtagagagggaaggatggagcgaggacgaagaagaaggggacgaggaagaagagggagaggaagaggaggaagaggaagaagcgggttatggggatggctatgacgactgggagacagatgaagatgaagaatctttaggggacgaggaggaagaagaggaagaagaggaggaagaagtgctggagtcttgtatggtgggggtggctagggatagcgtgaagcgcaagggtgacctgagtctacgccccgaggatggtgtgtgggcgttgaggctctcgtctagtggcatttgggccaatactagccccgaggccgagctctttccagctctgaggcccagaagggtaggcatcgcactggattacgagggaggcactgttacatttaccaacgctgaatcccaagagctcatatacactttcactgccactttcacccggcgcctggtgcctttcctgtggcttaaatggcctggcactaggctcctgcttcggccttag

SEQ ID NO: 269314 - DNA, 1620 bp, Artificial Sequence
  derived and/or modified sequence
atggccactagcgctccgttgagatccctggaagaagaggtgacgtgttcaatttgtctggactatctacgtgatccagtcacgattgactgtgggcacgttttctgcaggtcctgtacgactgacgtccgtcccatcagtggcagccgtccggtttgtcctctgtgtaagaagcccttcaagaaggagaatatcaggcctgtgtggcagcttgccagcttggtcgaaaacattgagcgcttgaaggtcgataaaggaagacaacctggggaggtgacacgggaacaacaagacgccaaactgtgtgaaagacatcgggagaagcttcactactattgcgaggacgacgggaagctgctgtgtgttatgtgtagggagtctcgcgaacatcgcccgcatacagctgtgctgatggagaaggcagctcagccgcaccgggagaaaatcctgaaccacctgagtactctccgtagagatagagataagatccagggattccaagctaagggtgaagccgatatcttggccgctcttaaaaaacttcaggaccaacggcagtacattgtagccgaattcgaacagggtcatcaattcctgcgagaacgggaagaacacttactagagcaacttgcaaaacttgagcaggagcttacggaaggaagagagaagttcaaatctagaggagtcggagagttggccaggctggcgctggtcatcagcgagctcgaaggcaaggcccagcaaccagctgctgaactcatgcaggatacccgggacttcctgaacaggtaccctaggaagaagttctgggttggtaaacccattgcccgcgttgtcaaaaagaaaaccggtgagttttctgacaagctcctgagcttgcagagaggtctgagagagtttcagggaaagctgctccgggacttagagtataagacagtctccgtgactctggatccccaatctgcttctggatacctccagctgtccgaggattggaagtgcgtaacctatacctccctgtacaagtccgcatatctgcacccacagcaatttgactgtgaacccggagtactgggatcgaagggcttcacttgggggaaggtttactgggaggttgaggtcgagcgagagggctggtcggaggacgaagaggaaggggatgaagaagaggaaggcgaggaagaagaggaggaggaggaggccggttatggcgacgggtatgacgattgggaaactgatgaggacgaagagtccctgggcgatgaagaggaggaggaagaggaagaagaagaagaagtgctggagtcttgtatggttggcgtggcccgagattcggtgaagcgcaagggtgatctttccctgagacctgaagatggcgtatgggccctgagactcagttcttctgggatctgggccaatacatcccccgaggcagagctctttcccgccctgaggccgaggagagttggcattgctttagactatgaaggcggtaccgtgacatttacaaacgctgagtcccaggagctgatttacactttcacagccacgtttaccagaagactggttcccttcttatggttgaaatggccagggacgagattactacttcgtccttag

SEQ ID NO: 269315 - DNA, 1620 bp, Artificial Sequence
  derived and/or modified sequence
atggcaacatcagcgccactccgaagcctggaagaggaagtgacttgtagtatctgcctggattacttacgtgatccggtgactattgattgcggccatgttttttgcagaagctgtaccactgacgtgcgcccaatcagcggatcaaggcctgtttgcccactgtgtaagaagcccttcaagaaggagaacatccggccagtttggcagctggcctctctcgtcgaaaatattgaaaggctgaaggtagacaaagggcggcaaccaggcgaagttactagagagcagcaagatgcaaagttgtgtgagcggcaccgcgagaagttacactactattgtgaggatgacgggaaacttctttgtgtgatgtgcagggagagccgggagcatcggccacataccgcggtgctgatggagaaggccgcgcagcctcaccgggaaaagattcttaaccatctgtcaacactgcgccgtgacagggataagatccagggttttcaagccaaaggcgaggccgacatactcgctgccctcaagaaattacaagatcagagacagtacatcgtcgccgagttcgagcaggggcatcaattcttgcgcgaaagggaggaacatctactcgaacaacttgcaaagctggaacaggaacttaccgaaggtcgggaaaagtttaaatccagaggagttggtgagctcgcccgtctggccctggtcatttctgaactcgagggaaaagcacaacagcccgcagcagagctcatgcaggatactagggatttcctgaaccgatatcctcgcaagaagttctgggtgggcaagcccatcgcgagagttgtgaaaaagaaaactggagagttttctgataagctactgtccttgcagaggggtctgcgtgagtttcaggggaagctgctgagggatctggaatacaagacggtgagtgtaacgctcgatccacagtctgctagcggatatctgcagctttcggaagactggaaatgtgtcacttatactagtctttacaagagcgcatatctccacccccagcagtttgactgcgagcccggggttctaggcagcaaggggtttacttggggtaaagtttattgggaagtggaagtggagagagaaggttggtccgaggatgaggaggagggcgacgaggaggaagagggtgaggaagaggaagaagaagaggaggcagggtatggagacgggtacgatgattgggagaccgatgaggacgaggagtccctcggcgatgaggaagaggaggaagaagaggaggaagaagaggtacttgagtcatgcatggttggggttgctcgggatagtgtcaagagaaaaggcgatctgtcactgcggccagaggatggagtgtgggccctgcgacttagttcaagtgggatttgggccaacaccagccctgaggctgagctgttccctgccctgagaccaagacgcgttggcatcgcactggactatgagggtggcaccgtaacgtttactaacgccgaaagccaggagctgatttacacattcaccgcaaccttcacaaggcggctggtaccttttctctggctgaagtggcctggcacgcggctgcttctgcgaccgtag

SEQ ID NO: 269316 - DNA, 747 bp, Artificial Sequence
  derived and/or modified sequence
atggctacctccgccccactgagatccctggaagaagaagtgacctgttccatttgcctcgactatctgagggatccggttactattgactgcgggcacgtgttttgtcgctcctgtactacagacgtaaggccaataagtggatctcggcccgtgtgtccactatgtaagaagcccttcaaaaaggagaacatcaggccggtctggcagctcgcctcgctggtggagaacatcgaaaggctgaaggtggacaaagggagacagccgggggaggtgacccgagagcaacaggacgccaagctatgtgaacgacatcgggagaagctgcactactactgcgaagacgatggaaagttactgtgcgttatgtgccgtgagagccgcgagcatcgtcctcacaccgccgtactcatggagaaggccgctcagccccaccgcgagaaaattcttaatcatctgagcaccctgcgccgtgaccgggataagattcagggttttcaagcgaaaggtgaagccgacattctggcagctctgaagaagctgcaagaccagcgtcagtacatcgttgccgagtttgaacaaggtcatcagttcctgcgggagcgggaagagcacctgctagaacagctggcgaagctggagcaggagctgacagaaggacgggaaaagttcaagtcacgcggagtgggcgaactggcccgcctggcccttgtcataagcgagctggagggcaaggctcagcaatag

SEQ ID NO: 269317 - DNA, 1620 bp, Artificial Sequence
  derived and/or modified sequence
atggccacctcagctccccttcgctctctagaggaggaagtgacttgttctatttgtctagattatctcagagatcctgtaactattgattgtggtcatgtgttctgcaggtcatgcacgaccgatgtcagacctattagcgggagccgccccgtgtgcccactctgcaaaaagccttttaaaaaggagaatatcagacctgtgtggcaactagctagccttgtcgaaaacatcgagcggctcaaggtcgacaaaggccgccaacccggcgaagtgacaagagaacaacaagacgccaagttgtgcgagcggcatcgggagaaactgcactattactgtgaggatgatggcaaactgctttgtgtgatgtgtagagagtctcgggagcaccgccctcacaccgcagtgctgatggagaaagcagcacagcctcatcgagagaagattttaaatcatctctctaccttgcgtagagatcgagacaaaattcagggcttccaagcaaagggggaagcagacatcttagccgccttgaaaaaactgcaagaccagcgacagtacatagtagccgaatttgaacagggacatcagttcctgagagagcgtgaagaacacctacttgaacaactggcgaagctcgagcaggaactgaccgaaggcagggagaagttcaagagccgaggcgttggagaacttgccaggttggccctggtaattagcgagctcgagggcaaggcacagcagccggcggctgaacttatgcaggacacgcgagatttcttgaataggtatcctaggaaaaaattttgggtgggaaaacctatcgcaagggtagtgaaaaagaaaaccggcgagttttctgataagctcttgagcctccagagaggcctgagggaattccaggggaagctgctaagggatctcgaatacaaaacagtcagcgtgaccctggatccgcagagtgcgagtggctacctacagctatctgaggattggaagtgtgtcacctacaccagcttgtataaaagcgcctaccttcatcctcagcagttcgattgtgagcccggcgtcttagggtccaagggatttacctggggcaaagtctattgggaggtcgaggtggaacgggaggggtggtcagaggacgaagaagagggggatgaagaggaagagggcgaagaggaggaagaggaagaggaggcagggtacggcgatgggtatgatgattgggaaacagacgaagacgaggagtctttaggcgatgaggaggaagaggaggaggaggaagaagaagaggtgctcgagagctgcatggtgggtgtggccagagacagtgtgaagagaaaaggcgatctttcccttcgccctgaagatggcgtatgggccctccgcctaagctccagcggcatctgggcaaatacatcaccagaggcagaactttttcctgccttgaggccccgacgagtgggcatcgccctggactacgaaggtggcactgtgacattcaccaatgctgagtcacaggagctgatttacacctttaccgcgacattcacgagacgactggtgcccttcctatggctgaagtggccaggcaccagactcttgctgcggccatag

SEQ ID NO: 269318 - DNA, 747 bp, Artificial Sequence
  derived and/or modified sequence
atggctacttccgctcccctgcggagcctggaagaggaggtaacttgcagtatttgccttgactacctgagagatcctgtgacgatcgactgcggtcacgtattttgtagaagctgtactacggacgttcgtccaatctctgggtctcgcccggtatgcccactgtgcaaaaaacctttcaagaaggagaatatcaggccggtatggcagttagcttcactggtcgagaacatagagcggctgaaagtggataagggtcgacagccaggcgaagttacccgggagcagcaggatgcaaaactgtgcgagaggcaccgtgagaaactgcactactactgcgaggacgatggtaagttgctgtgtgtcatgtgcagggagagccgcgaacaccgcccgcacaccgccgttctcatggagaaggctgcccagcctcaccgagagaagatcctgaatcacctgtcaacattgcgccgcgacagggacaagattcagggattccaggcgaagggagaggccgacattcttgccgccctcaaaaagctacaggaccaacgtcaatacatcgtggccgagttcgagcaagggcatcagttcctgcgggagagagaagagcatctgcttgagcaactcgcaaaactcgagcaagaactgactgaggggagggaaaaattcaagagccggggcgtcggcgaactcgcacggctggcacttgttatatctgaactcgaagggaaggcacagcagtag

SEQ ID NO: 269319 - DNA, 1620 bp, Artificial Sequence
  derived and/or modified sequence
atggctacaagcgcacccctcaggagtctggaagaggaggtgacatgctcaatctgcctggactaccttcgcgacccagtaacgatcgactgtgggcacgtgttctgcaggtcttgcaccacagacgttcggcccatatctggatcaagacctgtatgtcccttgtgtaagaaacctttcaaaaaagagaatatcaggcccgtatggcagctcgccagtctggtcgagaacattgaaagactgaaggtcgataagggcagacagccaggcgaggtgacacgggagcagcaggatgcgaagctatgtgagcggcatcgggaaaaactgcattattattgcgaggacgatgggaaactcctgtgcgtgatgtgccgggagagtcgagagcaccgcccccacacagccgttctcatggagaaagcagcacaaccgcatagagagaaaatacttaatcatcttagtactctgcggagagacagagacaaaattcaaggcttccaggctaaaggggaagccgatattctggctgcactgaaaaaactgcaagaccagcgacagtatatcgtagctgaattcgaacaggggcaccaattcctgcgcgagcgcgaggagcacctcctggaacaactggcaaagctggaacaagaactgactgagggacgagagaagttcaaatcacggggcgttggcgagctcgcaagacttgccctggtgatttcagaactggagggcaaggctcagcagcccgccgcggaattgatgcaggatacaagggattttctcaatcgctacccgagaaagaagttctgggtgggcaaaccaattgctagggttgttaaaaaaaaaacaggtgagttcagcgacaagctgctttccttacagagaggccttcgcgaatttcagggcaaattgcttcgtgacttggagtacaagacagtgtctgtgacattggatcctcaatcagctagcggctatctgcaattgtcagaggactggaaatgcgtaacttacacgtctctgtacaagagcgcctatctgcatccccagcagttcgattgcgagcccggggttctagggagcaagggcttcacgtggggcaaggtgtattgggaggttgaggtggagagagaaggatggtcagaggatgaggaagagggagatgaagaggaggaaggcgaagaggaagaagaggaggaggaagctggatatggcgatggatacgacgattgggaaaccgatgaagacgaagaatcgcttggcgacgaggaagaggaggaagaagaagaagaggaagaggtgttggagagctgtatggtcggtgtggccagagactccgttaaaagaaagggagacctgtctctgaggcctgaggatggggtctgggccctgaggttgagctcttccggaatttgggccaataccagccctgaggccgagcttttccccgccctcaggccccgcagggtcgggattgctcttgattatgagggcgggacagtaactttcacgaatgccgagagccaagagttgatctatacgttcacggcaaccttcacaagaaggctggtgccttttctgtggctgaaatggcctgggacccggttgcttctgcgaccatag

SEQ ID NO: 269320 - DNA, 747 bp, Artificial Sequence
  derived and/or modified sequence
atggccacaagcgccccgctgcggagcctggaggaggaggttacctgctcaatttgccttgactacctccgtgacccggtgaccattgactgtggtcacgtcttctgccgtagctgcaccacagacgtaaggccaatatccggctctcggcctgtgtgtcccctctgtaaaaagccatttaaaaaagagaatatcaggcctgtctggcagctggcttcgctcgtagaaaatatcgaacgccttaaagtcgataagggccggcagccaggcgaagtgactcgcgagcaacaggacgctaaactctgtgagcgacatcgcgaaaagttacattactactgcgaagacgacggaaagctcctgtgcgtgatgtgccgggagtccagagagcacaggcctcacactgcggtattgatggaaaaagcggcacagccccaccgagaaaagatccttaaccatctctccactctgagaagggatagggacaaaatccaggggttccaggctaaaggggaggccgatatcctcgctgccttgaaaaaactgcaggatcagcgacagtatattgtggccgaattcgagcaggggcatcagttccttcgcgagcgggaggaacatctactggaacagctcgccaagctggaacaggaactgaccgagggcagggagaaattcaaatcgaggggagtgggagaactggcccgcctggcactggttatcagcgagctcgaagggaaggctcaacaatag

SEQ ID NO: 269321 - DNA, 747 bp, Artificial Sequence
  derived and/or modified sequence
atggccactagcgctcctctgcgatctctcgaagaggaggtgacctgctctatatgtcttgactacctccgggacccagtcactattgattgtgggcacgtgttttgtaggtcctgcacgacagatgtgaggccaattagcggttctaggccggtttgtcccttgtgcaaaaagccgttcaaaaaggaaaacatccgccctgtttggcagcttgcctctttggtggaaaatatcgagcgtcttaaggttgataaagggcgccaaccaggtgaggtcacacgagaacagcaggatgcaaagctgtgtgagagacatagggaaaagctccactactactgcgaggacgatggcaagctactctgcgtgatgtgtcgagaatctcgcgagcatcggccacacaccgctgtcctcatggaaaaggcagcccagccacatagggaaaagatcctgaaccatctgagtactctccggcgagatcgcgataagatccagggctttcaggctaaaggagaggcagatatcttagctgccctaaaaaagctgcaggatcagcgacagtatatagttgctgagttcgaacaggggcatcagtttttaagggagcgagaagagcatttgcttgagcagttggctaagctggagcaggagcttactgagggaagagaaaaattcaaatctagaggtgttggcgagctggcccgcttggcgctagttatctcagaattagagggcaaagcccagcagtag

SEQ ID NO: 269322 - DNA, 1620 bp, Artificial Sequence
  derived and/or modified sequence
atggcgacctctgctcctctgaggagtctcgaggaggaggtgacgtgttccatctgcctggactatcttcgggatcctgtgactatcgactgtggccacgtattctgtcgctcctgtaccactgacgtccgaccgatcagtggcagcagacctgtgtgtcccctctgtaagaagcccttcaagaaggaaaatatacgtccggtatggcaactggcatctctggttgagaacatcgaacgtctcaaggttgataagggcaggcagcccggggaagtaacaagggaacagcaggacgccaaactatgcgagaggcacagagagaagcttcactactattgtgaggatgacggaaaactcctatgcgtgatgtgcagagaaagtcgagagcacagaccacatacagctgtcctgatggagaaagcagcacaacctcacagggagaaaatcctcaaccacctgagcactctgcggcgggatagagataagatccagggcttccaggcaaagggcgaagccgatattctggccgcgctcaagaaactgcaggaccaacgacaatatatcgttgcagagtttgagcaagggcaccaatttcttcgagagagagaggaacatctcctggagcaactagccaagttggagcaagaattaaccgagggacgggagaagtttaaatcgagaggggtaggcgagctggcaaggctggcactggtcattagcgaattggagggcaaagctcagcagccggctgccgagctgatgcaggatactcgggatttcctgaacaggtaccctaggaagaagttttgggttgggaaacctattgccagagtagtcaagaaaaaaactggggagttcagcgataagctcctgagcttacaacgcggcctgcgcgagtttcaaggaaagctgctccgggacctggaatataagactgtatcagtaacactcgacccccagtccgcctcaggctacttgcagctttccgaagactggaaatgtgttacctacacctcgctgtacaagagcgcctatctgcatcctcagcagtttgactgtgagccaggggtcctgggctctaagggctttacatggggcaaggtctactgggaggtcgaagtcgaacgtgaaggttggagcgaggacgaagaagaaggcgacgaagaagaagagggcgaagaggaagaggaggaagaagaggcgggctatggggacggatacgatgactgggaaacggacgaagacgaggagagcctgggagacgaagaggaagaggaggaggaggaggaggaggaagttcttgagagctgtatggtaggcgtggctagggactccgtcaagaggaaaggtgacctcagcctcagaccggaggacggagtgtgggctttgcggctgtcttcctccggcatctgggctaatacgagccctgaagccgagctgttcccagccctgcgccccagaagagtgggaatagctctggattacgaaggtgggactgtgacatttacaaacgcagaaagccaagaactgatctacaccttcacagctacctttacacggagactggtgccctttctgtggctcaaatggccagggacgcgactgctgctgcgaccatag

SEQ ID NO: 269323 - DNA, 1620 bp, Artificial Sequence
  derived and/or modified sequence
atggccacatccgccccactgagaagcctagaggaggaagttacatgctcaatctgtcttgactatctgcgggatcccgtgacaatagattgtgggcacgtattctgccgcagttgtactacggacgtgcggcccatttcaggcagtcgccctgtctgtcctctttgtaaaaagccttttaagaaggaaaatattcgcccagtttggcagctggcaagcctggttgaaaacatagaaaggctaaaagttgataaggggagacagcctggagaagtgacgcgggagcagcaggacgccaagctgtgtgaaagacatcgtgaaaagctgcattactactgcgaggatgatggcaagctgctgtgcgttatgtgtcgagagtccagagagcaccgaccacataccgcagtgttaatggagaaagcggctcagccgcaccgagaaaagatcctgaaccatttgtcgactctacgccgggaccgagacaagatccagggattccaggcaaagggcgaggccgatattctggctgccctcaagaagctccaagatcaacgccaatatattgtggcagaattcgagcaaggccatcagtttctgcgcgagagggaggagcacctgcttgaacagctggccaaacttgagcaagaattgacagagggcagggaaaaattcaaatctaggggagttggcgaattggccaggcttgctctggtgataagcgaactggaaggcaaggcccagcagccagcggcagagctgatgcaggacacacgggattttttaaatcggtacccaaggaagaaattctgggttggcaaacccattgcacgtgttgtgaaaaaaaagaccggggaattttcagataaactgttatcccttcagcggggtctgagggagttccaaggtaagctgctccgggacttagaatacaagacagttagtgttaccctggatcctcaatccgcgtcaggctacctccaactaagtgaggattggaaatgcgtcacatataccagcctgtataagagcgcatacctgcatccccagcaatttgactgcgagccaggcgtgctcggaagtaaaggtttcacctggggcaaagtttattgggaagtcgaagtcgaacgtgagggctggtccgaagacgaagaagaaggcgacgaggaggaggaaggggaggaggaggaggaggaggaggaggctggatacggagacggctacgacgattgggagactgatgaagacgaggagtctttaggcgacgaggaggaagaagaagaagaagaggaggaggaagtccttgagagctgcatggttggggtggctagggattccgtcaagagaaagggtgatctatctctaagaccagaggacggagtatgggcgcttcgcctttcatcatccggtatctgggcaaacactagccccgaggcggagttgtttcccgcgctgaggcctaggcgagtaggaatcgctctcgactatgagggcgggacagtgacttttaccaacgcagagagccaggagctgatttacactttcaccgccacatttaccagacgactggttccattcttgtggctgaagtggcctggcacacgcttgctgctacggccgtag

SEQ ID NO: 269324 - DNA, 1620 bp, Artificial Sequence
  derived and/or modified sequence
atggcaacatccgcccctcttcgatccttggaggaagaagtgacgtgcagtatttgcctggactatctgcgcgaccccgtcaccatcgactgcggacacgttttctgccgttcatgcaccacagacgtgcgcccaatatcggggagtcggcccgtctgccccttatgcaagaagccgttcaagaaggaaaatattagaccggtttggcagctcgcatctttggtggagaacattgagagactcaaagtagacaaggggagacagcccggcgaggtgacgcgggagcagcaggacgccaagttgtgtgagcgacatagggagaaactgcactactactgcgaggacgatggaaagctactgtgcgtgatgtgtcgggaatcacgagagcatcgtccacatacggcggtcctgatggaaaaggccgcccaaccgcacagagagaaaattttgaaccacctgagtaccctgcgtcgggacagggacaaaatccagggatttcaggctaaaggagaagctgatatattggcagctcttaaaaagctgcaggatcagagacaatacattgtcgcagagttcgaacagggccaccagtttttgagagagcgggaagagcatctgctggaacagctggccaaactggaacaggaattgactgaaggcagggagaagttcaaaagccggggtgtaggggaactggcgcgactcgccctcgtcattagcgaactagaagggaaggctcagcagccggccgccgaactgatgcaagacactcgtgattttctgaacagatatcctcggaaaaagttctgggtgggaaaacctatcgcacgtgtggtgaaaaagaaaaccggagaatttagtgataagctcctttcacttcagagaggcttgcgggaatttcagggcaaactccttcgggatctcgagtataaaacagttagtgtcacacttgaccctcaatcagcctctggctatctgcaattgtctgaggactggaaatgcgtgacgtatacatctctgtacaaatccgcctatcttcatccccagcagttcgattgcgagcctggggtcctcggaagtaagggtttcacctggggcaaagtttactgggaggtggaagtggagagagagggctggagtgaagacgaagaagagggggatgaagaagaagaaggtgaagaggaagaagaagaggaggaagcaggttatggtgacgggtacgacgattgggagaccgacgaggacgaagaaagcctgggcgacgaggaggaggaggaagaggaggaggaggaggaggttctggagtcctgtatggtcggggtggcaagggacagtgtgaaaaggaagggggatctttctctgcgtcctgaggatggagtgtgggcactccgcctgtcatccagtggaatttgggccaatacctctcctgaggcagagctcttccctgctctgagacctaggcgcgtgggaattgctctcgactatgaaggcggcactgttaccttcacgaacgccgaaagtcaagaactgatttatacattcacagccactttcacccgacgcctcgtgccattcctctggctcaagtggcctggaacccggttattactgcgtccctag

SEQ ID NO: 269325 - DNA, 1620 bp, Artificial Sequence
  derived and/or modified sequence
atggccacatcagcacccctgcggtccttggaagaggaggtcacttgctctatctgcttggattacctgcgcgacccagtgactatagattgcgggcatgtgttctgtcggagctgtactacggacgtgagacccatctcagggtccagacctgtctgcccactctgcaagaaaccattcaaaaaagagaacattaggcccgtatggcagcttgccagcctcgtggagaatatcgagcgtctcaaagtggataagggccgccagcccggagaagtaactcgggaacagcaggatgccaaactgtgcgagagacaccgagaaaagctgcactactattgcgaggacgacggcaagttgttgtgcgtcatgtgtcgggagagcagggaacatagacctcacactgcggtactcatggaaaaggcagcccagcctcaccgcgagaagatcttgaatcatctgagcacgctgagaagagaccgagataaaatacagggatttcaagccaaaggcgaggcagacatcttggctgcacttaagaagttacaggaccagaggcagtacatcgtggccgagtttgaacagggtcaccaattcctgcgagaacgtgaggagcacctcctagagcagctggccaagctagaacaggaactgaccgagggaagagagaaattcaagagtaggggtgtgggtgaattggcccgtctcgccctggtgatttcggaattggaaggaaaggcacagcagccagcggccgagctcatgcaagataccagggacttccttaatagatatccacgtaagaagttttgggtcggtaagccgatcgccagagtagttaaaaaaaagacaggggaattttccgacaagctcctgagcctccagcgcgggctgagggaatttcagggaaagttgttgcgagacctcgaatataaaacagtctctgttaccctggatcctcagagtgcaagcggctatctccagttgagcgaggactggaagtgtgtgacctacaccagcctgtataagtctgcctacctccacccacagcagtttgactgtgagcccggagtattggggagtaagggcttcacctggggcaaagtatactgggaagtggaggttgaaagagaaggctggagcgaggacgaggaggagggtgacgaggaagaagaaggggaagaggaagaggaagaagaggaggccggatacggagatggctacgatgattgggagactgacgaggacgaggaatctttgggagatgaagaggaggaagaggaagaagaagaggaggaggtgctggagagctgcatggtgggtgtcgccagagattcagtcaagagaaaaggtgatctctccttgcggcctgaggatggagtttgggcactgcggttatcctctagtggaatatgggccaatacgagcccagaagctgagcttttccctgcactgcgcccacgtcgcgtgggaattgcattggattatgagggaggaacagttactttcactaatgccgaaagtcaggagctaatctatacattcactgccacattcacccgcaggcttgttccattcctgtggttgaaatggccagggactaggttactactccgaccttag

SEQ ID NO: 269326 - DNA, 1620 bp, Artificial Sequence
  derived and/or modified sequence
atggccaccagtgcgccattgcgcagcttggaggaagaagtgacttgttcgatttgcctagattaccttcgggaccccgttaccatcgactgtggccatgtgttctgccgttcctgcactacggacgtgagacctatctcagggtccaggccagtgtgcccactgtgtaagaagcctttcaagaaggaaaatattcgtccagtatggcagcttgccagtcttgtggagaatatagagaggctgaaagtagacaaaggccggcaacccggcgaagtaacaagggagcagcaagacgccaaactatgtgagagacacagggagaagcttcattattactgcgaagacgatggaaagctcctatgcgtgatgtgtagggagtctcgtgagcacagaccccatactgccgtactgatggaaaaggccgctcagccgcatcgggagaagatcttaaaccatctgagcactttgagaagagaccgagataagatccaaggttttcaggctaaaggagaggctgacattttggctgctcttaaaaagctgcaagaccaaagacagtatattgtcgccgaatttgagcagggacatcagtttctacgagaacgggaagagcatctcctcgagcagcttgccaagctcgaacaagaattgacagaggggagggagaagtttaagtcccggggcgtgggcgagctcgctcggttggccctggtgattagcgagctggaagggaaagcacaacagcctgcggcggaactgatgcaagatacacgtgatttcctcaaccggtaccctcggaaaaagttttgggtaggcaagcccatcgcccgagttgttaaaaaaaaaaccggcgagttctctgataagttgttgtcccttcaacggggcttgagagagtttcagggcaagctgctccgcgacctggaatataagaccgtcagcgtgacgttggacccacagtctgcaagcggatatttgcaactgtctgaagactggaaatgtgttacttatacctccctttacaagagtgcttacctgcatcctcagcagtttgattgcgagcccggcgtgttgggttctaaaggcttcacctggggaaaagtatactgggaagttgaggtggagagagagggctggtccgaggatgaggaggagggggatgaagaagaagagggtgaagaggaggaggaagaagaggaggctgggtacggggatgggtatgatgattgggaaactgacgaagacgaagagagcctgggcgatgaagaggaggaggaggaggaagaggaggaagaagtgcttgagtcatgcatggttggtgttgctagagatagtgttaagaggaaaggcgacttaagcttacgccccgaagacggcgtgtgggccctgcggctgagcagctctggcatctgggccaacaccagcccggaggcagagttattccctgccctaaggcccagacgagtggggatcgcgctggactatgaagggggcaccgttacatttacgaacgcagaaagccaagaattgatctatacctttactgccacctttacacggagacttgtgcctttcttatggttgaaatggcccggaacaagactgcttttacgtccctag

SEQ ID NO: 269327 - DNA, 1620 bp, Artificial Sequence
  derived and/or modified sequence
atggctacatccgcccccttacgaagtcttgaggaagaggttacatgctctatttgcctggattacctgcgggaccctgtgaccatagattgcggacatgtgttctgtagatcctgtaccaccgatgtgaggcctatttctggatctcggcccgtgtgcccgctatgtaagaagccatttaaaaaggagaacatacgcccagtgtggcagctggccagccttgttgaaaacatcgaaaggctcaaggtggacaaggggaggcagcctggcgaagtgactcgtgaacagcaggacgctaaattatgcgagcgccaccgcgaaaaattgcattactactgcgaggatgatgggaagctactctgtgtgatgtgtagagaatcccgagaacaccggcctcacactgctgtcctcatggagaaggcagcacaaccccacagagagaagatcctgaatcatctctctactcttcgacgggatcgggacaaaatccaggggtttcaggccaagggagaggcggacattctagccgccctgaaaaaactgcaagaccagcgacagtatattgtcgccgagtttgagcagggccatcagtttttgagagaacgggaggaacacctcttggagcagctagcaaaactagagcaggaactaaccgagggacgggaaaaatttaagagccgcggggtgggtgaactggcaaggcttgctctggttattagtgaactggaaggcaaagcacagcagcctgccgccgagctcatgcaggatacccgcgatttcctcaaccggtatcctcgaaagaagttttgggtggggaagccaatcgcaagagttgtaaaaaagaagactggcgagttttccgataagctcctatctcttcaacggggtctgcgggaattccagggaaaactgttgcgggatctggagtacaaaactgtttctgtaaccttggatcctcaaagtgctagcggctacctccaactgtctgaagactggaaatgtgtgacatacacttccttgtataaaagcgcatatcttcatccccagcaattcgactgtgaacccggagtcctgggatctaagggttttacttggggcaaggtgtattgggaggttgaggtggagcgagaggggtggagcgaggatgaagaagagggagacgaagaagaggaaggtgaggaagaggaggaggaggaggaggccgggtatggggacggttacgatgattgggagacagatgaagacgaagaatcactcggcgacgaggaggaggaagaggaggaagaggaggaggaagtcctcgagtcctgcatggtcggtgtggctagggatagcgttaaacgcaagggagacttatcactgaggccagaagatggagtctgggccctacgcctgagctcttccgggatttgggccaatacctcgcccgaagccgaactgttcccagctttaaggccccgccgtgtgggcattgcgctcgactacgaaggaggtactgttacctttacgaacgcagaaagccaggaactgatatatactttcacggctaccttcactcggcgtctggtaccctttctatggctcaaatggcccgggacacgactcctcctccggccttag

SEQ ID NO: 269328 - DNA, 1620 bp, Artificial Sequence
  derived and/or modified sequence
atggccaccagcgccccactaaggtcactagaggaagaggtgacctgcagcatctgcttggattacctcagagatcctgtgaccatcgactgtggacacgtcttctgtaggagttgtaccaccgatgttaggcctatctccggatcccggcctgtttgcccgctgtgtaagaagccattcaagaaagagaatatccgacccgtgtggcagctggcctccttggttgaaaatatcgaacgactgaaagtggataagggccgccagccaggagaagttaccagagaacagcaggatgctaagctgtgcgagcgccacagggagaaactccattattactgcgaggacgacgggaagctgctctgcgtaatgtgcagagagtctcgggaacacaggcctcatacagccgtcctgatggagaaagctgcccaaccacaccgagaaaagattctaaaccatctgagtactctgagacgggaccgggataagatccaaggcttccaggcaaaaggcgaagcagatatcctcgctgccctgaagaaactgcaggaccagcggcagtatatagttgcggagttcgagcaaggccaccaattcctacgggagcgagaagaacaccttttggagcagctagccaaactggagcaggagctgacagagggcagagagaaatttaagtcacgcggggtgggagagctggcacggcttgccctcgtgataagcgagcttgagggaaaggcccagcaaccggctgccgagctgatgcaggacacaagagactttcttaacaggtatccccgcaagaaattttgggtaggcaaaccgattgcccgcgtagtcaaaaagaaaaccggcgaattttccgataagctgctgtcattacagagagggcttagagagttccagggcaaactgcttcgggacctagagtacaagacagtgtcagtgacccttgacccgcagtccgcttccggctatctgcagctgagcgaagactggaaatgtgttacatatacatccctctataagagcgcatatttgcacccacagcagtttgactgcgaacctggggtgctgggttcaaagggattcacatggggcaaggtttattgggaggtggaggtagagcgcgagggctggagtgaagacgaagaggaaggcgacgaggaggaggagggagaggaagaggaagaggaggaagaggccggctacggcgacggttacgatgactgggaaactgacgaggatgaagagtccctcggagatgaagaagaggaggaggaggaagaagaggaggaggtgctggagagctgcatggtaggggtcgctcgggactcagtcaagagaaagggggatctgtctcttaggccagaggacggagtgtgggccctgagattatcaagctccggtatctgggcgaacacgagccctgaggccgaactgtttccggccctaaggccccgcagagttggaatcgccctggattatgaaggtggaaccgtgaccttcactaatgctgagagccaggagctaatctatactttcaccgccaccttcacgaggcggctggtgccttttctgtggctaaagtggccgggaacacgacttttgctcagaccgtag

SEQ ID NO: 269329 - DNA, 1620 bp, Artificial Sequence
  derived and/or modified sequence
atggctacttcagcacctctgcgctccctcgaggaggaagtcacgtgctccatctgcttagactatctgcgcgatccagtgacaattgactgtggtcacgtgttctgccgctcctgcacaactgacgttcggccaattagtgggtcgagaccagtgtgtccgctgtgtaaaaaaccgttcaagaaggagaatattcgccccgtgtggcaactggcctcattggtggaaaatatcgagaggttaaaagtggataaaggcagacagcccggggaagtcacaagagaacagcaggatgccaaactttgcgagcgccacagggagaagttgcactattattgcgaggatgatggaaagctactgtgcgtgatgtgtagggagagcagagagcacaggccccacacggccgtcttgatggaaaaggccgcccaaccacacagggaaaagatacttaaccatttgagtaccttacggcgggacagagacaaaatccaggggttccaagccaagggggaagccgacatcttagccgctctgaagaagctgcaggatcaaaggcaatatatcgtcgccgaattcgaacagggccaccagttcctgagagaaagggaggaacatttgctcgagcagctggctaaactcgaacaggagctaaccgagggtcgggagaaattcaaatcccggggtgtcggcgagctagcgaggctcgcattagtcatcagtgaactagagggtaaggcccaacaaccagcagccgagttaatgcaggacacccgagattttctcaatagataccctcggaaaaagttttgggtgggtaagccgatcgccagagtagttaaaaagaagacaggtgaattcagtgataagttactatcccttcagcgcggcctcagagagtttcagggaaagctgctgcgcgacctggagtataagacagtgtccgtgacccttgacccacagtcagcaagcggctaccttcagctaagtgaagactggaagtgcgtcacctatactagcctgtacaaatctgcttacctgcacccacaacagttcgattgcgaacccggagtacttggtagtaagggcttcacatggggcaaagtatattgggaagtggaagttgagagagaagggtggagcgaagacgaagaggagggcgacgaagaggaagaaggtgaggaagaagaagaggaagaagaggctggctacggagacggttacgacgattgggaaacagacgaagatgaagaatcactaggcgacgaagaagaggaggaagaggaggaggaggaagaagtgctcgagtcttgcatggtcggtgtggcgcgcgattcagtcaagcggaagggcgatctgagcctcaggccagaagacggcgtgtgggcccttcggctcagcagctctgggatttgggccaacacctcgcctgaagcggagctgttcccagccctgcggccccgacgcgtgggaattgcgctggactacgagggaggtactgtgacatttaccaatgcagaatcacaggagctgatatatacatttactgcgaccttcaccaggcggctcgttccttttttgtggctcaagtggccagggactagattactcctgcgaccatag

SEQ ID NO: 269330 - DNA, 1620 bp, Artificial Sequence
  derived and/or modified sequence
atggcgacttcggcgcccctgcgctctcttgaggaggaggtgacctgcagcatttgcctggactatctacgcgaccccgtgacaatcgactgcggacacgtattttgtcggtcgtgtacgacagatgttcgcccaatatctggaagtaggccggtatgtcctctgtgcaagaagccattcaagaaggagaacatccgacctgtctggcaactcgcatcactggttgagaacatcgagagactgaaggttgataagggccgacagcctggtgaagtaacgcgtgaacaacaagatgccaaactgtgcgagaggcacagggaaaaattacactattattgcgaggacgatggaaagttgctgtgcgtcatgtgccgcgaaagccgcgagcaccggccacacacagccgtgctgatggagaaggccgcccagccccacagggagaagatcctcaatcatcttagtaccctgaggcgagaccgggataaaattcaagggtttcaggcaaaaggtgaggcagatattctagccgccttgaaaaagctgcaagaccagcgtcaatatattgtcgcagaatttgagcaagggcaccagtttctgcgcgaacgggaggaacatctgttagaacagcttgctaagcttgagcaggaactgactgaaggccgagaaaaatttaaatcgcgcggcgtgggcgagctggccagactggccctggttatctcagagctggaaggcaaggcacagcagccggccgccgagctaatgcaagatacccgggactttctgaacagatatcctcgaaagaagttctgggtaggcaaacccatagcccgcgtcgtcaagaagaagaccggcgagttcagcgataaactgttgagcctgcagaggggactgcgcgagttccagggaaagttactccgggatctcgagtacaaaacagtgtcagtcaccctggacccccaaagcgcctccggctatcttcagttgagtgaggattggaaatgcgtcacatacactagtctatacaagtcggcgtacttgcacccacagcagttcgattgcgagcctggcgtgctgggcagtaaaggctttacttggggtaaagtgtactgggaagtggaggtggaacgagaggggtggtcggaggatgaagaggagggtgatgaggaggaggagggcgaggaagaggaagaagaggaggaagccgggtatggagatggctacgacgactgggagacagacgaagatgaagaatcactgggagatgaagaagaggaggaggaggaggaggaggaagaggtgcttgagtcctgtatggtaggagttgccagggacagtgtcaaaaggaagggggatctgtcactgcggcccgaggatggtgtctgggccctcaggctatcttcttccggcatctgggccaacacatcgccagaggcagaactgttccccgcgctgcggcctcgaagagtgggcatcgctttggattacgagggcggaactgtgacttttaccaatgccgaaagtcaggagctgatttatacatttactgctaccttcactaggagacttgtcccttttttgtggttgaaatggcccggaaccaggttactgctgcgtccctag

SEQ ID NO: 269331 - DNA, 747 bp, Artificial Sequence
  derived and/or modified sequence
atggctaccagcgcaccattgcgttcattggaagaagaagtaacttgcagcatctgcctcgattatctgcgtgatcccgtgacaattgattgcgggcatgtgttttgtcgcagttgtactaccgacgtacgacctataagcggcagcagaccagtgtgtcccctgtgcaagaaacccttcaagaaggagaacattagacctgtgtggcagctcgcctcgctggttgaaaacatcgagcgcttaaaggtggacaagggccgtcaacctggtgaggtcacacgggaacaacaagacgcgaaattatgcgaaagacatagggaaaagctgcactactattgcgaggacgacgggaagcttttgtgcgtaatgtgcagggaaagcagagagcaccggcctcatactgccgtccttatggagaaagcggctcagcctcatcgggagaaaatactcaaccatcttagtaccctgaggcgcgaccgcgataagattcagggttttcaggcaaaaggtgaggccgatatcctggccgctctgaagaaactgcaggaccagcgacaatacatagttgctgaatttgagcaagggcaccaatttctaagggaaagagaagagcatctgctggagcagttagccaagttagagcaggagctgactgaaggtcgggaaaagttcaagagtagaggagttggagagctggctagactggccctggttattagcgagcttgagggcaaagcccagcagtag

SEQ ID NO: 269332 - DNA, 1620 bp, Artificial Sequence
  derived and/or modified sequence
atggctacaagcgcccctctgcggagcctagaagaagaagtgacctgttctatctgtctggactatttacgtgaccccgtgacgattgactgcggccacgtgttttgcaggtcatgcacaactgacgtcagaccaataagtggctcccgccccgtctgtccactttgtaaaaagccgttcaaaaaagaaaatatcagaccagtatggcagctggcctccctcgtggagaatatcgaaagactgaaggtcgacaaaggccgacagcctggggaggtgactcgcgaacagcaggatgctaaattatgcgaaaggcaccgggagaagctgcactattactgcgaggatgatggcaaactgctctgcgtgatgtgccgggaatctcgggaacacaggccccatacagcagtcctgatggagaaggcggcgcagccgcacagggagaaaattctgaatcacctctctactctgagacgcgatagagacaagatccagggcttccaggcaaagggagaagccgatattttagccgccctcaaaaagttgcaagatcagaggcagtacattgtcgctgaatttgagcagggacaccagtttcttagagaaagagaggaacatctgctggaacaattagccaagctggagcaggaactgactgagggtagggagaagttcaaatctcggggggtgggcgaactggctagattagcactggttatatctgagctggaagggaaggcgcaacaacccgctgctgaactgatgcaagacacccgtgatttcttgaatagataccccaggaagaaattctgggtgggcaagcccatcgcgagagtcgtgaagaagaagacaggagaattctctgacaagttactgtctctgcagagaggcctgcgggagttccaagggaagctgcttagggacctagagtacaagaccgtctctgttacactggatcctcagtccgcctctggttacctccaattgagcgaggactggaagtgcgttacttacactagcctatataagtccgcttatctgcacccacaacaatttgattgcgagcctggggtcctgggatccaaaggcttcacatgggggaaagtctattgggaggtggaagtcgaacgggaaggttggtccgaagatgaggaggaaggagatgaggaagaagaaggggaggaggaggaggaagaggaggaggccggctacggagacggttacgacgactgggagaccgacgaggatgaggaaagtctgggcgacgaggaggaagaggaggaggaggaagaggaagaagtgttggagtcctgtatggtgggagtggctagggattcagtgaagaggaagggggacctgtctttgagaccagaggacggcgtatgggcactacgactgtcttcctcgggaatttgggcaaatacgagtcctgaggctgagctgttcccggcgttgaggccccggagggtgggcattgccctcgattatgaagggggcactgtgacctttaccaatgctgagtcgcaggagctcatctatacctttaccgctacatttacccgccggctcgtcccattcctgtggctgaagtggcccggcaccagacttttactgagaccctag

SEQ ID NO: 269333 - DNA, 1620 bp, Artificial Sequence
  derived and/or modified sequence
atggccacatcagcccctctccgatcccttgaggaggaggtgacctgttctatctgcctcgactaccttcgcgatccagtcaccatcgactgcggccacgtgttctgccgctcctgcactaccgacgttcgcccaataagcggctctaggccagtttgtcctttgtgtaagaagcccttcaagaaggagaacattcgcccagtgtggcaattggcgtccctcgtggaaaatatcgagcgcttgaaagtggataagggaaggcagccaggagaagtgacacgggagcagcaggatgccaaactgtgcgaacgccacagagaaaaattgcactattattgcgaggacgacggcaaactgctgtgcgtgatgtgtagggagagccgagagcatcgcccacacaccgccgtcctcatggagaaggccgctcagccacacagagaaaagattctgaatcacctgtcaactcttaggagagacagagacaagatccaaggatttcaggctaagggagaggctgacatcttagccgctcttaaaaagctgcaggatcagagacaatatatcgtggctgagtttgagcaaggtcatcagttcctccgcgaacgagaggaacacctgttggaacagctggctaaattggaacaggagttgacggaggggcgggagaaattcaaaagccgaggcgtcggcgagttggctaggctggcactggtgatctccgagcttgagggaaaggctcaacaaccagccgccgaactgatgcaggatactcgggactttctgaaccgatacccccgcaagaagttctgggtcgggaaacctatcgcacgcgtggtgaagaagaagactggcgaatttagcgacaaactgttgagcttgcaacgggggctccgggaatttcagggaaaactcctgcgcgatctcgaatacaagactgttagtgtcacactggatccccagtctgcatccggctatcttcagctatccgaagattggaagtgcgtgacctatacttcgctgtacaagtcagcatacctacacccccagcagtttgactgcgagcccggcgtgcttggctccaaagggttcacctggggtaaagtgtactgggaggttgaagtggagcgggagggatggtctgaagacgaagaagaaggagatgaagaagaagagggcgaagaggaggaggaagaggaggaggcgggttacggcgacggttacgatgactgggaaaccgatgaggatgaggagtccttgggggatgaggaggaagaagaggaggaagaggaagaggaagttctggagtcttgcatggtaggagtggctagagactcggtgaaaaggaagggcgacctgtcattgaggccagaggatggcgtgtgggctctgaggctgtcatcctcaggaatttgggctaacactagtcccgaggctgagctgttcccagccctgcgaccccgaagggtgggcattgctttagattacgaaggcgggaccgtaacatttacaaacgctgagtcccaggaattaatttacacattcacggccaccttcacacgcaggttggtgccattcttgtggctgaagtggccaggaacccggctactgttgcgcccatag

SEQ ID NO: 269334 - DNA, 1620 bp, Artificial Sequence
  derived and/or modified sequence
atggctacatctgccccgctccgtagtcttgaggaggaggtcacatgctccatatgcctagactatctgagagatccagtgacaatagattgcggacacgtcttctgcaggtcatgcacaactgatgtccggcccatctcagggagccggcccgtctgtcctttgtgtaaaaagccctttaaaaaagaaaacatcagaccagtttggcagctggcatctctggttgagaatatcgagcggctgaaggtagacaaagggaggcagcccggagaagtgacccgtgaacagcaggacgcaaagctgtgcgagcgacatcgcgaaaaactgcactattattgtgaagatgatggaaagctcctctgcgtcatgtgcagagaatcgagggagcacaggccccataccgctgttctgatggagaaagctgcccagccacacagggaaaagatactgaaccacctgtcaactctccggagggatcgagataagatacagggctttcaggcaaagggggaagccgacatcctggcagctctgaaaaagcttcaagaccaacgacagtacatagtggcagagttcgagcagggacatcaattcctccgggagagggaagaacatctgctggagcagctcgccaagctggagcaggagctgactgagggcagggaaaagttcaagtctcgaggggttggagagctggctcgtctggctctggtgatctccgagttagaaggcaaggctcagcagcctgccgctgagctcatgcaggatacaagggatttcttgaacaggtacccgcgaaagaagttctgggtgggaaagcctattgcaagagtggtgaagaaaaaaactggagaattcagtgataagctgctgtcactgcagcgcggattgcgggagtttcagggcaaactgctgagagatttggagtacaagaccgttagtgtaacccttgacccccagtcagcctctggttatttgcagctgtcagaagactggaaatgtgtgacttatacctctctatacaaaagcgcttatttgcacccacaacagttcgattgcgagcccggtgttctgggttccaaaggctttacctggggaaaagtttactgggaagtggaagtcgaacgtgaaggatggagcgaggatgaagaggaaggagacgaggaggaagagggtgaggaggaagaagaggaagaggaagccggttacggcgatggatacgatgactgggagactgatgaagatgaggagagccttggcgatgaggaagaggaagaggaggaagaagaagaggaagtgctggagagctgcatggtaggagtggcacgcgattctgtaaagcgcaagggggacctaagtcttcgcccagaggacggcgtctgggccttgcgactgtcatcttcaggtatttgggcaaacacctctccggaagctgagctatttcccgctttgaggcctcggagagtcgggattgcactggactatgaaggggggacagtgaccttcaccaacgccgagtctcaggaattgatctacacttttacagcaacttttacaagacgcctggtgccatttctatggctgaaatggcccggcacaagacttctgctcagaccttag

SEQ ID NO: 269335 - DNA, 747 bp, Artificial Sequence
  derived and/or modified sequence
atggctacgagcgcccccctgagaagcctggaggaggaagtgacttgcagtatatgtcttgattacctgcgtgatcctgtcactatcgactgtgggcacgtgttctgtcggtcatgcactacagacgtgcggcctatcagtggttcgcggccagtctgccctctgtgcaagaagccattcaagaaggagaatattcgacccgtctggcagctggcatccctagtcgaaaatattgagcgactgaaggtagataagggcaggcagcccggagaagtgacccgcgagcagcaagatgcaaaactatgtgagcggcacagagagaaactgcactattactgcgaagacgacggaaagcttctttgtgttatgtgtcgggagtcaagggagcatcggccccacaccgccgtgcttatggagaaagctgcacagccgcatagggagaagattctgaatcatctttctaccctacgccgggacagagataaaattcaggggttccaggccaaaggcgaagccgatatcttagcagccctgaaaaaactacaggatcagagacagtacatcgtggccgagtttgagcaagggcaccagtttttgagagagagagaagagcacctgctagaacaactggctaaactcgagcaggagctgactgaagggcgggaaaagtttaaaagtcggggggttggagaattggcgcggcttgccctcgtcatcagcgagctggaaggtaaagctcagcaatag

SEQ ID NO: 269336 - DNA, 747 bp, Artificial Sequence
  derived and/or modified sequence
atggccactagcgctcccctgagaagtcttgaagaggaagtcacttgctctatctgtttggactatcttagggatcccgtgaccatcgattgcggccatgtcttctgccgaagctgcactactgacgtcagacctatttccggcagtcgacctgtatgtcctctgtgcaagaagccttttaaaaaggaaaatattcgaccggtgtggcagctggcatcactggtggagaacatcgaaaggctcaaggtagataagggccggcaacccggagaagtgactcgcgagcaacaggatgcaaagctttgcgagcggcaccgcgaaaagctgcactactactgtgaagacgacggcaaactgctgtgcgttatgtgtagagaatcaagggagcatcggcctcacaccgctgtgctgatggagaaagccgcccaaccccaccgggaaaagatcctgaaccacctgtcaaccctgcgccgggatcgagataaaatacagggattccaggccaagggagaggccgatattctggcggcccttaagaaactccaggaccagaggcaatacatcgtcgctgaattcgagcagggtcatcagtttctccgggagcgggaggagcatttacttgaacagcttgccaagctggagcaggagctgaccgaaggaagagagaagttcaagagcaggggtgtgggtgagctcgcgcgcctggctctcgtgatcagtgagctggagggcaaggcacagcagtag

SEQ ID NO: 269337 - DNA, 1620 bp, Artificial Sequence
  derived and/or modified sequence
atggctacatctgccccactgaggtctctcgaagaggaagtgacttgttctatctgtttggactacctcagagatcctgtgaccattgattgtggacacgttttctgccgcagctgcacaacagacgttcgcccaatttctggttcaagacctgtctgtccgctgtgcaagaagcccttcaagaaggagaatatcagacctgtgtggcagctcgcgtccttagtggaaaatattgagagactgaaagtagacaaggggagacaaccgggggaggtcaccagagagcagcaagacgctaagctctgtgagcgccacagggagaaactgcactactactgtgaagatgatggtaaattgctatgtgtaatgtgtcgtgagtctcgggagcatcgtcctcacacagcagtgctgatggaaaaggcagctcagccccatcgtgaaaagatcttaaaccacctctctaccctgaggagggacagagacaagatccagggctttcaggccaagggagaggctgacatcctcgctgcactaaagaaattgcaggaccagcggcagtacattgtagccgaattcgagcagggccatcaattccttagggagcgggaggaacatttgctggaacagctggcgaaattggagcaggagctcactgagggacgggaaaagtttaagtctcggggagtcggggagctggcgcgcttggcactggttataagcgaactggaagggaaggctcagcagcctgctgccgaactgatgcaggatactcgggacttcctgaatcggtatccccggaagaagttttgggtcgggaagccaattgccagagtggtgaagaagaagactggtgaattttctgataagttgctttccctgcaacgcggcctaagagagtttcagggtaaacttctccgcgatctcgaatataagaccgtcagtgtcacacttgacccccaatccgcatccggctatctgcagctgagcgaggactggaaatgtgtaacgtatacaagtctgtacaagagcgcgtacctgcacccacagcagttcgactgtgagccaggcgtgttgggctctaaggggtttacttggggtaaagtgtactgggaggtcgaagtggagcgtgaggggtggagcgaagatgaagaggagggcgacgaggaagaggagggtgaggaggaggaagaagaggaagaggccgggtatggcgatggttatgatgactgggagaccgacgaagacgaagagtccctaggcgatgaggaagaggaagaggaggaagaggaagaggaggtcctagagtcatgtatggtgggcgtcgcccgggacagcgtgaaaaggaaaggtgatctgagtctccgacccgaggacggggtatgggcgctgagattgtcttcctcaggcatctgggctaatacgtcacctgaggcggaactctttcctgcactgcgccctcgcagggtgggaatcgcgctagactacgaaggcggtacggtgacgtttacaaacgctgagagccaggaactgatatacacctttacagctactttcactcggaggctggtacccttcttgtggctgaaatggccagggacgagactattactaaggccttag

SEQ ID NO: 269338 - DNA, 747 bp, Artificial Sequence
  derived and/or modified sequence
atggcaacgtccgctcctctgcggtctctcgaggaagaagttacctgttctatatgcctcgattatcttcgcgacccagtgacaattgactgcggacacgtcttctgtcgcagctgcaccacagatgtcaggccgatctctggatcacggccagtgtgcccactctgtaaaaaacccttcaaaaaagaaaacattcgtcccgtctggcagttagcctccctggtcgaaaatatcgaacgcttaaaggtggacaaaggtcggcagcccggagaggtgacacgcgaacagcaggacgctaaactatgcgagagacatagagagaagctgcactactattgtgaggatgacggtaaattactctgtgtcatgtgccgggaaagtcgcgaacaccgccctcacacagcagtgctgatggagaaggctgcgcaaccccaccgggaaaaaatcctgaaccacctttcaacactgcgtagagatcgtgacaagatccaaggcttccaagctaaaggggaggccgatatcctcgccgcacttaaaaagttgcaggaccagcgccagtatattgtggcagaatttgagcaaggtcaccagtttctgcgggagagggaggagcatctgctggaacaactcgccaaactggagcaggaactcacagagggccgtgagaagttcaaatctcggggagtgggcgagttagcgaggctggctctggtgatctctgaactcgaaggtaaagcccaacaatag

SEQ ID NO: 269339 - DNA, 1620 bp, Artificial Sequence
  derived and/or modified sequence
atggccaccagcgcccctttgcgaagcctggaagaagaagttacttgttcaatttgcctggactatcttagagaccccgtaaccatcgactgtggacatgtgttctgccggtcctgtacaacggacgtgaggcctattagcggctctcgccctgtgtgtccgttatgcaagaagccattcaagaaggagaacatacgtcctgtgtggcagcttgccagcctcgttgagaacattgagcgtctcaaggtggacaaaggtcgccagcccggagaggttacaagagagcaacaggatgccaaactctgcgaacgtcaccgcgagaagctgcactactactgcgaggatgacggaaagttgttgtgcgtgatgtgccgcgagtcaagggagcaccgcccacatacagccgtgctaatggagaaggccgctcaacctcaccgcgagaaaatcctgaatcacctctcaacattgcgacgcgaccgcgacaaaatccaggggtttcaggcaaaaggtgaggctgatatcttggctgctctcaaaaagctgcaggaccagaggcagtacatcgtcgctgagtttgagcagggacaccagttccttcgggagcgcgaggagcatctcctggaacagctggccaagctcgaacaggaacttacggagggaagagagaaattcaaatcacgtggcgtcggcgagctggcccgactggcattggttatttctgaacttgaggggaaggcgcagcagcctgccgcagaactgatgcaggacacccgggacttcctgaatcggtaccctcgaaagaagttctgggtgggaaaacctatagctagggtcgttaaaaaaaagacgggagagttcagcgataagctgctctcattgcagcgtggacttagggagttccaaggcaagcttcttcgggatcttgagtataaaaccgtgtcggtgacacttgatcctcagtccgccagcggctacctccagctcagtgaggactggaagtgcgttacatacacctccctctataagagtgcttatcttcacccacagcagtttgactgcgagcccggcgtgcttggcagcaagggtttcacatggggcaaggtgtactgggaggtggaagtagagcgagaggggtggtcggaagatgaagaggaaggagatgaagaagaggaaggggaagaggaggaagaagaggaagaagccgggtatggagacggttatgatgattgggagactgatgaggatgaagaaagcctgggggatgaagaggaagaggaagaggaggaagaagaggaagtgctggagtcctgcatggtcggtgttgcccgcgatagcgtgaagcgcaaaggagacctttccttgcgccctgaagatggcgtgtgggctttgaggctgtcgtccagtggcatatgggcaaatacctccccagaggccgagctgtttcccgccctcaggcctagacgggtgggaatcgctctggattatgaaggcggcactgtgacttttaccaatgccgagagccaagagctgatctacacatttactgcaacgttcacccgtagactggtgccattcctttggctcaaatggcctgggacgcgtttattgcttcggccatag

SEQ ID NO: 269340 - DNA, 1620 bp, Artificial Sequence
  derived and/or modified sequence
atggccacaagcgcccccctcagatctcttgaagaggaggtgacatgttctatctgcctcgactacctgcgcgacccagtgacaatcgattgcgggcatgtgttttgtcgatcatgcactacagatgtgaggcctatttcaggttcaaggccagtgtgtcccctgtgcaaaaaaccctttaaaaaagaaaacatcaggccggtgtggcaactggctagtctggtggagaacattgaacgcctgaaggtagacaaaggcaggcaacctggtgaggtcacacgcgagcagcaagatgcgaaattatgcgagcggcacagagagaagctgcactactactgcgaagatgatgggaaactcttatgtgttatgtgtagggagagcagagaacatcgaccacacacagctgtcctcatggagaaggctgcacagccccaccgcgagaaaatccttaaccatctgtccacccttcgccgcgaccgggacaagatacaggggttccaggctaagggagaagcagacattctggcagccctgaagaagttacaggatcaaaggcagtacatagttgcggagttcgagcaggggcaccagtttctgagagagagggaggagcacctgctcgagcagctagccaagttggagcaggaactaaccgaggggcgcgagaaattcaaatctcgcggagtcggagagctagccagactggctctggtcataagcgagctggaaggcaaagcccagcagcccgcagccgaactcatgcaggatacccgggattttctgaatcgatacccccggaaaaagttttgggttggaaagccaatagcacgggtcgtaaagaagaaaaccggagagttctctgacaaactcctaagcttacaaagaggactgagagaatttcaggggaagctgctccgagatctagaatacaaaacagtgagcgttacacttgaccctcagagtgcctcaggataccttcaattgtcagaggactggaaatgtgtcacatataccagcttgtacaagagtgcctacctccatccgcaacagtttgactgcgaacctggggtccttggaagtaaaggtttcacttggggcaaggtgtactgggaggtggaggtggagcgggagggctggtccgaggacgaggaagagggtgatgaggaggaagagggcgaggaagaggaagaagaggaagaggcaggttatggcgacgggtatgacgactgggagacagatgaggatgaagaatccttgggcgatgaagaagaggaagaagaggaggaagaggaggaagtattggaaagttgcatggtcggagtggcaagagatagcgtaaaaagaaagggagatctcagtctccgccccgaagatggcgtgtgggctctgcggttgtcttcaagcggcatctgggccaatacaagcccagaggccgagttattcccagcactccggccacgccgggttgggattgccctagactacgaaggcgggaccgtcacttttaccaatgccgagtctcaagaactgatttatactttcaccgccactttcacaaggcgtctcgtgcctttcctgtggctgaagtggcccggaacacgcctcctgctacgtccgtag

SEQ ID NO: 269341 - DNA, 1620 bp, Artificial Sequence
  derived and/or modified sequence
atggctacttcagcacctctccggtccctggaagaggaagtaacctgctcaatctgtcttgactaccttcgggaccccgtaacgattgactgtgggcacgtgttctgccggagctgtaccaccgatgtgaggcccatctccggcagccgcccggtgtgtccactatgtaagaagcccttcaagaaggagaatatccgtccagtatggcagttagccagcctcgtcgagaatatcgagaggctgaaggtggataagggcagacagcccggcgaggtgactcgcgaacaacaggacgcaaaattatgcgagcggcacagagaaaagctccactactactgcgaggacgacggaaagctgctctgcgtcatgtgccgagaatcacgcgaacaccgcccccacaccgcagtgcttatggaaaaggctgcacagcctcaccgcgaaaagattctcaaccacctgtccacattgcgcagagatagagataaaatccagggcttccaggccaaaggagaggccgacattcttgctgccctgaagaaactccaagaccagaggcaatatattgtagccgaattcgagcaagggcaccagtttttacgtgagagagaggagcacttgcttgagcagcttgcaaaactggaacaggagctaactgaggggcgcgaaaaattcaaaagtcgaggcgttggtgaattggcgcgtttagcactggtcatctctgagctggaaggaaaagctcagcagccggctgccgagctgatgcaggacacgcgcgacttcttaaatcgctacccgaggaagaaattctgggtcggaaaacctatcgctagggtcgtcaagaagaaaaccggcgagtttagcgataaacttctaagtttgcagagggggctgagggaattccagggaaagcttctgagagatctggagtacaaaaccgtgtcggtcactctggacccccaaagtgcatctggctatcttcagctgtccgaggattggaaatgtgtaacctacactagtctttataaaagcgcgtacctgcatccgcagcagttcgactgtgagccgggcgtcttgggctctaaggggttcacttggggcaaggtttattgggaagtggaagttgaaagagagggatggtctgaagacgaggaagagggagatgaagaggaggagggtgaagaggaggaggaggaggaagaagctggttatggtgacggatacgatgactgggaaacagacgaagacgaggagtctcttggagacgaagaagaggaagaggaagaggaggaggaggaggtgctggagagttgcatggtcggagttgcacgcgacagtgtcaagcggaagggcgatctgtccctgaggccagaggacggcgtctgggccctgcgactgagctccagtggaatttgggccaacacctcacctgaagcagaactgtttcccgccctgcggcctcggagggtgggaatcgcattggattacgaaggtggcactgttactttcaccaacgccgagtcgcaggagctcatttacacatttaccgcgaccttcactcggaggctggtcccattcctgtggctgaagtggccgggcacccgtctcctcttgcgaccatag

SEQ ID NO: 269342 - DNA, 1620 bp, Artificial Sequence
  derived and/or modified sequence
atggcaaccagtgctccactccgatcgttggaggaggaagtgacgtgcagcatatgtctagattacctacgggatcccgtgacaatcgactgtggacacgtgttctgcagatcctgtactacggatgtcagacccatcagcggcagtagaccggtgtgtccactgtgcaagaaacccttcaaaaaggagaacatccgccccgtgtggcaacttgcttcacttgtggaaaacatcgagcgtctgaaggttgataaaggtagacagcctggagaggtgacacgcgagcaacaagatgccaaactttgcgagcgccaccgagagaaactgcactattactgcgaagacgatgggaaactgctgtgtgtgatgtgccgggaatcacgtgagcatcggccgcacactgccgtcttaatggaaaaagccgctcagccccatagggagaaaatactcaaccacctgagtacgttgagaagagatcgggacaaaatccagggatttcaggccaagggggaagccgacattctggccgcgctgaaaaaattacaggatcaacggcaatatatcgtcgcagaattcgaacaaggccatcagttcttgagggaaagagaggagcacctgcttgagcagctggccaagctcgagcaagaactgactgagggcagggaaaagttcaaatctcggggggttggggaattagcaagacttgcgcttgtcatcagcgaattagagggcaaggcccagcagccagctgccgaactgatgcaggataccagagactttctgaaccgttacccccgtaaaaagttctgggtggggaagcccattgccagggtcgtgaagaaaaagacaggtgagttctccgacaaactgctgagcctgcagcgtggtctcagggaattccagggtaaacttcttagagaccttgaatataagaccgtctctgttacactcgatccacaaagcgcttccggatatctccaactgagtgaagactggaagtgcgtgacctacacttctctgtacaagagcgcatatcttcatccccagcagttcgactgtgaaccaggagtcctgggaagtaagggttttacatggggaaaagtgtactgggaggtagaggtggaaagggaagggtggagcgaagacgaggaagagggagatgaagaggaggagggtgaagaagaagaggaggaagaggaagcaggatacggagatggatatgatgattgggagacggacgaagacgaggagagcctgggcgatgaggaggaggaggaagaagaagaagaggaggaggtgttagagtcttgtatggttggtgtggcaagggatagcgtcaagcgtaaaggagatttaagtctgcgccccgaggacggggtgtgggctctgcgactgagcagttccggcatctgggcgaacacctcccctgaagctgaactctttcccgccctgaggcctaggcgcgtgggcattgctctagactacgaaggtggcaccgtgacctttactaatgccgaatcccaggagctgatatacacattcacagcaacattcacccgacgcttggtgccatttctgtggctgaaatggccaggtacccgtctcttgctaagaccatag

SEQ ID NO: 269343 - DNA, 1620 bp, Artificial Sequence
  derived and/or modified sequence
atggccacctccgcccccctacgttccttggaggaagaggtgacatgctcaatttgcctagattacctacgcgatcctgtaacaattgattgtggccacgtgttctgtaggtcctgcacaaccgatgtccggccaatatctgggagccgaccagtctgcccgttgtgcaaaaaacccttcaagaaggagaatatacgccccgtttggcagctggcaagtcttgtggagaacatcgagagactgaaggtcgataaagggcgtcagcctggagaggtcacaagagagcagcaggacgcaaaactatgtgagcggcacagagagaaactccattattactgcgaggacgacggcaagcttctgtgcgttatgtgtagagaatcacgtgagcatcggcctcatacggccgtcttaatggagaaggctgctcaaccacatcgagagaaaatcctcaatcacctgagcaccctccgaagggatcgcgataagatccaggggtttcaggccaagggcgaggccgacatcctagccgcactgaaaaagctgcaagaccagcgtcagtatatcgtggccgagttcgaacagggccatcaattcctaagggagagagaggaacatcttcttgagcaactcgccaaacttgagcaggaactgacagaggggcgggagaaattcaagagccgcggcgtgggcgagctcgcacgtctcgctcttgtaatatctgaactcgagggaaaggctcagcagccagctgcagagctgatgcaggacacacgggatttcctcaatcgttacccccgcaaaaaattctgggtgggtaaacccatagcccgcgttgtgaagaaaaagacaggagagttcagcgataaactactgtctctccagaggggattgagagaattccaaggaaaactcctgcgtgatttggagtacaaaaccgtgtcggtgactttggacccccagagcgcatcaggttacttgcaactctctgaggattggaagtgtgtgacatatacatcattatataagagcgcctaccttcaccctcaacaattcgattgcgaaccgggagttttgggatctaagggatttacgtggggcaaagtgtactgggaagtggaggtggagcgtgagggctggagtgaagacgaggaggagggcgatgaagaagaggagggcgaagaagaagaggaggaggaagaagccggctacggcgacgggtatgacgattgggagacggacgaagatgaagagagcctaggcgacgaggaggaggaggaggaggaagaggaagaagaggtcttggagtcctgtatggtcggtgttgcccgggacagtgtaaaacgaaagggagacctttcccttcgacccgaagatggcgtgtgggccctgcgattgtccagcagcggcatttgggcaaatacatcccccgaggccgagttgtttcctgctctgcgcccccggagagtgggtatcgccctggactacgaaggcgggactgttacattcacaaatgccgaaagtcaagagctgatttatacctttacggctacctttactaggcgattggtgcctttcctgtggctgaagtggcccgggactcggttgctgttgagaccctag

SEQ ID NO: 269344 - DNA, 1620 bp, Artificial Sequence
  derived and/or modified sequence
atggcaacatcagctcccctccgctccttagaggaggaggtgacatgctccatttgtcttgactacttacgggaccctgtgacaattgattgcggacatgtattctgtcgtagttgtactactgatgttcgtcccatatccggcagtcgccccgtttgtcccctctgcaagaaacccttcaaaaaagagaatatccgtcccgtgtggcagctagcgagcctggtcgagaacatagagcggctgaaggtggacaagggcaggcagcctggtgaggtcaccagagagcagcaagatgcaaaactctgcgagcggcatagggaaaaactccactattattgcgaggacgacggtaaactgctctgcgtgatgtgcagagaatcaagagaacacaggccgcatacagcggtgctcatggagaaagcagcacagccacatagggaaaagattttaaatcatctgagtaccctcagacgggatcgggacaagatccaaggcttccaagcgaaaggagaggccgatattcttgcagcactgaagaagcttcaggatcaacggcaatacatagttgcagaatttgagcagggtcatcagtttcttcgggagcgcgaggaacatttgcttgagcagctggcgaagctcgagcaggagcttacagaggggagggagaagtttaagtcacgcggagtaggcgagctggctcggctggctctcgtgatttcggagctggaaggaaaggcccagcagcccgctgctgagctgatgcaggatactcgtgactttttgaatcgatatccgaggaagaagttttgggtggggaaacctattgcccgggtggttaagaagaagaccggtgagttctccgacaaactcctgtcactccaacgggggctgagagaattccagggtaagcttttaagagacctcgagtacaagacagtgtctgtgactctggatccacagtccgcgagcggctacctgcagctcagtgaagactggaagtgcgtgacttacacctcgctctataaaagtgcttacctgcatccacagcagtttgattgcgagcctggcgtgctgggaagcaaaggcttcacctgggggaaggtgtattgggaagtcgaggttgagcgggaaggatggtccgaagatgaggaagagggtgatgaagaggaagaaggagaagaggaagaggaggaggaggaagcaggatacggcgacggatatgacgactgggaaacagacgaggatgaagagagcctgggagatgaagaggaagaggaagaagaggaggaggaagaggtgctggagtcatgtatggttggggtagcccgagatagcgtaaagcgtaagggggatcttagcctgcggccagaagacggggtatgggccctcagactttcttcttcaggcatttgggctaacacaagtcccgaagccgagttgttccccgccctcagaccgcggagagtgggaatcgccttagactacgaagggggaacagtcacgttcactaatgcagagtctcaggaacttatttataccttcacggcaactttcactaggcgtttagtgcctttcctctggctgaagtggcccggaactcggcttcttctgagaccctag

SEQ ID NO: 269345 - DNA, 1620 bp, Artificial Sequence
  derived and/or modified sequence
atggccaccagcgcccccctgcggagcctggaggaggaggtgacctgcagcatctgcctggactacctgcgggaccctgtgaccatcgactgtggccacgtgttctgccgcagctgcaccacagatgtgcggcccatcagcggcagcaggcctgtgtgccccctgtgcaagaagcccttcaagaaggagaacatccggcctgtgtggcagctggccagcctggtggagaacatcgagcggctgaaggtggacaagggccggcagcctggagaggtgacccgggagcagcaggatgccaagctgtgtgagcggcaccgggagaagctgcactactactgtgaagatgatggcaagctgctgtgtgtgatgtgccgggagagccgggagcaccggccccacacagctgtgctgatggagaaggccgcccagccccaccgggagaagatcctgaaccacctgagcaccctgcggcgggaccgggacaagatccagggcttccaggccaagggggaggccgacatcctggccgccctgaagaagctgcaggaccagaggcagtacatcgtggccgagtttgagcagggccaccagttcctgcgggagcgggaggagcacctgctggagcagctggccaagctggagcaggagctgacagagggccgggagaagttcaagagccggggcgtgggggagctggcccggctggccctggtgatcagcgagctggagggcaaggcccagcagcctgctgctgagctgatgcaggacacccgggacttcctgaaccgctaccccaggaagaagttctgggtgggcaagcccatcgcccgggtggtgaagaagaagacaggagagttcagtgacaagctgctgagcctgcagaggggcctgcgggagttccagggcaagctgctgcgggacctggagtacaagacagtgtctgtgaccctggacccccagagcgccagcggctacctgcagctgtctgaggactggaagtgtgtgacctacaccagcctgtacaagagcgcctacctgcacccccagcagtttgactgtgagcccggggtgctgggcagcaagggcttcacctggggcaaggtgtactgggaggtggaggtggagcgggagggctggagcgaagatgaggaggagggagatgaggaggaggagggggaggaggaggaggaggaggaggaggccggctatggagatggctatgatgactgggagacagatgaagatgaggagagcctgggagatgaggaggaggaggaggaggaggaggaggaggaggtgctggagagctgcatggtgggcgtggcccgggacagcgtgaagaggaaaggagacctgagcctgcggccagaagatggagtgtgggccctgcggctgagcagcagcggcatctgggccaacaccagccctgaggccgagctgtttcctgccctgcggcccaggagagtgggcatcgccctggactatgaaggaggcaccgtgaccttcaccaatgctgagagccaggagctgatctacaccttcaccgccaccttcacccggcggctggtgcccttcctgtggctgaagtggccaggcacccggctgctgctgcggccctag

SEQ ID NO: 269346 - DNA, 747 bp, Artificial Sequence
  derived and/or modified sequence
atggccaccagcgcccccctgcggagcctggaggaggaggtgacctgcagcatctgcctggactacctgcgggaccctgtgaccatcgactgtggccacgtgttctgccgcagctgcaccacagatgtgcggcccatcagcggcagcaggcctgtgtgccccctgtgcaagaagcccttcaagaaggagaacatccggcctgtgtggcagctggccagcctggtggagaacatcgagcggctgaaggtggacaagggccggcagcctggagaggtgacccgggagcagcaggatgccaagctgtgtgagcggcaccgggagaagctgcactactactgtgaagatgatggcaagctgctgtgtgtgatgtgccgggagagccgggagcaccggccccacacagctgtgctgatggagaaggccgcccagccccaccgggagaagatcctgaaccacctgagcaccctgcggcgggaccgggacaagatccagggcttccaggccaagggggaggccgacatcctggccgccctgaagaagctgcaggaccagaggcagtacatcgtggccgagtttgagcagggccaccagttcctgcgggagcgggaggagcacctgctggagcagctggccaagctggagcaggagctgacagagggccgggagaagttcaagagccggggcgtgggggagctggcccggctggccctggtgatcagcgagctggagggcaaggcccagcagtag

SEQ ID NO: 269347 - DNA, 3247 bp, Artificial Sequence
  derived and/or modified sequence
tcaggaatggagagaagggtaatggttttacctcttattgtggaaacctgttgagatcacagagaatatactgacggcataaaagggcagaaccatagcagggtgcgcgctgctgtagttgccttccatggatctataggagagcaagtcctccaggagaagaagtcctcaccagtgaacggagacctctctgaactaaggataccatggccacgtcagccccactacggagcctggaagaggaggtgacctgctccatctgtcttgattacctgcgggaccctgtgaccattgactgtggccacgtcttctgccgcagctgcaccacagacgtccgccccatctcagggagccgccccgtctgcccactctgcaagaagccttttaagaaggagaacatccgacccgtgtggcaactggccagcctggtggagaacattgagcggctgaaggtggacaagggcaggcagccgggagaggtgacccgggagcagcaggatgcaaagttgtgcgagcgacaccgagagaagctgcactactactgtgaggacgacgggaagctgctgtgcgtgatgtgccgggagtcccgggagcacaggccccacacggccgtcctcatggagaaggccgcccagccccacagggaaaaaatcctgaaccacctgagtaccctaaggagggacagagacaaaattcagggcttccaggcaaagggagaagctgatatcctggccgcgctgaagaagctccaggaccagaggcagtacattgtggctgagtttgagcagggtcatcagttcctgagggagcgggaggaacacctgctggaacagctggcgaagctggagcaggagctcacggagggcagggagaagttcaagagccggggcgtcggggagcttgcccggctggccctggtcatctccgaactggagggcaaggcgcagcagccagctgcagagctcatgcaggacacgagagacttcctaaacaggtatccacggaagaagttctgggttgggaaacccattgctcgagtggttaaaaaaaagaccggagaattctcagataaactcctctctctgcaacgaggcctgagggaattccaggggaagctgctgagagacttggaatataagacagtgagcgtcaccctggacccacagtcggccagtgggtacctgcagctgtcagaggactggaagtgcgtgacctacaccagcctgtacaagagtgcctacctgcacccccagcagtttgactgtgagcctggggtgctaggcagcaagggcttcacctggggcaaggtctactgggaagtggaagtggagagggagggctggtctgaggatgaagaagagggggatgaggaggaagagggagaagaggaggaggaggaagaggaggccggctatggggatggatatgacgactgggaaacggacgaagatgaggaatcgttgggcgatgaagaggaagaagaggaggaggaagaggaggaagttctggaaagctgcatggtgggggtggctagagactctgtgaagaggaagggagacctctccctgcggccagaggatggcgtgtgggcgctgcgcctctcctcctccggcatctgggccaacaccagccccgaggctgagcttttcccagcactgcggccccggagagtgggcatcgccctggattatgaagggggcaccgtgactttcaccaacgcagagtcacaggaactcatctacaccttcactgccaccttcacccggcgcctggtccccttcctgtggctcaagtggccaggaacacgcctcctgctaagaccctgagccctgacatctgcccccagccccaaccctcagatgcttcacttctttggaattccaggactctcaatggggggacgggatgcctggcctaagcacctggagcaggggaccccatatccactggtagccacctccccattgctgtggccccctgaaatctcactcagtgctgttgctccatctactgccctaatggggctcttttcccacctcctgctggtttcccgagggaacttctgaccctggagtccatgagggctcctttcctttttgaccacgaccttggccccagctctgcactctctggaataagggcccgatgcagcattttcttgcccagtgtggcaagacctcagaaaaaccagtcaattacgcctaagatcattttgctgtccttaaaccccccaggttccttcttgcacaaatccactctgctgcccaccttccctggcattttaaacagacctaccccaccccaactcagagttaagcatacatggcaatgctgaaaataaacaaaatccactgaggcttcccaggccatttaaagcctggagtaccagcgcatatcatctcatggggtccagagtggagtccaggcttctctgaaaccagggctgagcatatttccatagccaaggaggtgggactccctggagctatctgtggtcttagggaaggatccagacatacacggctttggggtacaagctgtgatcactgatcaataaattatctctagattggtccttgtgaggggagttttaagaatccagaacatcttgctcttgatcagcacatccaaaaacaccaagacaaacatccagtggagcagaacctctcctgcctcgggagttctgaccgggttccccagcagggtgttaagcctctgtctctggccctaccagcatccaggttccactttcctaggagagagtggagatgggaagacagggaaaggaaggcagcaggaggccacaagcccaccaggtcttcatgtcaagagagggagtaacatgtcttctcattgcccacggacccaacctctgtccaggtgcccctcatcatcacagtttaacacaagctcccctgctccagccaaattgatctcccagtcttgtccttacccattccaagtgctctgccagcccctgttcatccaagttttaagtcctccaccctgttctaagagactgttccaacggctctgggcctcagtggtcacttgaccaccattgtctcagagctgcccactttgtgtgtgtcacatgctgcctgagtcacatgtacatcttatttctgcctctagttttgtaagctcctggagggcggataacatcttatactactcttgtattctcatggcacctagtgcagtgctgggcacagagtaggtgctcaataaagacttgttgaatgaa

SEQ ID NO: 269348 - DNA, 1620 bp, Artificial Sequence
  derived and/or modified sequence
atggccaccagcgcccccctgcggagcctggaggaggaggtgacctgcagtatttgtttggattacctgagagatcctgtcaccatagattgcggccatgtattctgtagatcctgtactacggatgtccggcccatttcgggatctaggccagtatgcccactctgcaagaagccctttaagaaagagaatattcgcccagtgtggcagcttgccagtctcgtcgaaaacatcgaacggttgaaagtggacaagggccggcaacctggcgaagttaccagggagcagcaggatgcgaagctctgcgagcgccacagggaaaaactccattattactgtgaggacgatggcaaactcctctgcgtaatgtgtcgggagtcgagggaacatcgaccccatactgccgtgctgatggagaaagccgcccagccacatagagagaagatactgaaccatctgagcaccctgagacgcgaccgggacaaaatccaggggttccaggccaagggggaggctgacatcttggctgccctgaaaaaactgcaggaccagcggcagtacattgtcgccgagtttgaacaagggcatcagtttcttagggagcgggaggagcacctgctcgaacagctagctaagttggaacaagaactgacggaaggccgggaaaaattcaagtcgagaggcgttggagaacttgctcgactcgccctggtaataagtgaactggaaggcaaagcccagcagccggccgcagagcttatgcaggacaccagagatttcctcaaccgttatccacgaaaaaaattctgggttggaaaaccaatcgcacgcgtcgtgaagaaaaagaccggcgaattttccgacaaactgctgtccctgcaacgaggactccgcgagttccaaggcaagttgctgagagatctggagtacaagaccgtgagcgttacactggaccctcaatctgctagcggatacttgcagttatctgaagattggaagtgtgtgacttacactagcctctataagtcagcctacttacatcctcagcagttcgattgcgagcctggagtacttggcagcaagggctttacctggggcaaggtgtattgggaggtcgaggtcgaacgggagggctggagcgaggacgaggaggaaggcgatgaggaagaggagggcgaagaagaggaggaggaggaggaagccgggtacggagatggctacgatgactgggaaactgatgaagacgaggaatcactcggcgatgaggaggaagaagaggaagaagaagaagaagaagtgctcgagagttgcatggttggggtggcaagagactcagtgaagagaaagggggatctgtccctacggccagaagatggcgtttgggccttaaggctttcttcatctggcatttgggccaacactagccctgaagcagaactttttccagcgctgcggccaagaagggtgggaatcgcactcgactacgagggcggcacagtaacattcacaaatgccgaatctcaggagctgatttatacatttacggctacttttacacgccgcttagttccctttctctggttaaagtggccagggacaagactcctgctgaggccctag

SEQ ID NO: 269349 - DNA, 3318 bp, Artificial Sequence
  derived and/or modified sequence
gggagattacggggcggggacgagctgtcgcgctggttgctcgtgcaggagcgggacccggaacagaccgccgtgagagaggaggggtgccggccgggattcgcggcccggagctcgggaccggttgcttcattccagcctcgcagtcacctctgtgccctgctggttgtcttcccagcgctgctgtagttgccttccatggatctataggagagcaagtcctccaggagaagaagtcctcaccagtgaacggagacctctctgaactaaggataccatggccacgtcagccccactacggagcctggaagaggaggtgacctgctccatctgtcttgattacctgcgggaccctgtgaccattgactgtggccacgtcttctgccgcagctgcaccacagacgtccgccccatctcagggagccgccccgtctgcccactctgcaagaagccttttaagaaggagaacatccgacccgtgtggcaactggccagcctggtggagaacattgagcggctgaaggtggacaagggcaggcagccgggagaggtgacccgggagcagcaggatgcaaagttgtgcgagcgacaccgagagaagctgcactactactgtgaggacgacgggaagctgctgtgcgtgatgtgccgggagtcccgggagcacaggccccacacggccgtcctcatggagaaggccgcccagccccacagggaaaaaatcctgaaccacctgagtaccctaaggagggacagagacaaaattcagggcttccaggcaaagggagaagctgatatcctggccgcgctgaagaagctccaggaccagaggcagtacattgtggctgagtttgagcagggtcatcagttcctgagggagcgggaggaacacctgctggaacagctggcgaagctggagcaggagctcacggagggcagggagaagttcaagagccggggcgtcggggagcttgcccggctggccctggtcatctccgaactggagggcaaggcgcagcagccagctgcagagctcatgcaggacacgagagacttcctaaacaggtatccacggaagaagttctgggttgggaaacccattgctcgagtggttaaaaaaaagaccggagaattctcagataaactcctctctctgcaacgaggcctgagggaattccaggggaagctgctgagagacttggaatataagacagtgagcgtcaccctggacccacagtcggccagtgggtacctgcagctgtcagaggactggaagtgcgtgacctacaccagcctgtacaagagtgcctacctgcacccccagcagtttgactgtgagcctggggtgctaggcagcaagggcttcacctggggcaaggtctactgggaagtggaagtggagagggagggctggtctgaggatgaagaagagggggatgaggaggaagagggagaagaggaggaggaggaagaggaggccggctatggggatggatatgacgactgggaaacggacgaagatgaggaatcgttgggcgatgaagaggaagaagaggaggaggaagaggaggaagttctggaaagctgcatggtgggggtggctagagactctgtgaagaggaagggagacctctccctgcggccagaggatggcgtgtgggcgctgcgcctctcctcctccggcatctgggccaacaccagccccgaggctgagcttttcccagcactgcggccccggagagtgggcatcgccctggattatgaagggggcaccgtgactttcaccaacgcagagtcacaggaactcatctacaccttcactgccaccttcacccggcgcctggtccccttcctgtggctcaagtggccaggaacacgcctcctgctaagaccctgagccctgacatctgcccccagccccaaccctcagatgcttcacttctttggaattccaggactctcaatggggggacgggatgcctggcctaagcacctggagcaggggaccccatatccactggtagccacctccccattgctgtggccccctgaaatctcactcagtgctgttgctccatctactgccctaatggggctcttttcccacctcctgctggtttcccgagggaacttctgaccctggagtccatgagggctcctttcctttttgaccacgaccttggccccagctctgcactctctggaataagggcccgatgcagcattttcttgcccagtgtggcaagacctcagaaaaaccagtcaattacgcctaagatcattttgctgtccttaaaccccccaggttccttcttgcacaaatccactctgctgcccaccttccctggcattttaaacagacctaccccaccccaactcagagttaagcatacatggcaatgctgaaaataaacaaaatccactgaggcttcccaggccatttaaagcctggagtaccagcgcatatcatctcatggggtccagagtggagtccaggcttctctgaaaccagggctgagcatatttccatagccaaggaggtgggactccctggagctatctgtggtcttagggaaggatccagacatacacggctttggggtacaagctgtgatcactgatcaataaattatctctagattggtccttgtgaggggagttttaagaatccagaacatcttgctcttgatcagcacatccaaaaacaccaagacaaacatccagtggagcagaacctctcctgcctcgggagttctgaccgggttccccagcagggtgttaagcctctgtctctggccctaccagcatccaggttccactttcctaggagagagtggagatgggaagacagggaaaggaaggcagcaggaggccacaagcccaccaggtcttcatgtcaagagagggagtaacatgtcttctcattgcccacggacccaacctctgtccaggtgcccctcatcatcacagtttaacacaagctcccctgctccagccaaattgatctcccagtcttgtccttacccattccaagtgctctgccagcccctgttcatccaagttttaagtcctccaccctgttctaagagactgttccaacggctctgggcctcagtggtcacttgaccaccattgtctcagagctgcccactttgtgtgtgtcacatgctgcctgagtcacatgtacatcttatttctgcctctagttttgtaagctcctggagggcggataacatcttatactactcttgtattctcatggcacctagtgcagtgctgggcacagagtaggtgctcaataaagacttgttgaatgaa

SEQ ID NO: 269350 - DNA, 1620 bp, Artificial Sequence
  derived and/or modified sequence
atggccaccagcgcccccctgcggagcctggaggaggaggtgacctgtagcatctgcctcgattacctcagggatcccgttaccatagattgcggtcatgtcttttgtaggagttgcacaaccgacgtccgcccgataagcggcagcaggcctgtgtgcccgctctgcaagaagcccttcaaaaaagaaaatatcagaccagtgtggcagcttgcaagcttggtcgaaaatatcgaacggcttaaggtcgataaaggccggcagccaggtgaagtgactcgagagcaacaggatgcgaaactatgtgaaaggcatcgggaaaaactgcactattactgcgaagatgatggcaaactgctgtgtgttatgtgcagagagtcccgagagcatcgccctcatacggctgtgctgatggagaaagccgcccagccccacagagaaaaaattctgaatcacctaagcacattacggcgagaccgcgacaagatccagggcttccaggccaaaggcgaggccgacatcctcgccgccctcaagaagttacaggaccaacgccagtacatcgtggccgagttcgagcagggccatcagtttttgagagaaagagaggaacatctgcttgaacagttagccaagctagaacaggaattgaccgaagggcgcgaaaaattcaagagcaggggagtgggggaactcgcacggctggcactggtgatcagtgaactggaggggaaagcccaacagcctgcagcggaactgatgcaggacacacgagatttcttaaatcgttatccaagaaaaaagttctgggtgggaaaaccgatcgccagagtggtgaagaaaaagactggcgagttctctgacaagcttctgagcctgcagcgcggacttagggagttccagggaaagttgctgcgagatctggagtacaagaccgtctctgtgacgctcgatcctcagagtgccagtggctatttgcagttgtccgaagactggaaatgtgtgacttatacctcactatataagtcggcctatctgcacccccagcagttcgactgtgagcctggagtgctgggtagcaaaggcttcacatggggtaaagtttattgggaggttgaagttgagcgggaaggatggtcagaggatgaggaggaaggggatgaagaggaggaaggcgaggaggaggaagaggaagaggaagctggatatggcgacgggtacgatgattgggagaccgacgaagacgaggagtcactcggtgatgaagaagaagaggaggaggaagaagaggaagaagtactggagtcatgcatggttggtgtggctagggattctgtgaagaggaagggagacctgagtcttaggccagaggatggagtttgggccctacgcttaagtagcagcgggatttgggcaaacacctcccccgaggccgaactgttcccagcgctcaggcctaggagagtggggatcgccttagattacgagggcggaacggtgacctttactaatgccgagtcccaggagctgatatatacgttcacagccacctttacacgccgcctggtcccttttctgtggctcaagtggcccgggaccaggttgctgctccggccttag

SEQ ID NO: 269351 - DNA, 1620 bp, Artificial Sequence
  derived and/or modified sequence
atggccaccagcgcccccctgcggagcctggaggaggaggtgacctgttccatttgtctggactacttgagggaccccgtcaccatcgattgtgggcacgtattttgccgatcgtgtactacagatgtccgtccgatttcagggtcgcgtccagtgtgccctctttgcaagaagccgttcaagaaagagaatatccggccagtgtggcagctcgcttcactagtagagaatatcgaacgcctgaaagttgataagggacgccagcccggtgaggtgacacgcgagcaacaggacgcaaagttatgcgagaggcacagggagaaattacattattactgcgaagacgatggcaaactcttgtgtgtgatgtgtagggagtctagagaacacagaccacatactgccgttctgatggaaaaagccgctcagccacaccgtgagaagatcctcaatcacttgtcaaccctccggcgtgaccgcgacaaaatacagggcttccaggcgaagggcgaagcagatattctggctgctttaaagaagctccaggatcagagacagtacatcgtggctgaatttgagcaggggcaccaattcctgagagagagggaagaacatctcctggaacagctggccaaactcgagcaggaattaacagagggacgagagaaattcaagtcacggggggtaggggagttggctcggctggctctagttattagtgagttagagggcaaagcccagcagccggcagcggagctgatgcaagatacaagggacttcctgaaccgatatcccagaaaaaagttttgggtcggtaaacctattgctcgcgtggtaaagaaaaagactggtgaattctcggacaaactgctgagcttgcagagaggcctgagagagttccagggaaaattgctcagggatctggaatacaaaaccgtcagcgtcacattggatccccagtccgcatccgggtatctccagctctcagaggactggaaatgcgtgacttatactagcttatacaagtcagcatacctccatccccagcaattcgactgtgagccgggagtgctgggctccaagggatttacatggggcaaagtgtactgggaagttgaggttgagcgtgaggggtggagcgaggacgaagaagagggggatgaagaggaggagggcgaggaagaagaagaagaagaagaggcgggctatggagatgggtacgatgattgggaaaccgacgaggacgaggaaagtctgggagacgaggaggaagaagaggaggaagaggaggaggaggtgttagagtcctgtatggtcggggtggcccgcgactctgttaaaaggaagggggatctgagcctgcggcctgaagatggtgtgtgggctctgcggctgtctagctctggtatatgggccaatacgtcgcccgaggctgaactgttccccgcccttcgacccagaagagtcggcatcgcgttggactacgagggcggtactgtgactttcaccaacgcagaaagccaggaactaatttatacattcacagccacctttactcgccgcttggttcctttcctctggctaaagtggccagggacaaggctgctgttacggccctag

SEQ ID NO: 269352 - DNA, 747 bp, Artificial Sequence
  derived and/or modified sequence
atggccaccagcgcccccctgcggagcctggaggaggaggtgacctgctccatctgcctggactatctgagagacccagttactattgattgtggtcatgtgttctgtagaagttgtacgacagacgtacgcccaatcagcggtagcaggcccgtgtgcccactctgcaaaaaaccatttaagaaggagaacatccgcccagtctggcagttggcctcattagtggaaaacatcgaaaggctcaaagtcgataaagggcgtcaaccgggtgaagtgactagagagcagcaggacgctaagctctgtgaacggcaccgggagaagctccactactattgtgaggatgacggcaaactgttatgcgtgatgtgccgagagtcccgcgagcatcgcccacatactgcagtgctgatggagaaggccgcccagccgcatagagagaagatacttaaccacctgagtacactcagacgcgatcgggataagatccagggctttcaggcgaaaggggaggctgacatcttggcagccctgaagaagctccaggaccagaggcagtatatcgtggctgaatttgaacagggccatcagttcttacgcgaaagagaagagcacctgctggagcaactcgccaagctcgaacaggagctgacagagggaagagaaaagtttaagtctcgaggcgttggagagctggctagattggccttggtgatctcagagctggaaggaaaggcccagcagtag

SEQ ID NO: 269353 - DNA, 1620 bp, Artificial Sequence
  derived and/or modified sequence
atggccaccagcgcccccctgcggagcctggaggaggaggtgacctgctcgatctgcctcgattatctccgagaccccgtgaccattgactgcggtcacgttttttgcagatcttgtaccaccgatgtccggcctatttcagggagtcggcctgtctgtccattgtgcaagaagcccttcaagaaagagaacatacgtccggtttggcagctagcgagcctcgtcgaaaacattgagcggctcaaggttgacaagggcagacagccaggagaggtgacccgggagcaacaggacgccaaattgtgcgagcggcacagggaaaagctgcattactattgcgaagacgatggtaaactgctctgcgtgatgtgccgcgagagccgcgaacataggcctcacactgcagtattgatggagaaagcagctcagccacatcgggagaaaatcctcaaccacctctctacgttgcggagggaccgggataaaatccaggggttccaggcaaagggtgaggccgacatcttagccgcgttgaagaaactgcaggaccagaggcaatatattgttgcagagtttgaacagggccaccagtttttacgggaaagagaggagcatttgttagaacagctcgcgaaattggagcaggagctgacagagggccgggagaaattcaaatcccgcggtgtgggggagctagcccgcctggccctggtgataagtgagttagaaggcaaagcccagcaaccagctgccgagctcatgcaggacacgagggacttcctcaataggtaccctcggaagaaattctgggttggtaaaccgatcgcccgggtggttaagaagaaaacaggcgagttctctgataagctcctgtctctgcagaggggcctgcgagagtttcaaggaaagctgctaagagacctcgagtacaagaccgtcagcgtgacattagacccccaaagtgctagtggctatttgcagttgtcagaggattggaaatgcgtgacctatacatcgttatacaaaagcgcatatctacatccccagcagttcgattgcgagcctggagtcctgggaagcaagggttttacttggggaaaggtgtattgggaggtagaagtggaaagagagggctggagtgaagacgaagaagagggcgatgaggaagaagagggggaagaagaggaagaagaagaggaagcaggctatggggatggttacgacgactgggagacagacgaggacgaggaaagcctcggtgatgaggaggaagaagaggaggaggaagaagaggaggttcttgagtcatgcatggtgggcgtagcgagagactcagtgaagagaaagggagatctctctttaagaccagaagacggcgtgtgggcactcaggcttagcagcagtggcatctgggctaacacctcgccagaggctgagttgttccccgccctgcgccctcggcgggttgggatcgccctggattacgaaggaggtaccgtaaccttcacaaatgcagagtcccaagagcttatctacaccttcacggcaacattcactcggaggttggtgccctttttgtggctgaaatggcccgggaccagattactacttagaccttag

SEQ ID NO: 269354 - DNA, 747 bp, Artificial Sequence
  derived and/or modified sequence
atggccaccagcgcccccctgcggagcctggaggaggaggtgacctgtagcatttgcctggattacctccgtgatcctgtgactattgactgcggacatgtgttctgtagatcttgcacaacggatgtgcggcccatctccggcagtcgccctgtgtgcccattgtgcaagaagccatttaagaaggaaaacattcggccagtttggcagctcgcctcattggtagaaaacatcgagcgcttaaaggtagacaaaggccgtcaacccggcgaagttactagggagcaacaggatgcaaagctgtgtgaaagacaccgagaaaagctgcactattattgtgaagacgacggtaaactgctctgtgttatgtgtagagagagccgcgagcaccgcccccacactgcagtgctcatggaaaaggcagcgcaacctcaccgagagaagatccttaatcacctgtcaactctgcgacgcgaccgcgacaaaatccaaggctttcaggcgaagggagaggcagatatcctcgctgccctgaaaaaactccaggaccagcgacagtacatcgttgccgaattcgaacagggccatcagtttctgcgcgagagagaggaacaccttctggagcaactcgccaaactggagcaggaactgaccgaagggcgagaaaagttcaagtcacggggcgtgggagaactggcgagactggccctggtgattagcgaactggagggcaaagcacaacaatag

SEQ ID NO: 269355 - DNA, 1620 bp, Artificial Sequence
  derived and/or modified sequence
atggccaccagcgcccccctgcggagcctggaggaggaggtgacctgctccatctgtctagactacctgcgagaccctgtcaccatagattgtggacatgtgttttgccggagctgcacgacagacgttcgacccatctcgggcagccgccctgtgtgcccgttgtgtaaaaaaccgtttaaaaaggagaacataagaccggtgtggcagctggcttccttagtcgagaacatcgaaaggttgaaggttgacaaggggaggcaacccggcgaggtaacacgcgaacagcaggacgctaagctatgcgagagacatagggagaagctgcactattattgcgaggacgatggaaagctgctgtgcgtgatgtgccgagaaagccgggaacacaggccgcatacggcagtgctcatggaaaaggccgcgcagccgcatcgggaaaagatcctcaaccatttgtccactctcagacgtgacagggataaaattcaggggttccaggctaagggcgaggcagacatactcgcagcgctgaaaaagctacaggatcagcgccagtatatagtggcagaatttgagcagggacaccaattcctgagggaaagggaggaacatctcctcgagcagttggcgaagctcgagcaggaacttaccgagggaagggagaagttcaagtctcgcggtgtgggggagctggcccgcttagccctcgtaatttccgagcttgagggaaaggcgcagcagcccgctgcagaactgatgcaggatactagggactttctaaaccggtaccctaggaaaaagttttgggtgggaaagcccattgcccgtgttgtaaaaaagaaaacgggcgaattctcagacaagttgctgtccttacagagaggattaagggaattccaggggaagctgcttcgcgacctggagtataagaccgtgtctgtcacactggaccctcagagcgcgagtgggtaccttcaactgtccgaggactggaaatgcgttacctacactagcttatacaagtcagcgtatttacacccacagcaattcgactgtgagccgggggtcttgggatccaaagggttcacttggggtaaagtgtactgggaggtggaggtagaacgcgaagggtggtctgaggacgaggaggagggcgacgaggaagaagagggggaagaagaagaagaggaagaagaggcagggtacggggatggctatgatgattgggagacagacgaggatgaagagagcctcggcgatgaggaggaggaagaggaggaagaggaggaggaggttctcgagtcctgcatggtcggagtggcccgcgattcagtgaagagaaaaggagatctgtcacttcggccagaagacggcgtctgggccctacgactatcctcctcaggtatttgggcaaatacgtcccccgaggccgagttgttccctgccctgcgtccacgccgtgtcggcatcgcacttgattatgaaggtggtacagtgacgtttaccaacgccgagagccaagaacttatctatacttttaccgcgacattcactagaaggctggtacccttcctgtggctgaaatggcccggaacccgcctgctgctgcgcccatag

SEQ ID NO: 269356 - DNA, 747 bp, Artificial Sequence
  derived and/or modified sequence
atggccaccagcgcccccctgcggagcctggaggaggaggtgacctgttctatctgcctagattatctgcgcgacccagtgaccatcgattgtggacacgttttctgcagatcttgcaccacagatgtcaggcctatatccggctcaaggcccgtgtgtcccctgtgcaagaaaccattcaaaaaggagaacattaggccagtttggcagcttgcttccctggtggaaaacattgagcgactcaaagtggacaaagggcgccagccaggcgaagtcacccgcgaacagcaggatgccaagctgtgtgagcggcatagagagaagctccattactactgcgaggacgacgggaagttgctgtgtgtgatgtgcagggagagtagagaacaccggcctcacaccgcggtgcttatggagaaggccgcacagccacatcgggagaaaatcctgaaccatctatctaccctcagaagagacagagataaaatccaggggtttcaggccaagggcgaggctgacatacttgcggcactcaagaagctgcaagatcaaagacaatacattgttgccgaattcgagcaggggcaccagttccttagagagcgcgaggagcatttactcgaacagcttgccaaactggagcaagaactgacggaaggcagagagaagttcaaatcacggggagtgggtgagctggcccggctagctctggtcatttccgaactggagggcaaggcgcagcagtag

SEQ ID NO: 269357 - DNA, 747 bp, Artificial Sequence
  derived and/or modified sequence
atggccaccagcgcccccctgcggagcctggaggaggaggtgacctgttcgatctgcctggactatctccgggatcctgtgactatcgactgtggccatgtgttttgcagatcttgcactactgacgttcggccaatttctggcagccgtcctgtgtgtccactctgcaaaaagccctttaagaaggagaatatcaggcctgtttggcaattggcttcactcgtggagaacattgaacgcctgaaggtggacaaaggtaggcagcccggcgaggttacgcgggaacagcaggatgcaaaattatgcgagcggcatcgcgaaaagcttcattactattgcgaggacgatggcaagttgctgtgtgtgatgtgtcgtgaatcaagggaacatagaccccacactgctgtccttatggagaaggccgctcagcctcacagagaaaagatcttgaaccatctgagcacacttcggcgcgacagagacaagattcagggctttcaagcgaagggagaagccgacatcctagccgccctgaagaagctgcaggaccagcggcaatacatcgtggcagagttcgagcagggacaccagttcctgcgagaacgtgaggagcacctcctggaacaattagccaagctagaacaggaacttactgaaggaagggagaagttcaaatctaggggcgtgggagagcttgcacggttagccttagtcattagcgagctggaggggaaggctcagcagtag

SEQ ID NO: 269358 - DNA, 1620 bp, Artificial Sequence
  derived and/or modified sequence
atggccaccagcgcccccctgcggagcctggaggaggaggtgacctgttctatctgcctagactacttgagggaccctgttactatcgattgcgggcatgtgttttgccggagttgcaccacagacgtgcggcctataagcgggtctcgaccagtttgccccctgtgcaagaaaccatttaagaaggagaacatacgccccgtgtggcagctggcctctctcgtagagaacatcgaacgtttaaaagtggacaaaggccggcagcccggcgaggttacgcgtgaacaacaggatgccaagctgtgcgagagacatagggaaaaattgcactactactgtgaggacgatgggaaacttctgtgtgtgatgtgccgggagtcccgcgagcatcgcccgcataccgcagtcctcatggagaaagcagcccagcctcaccgcgagaaaatcctaaaccacctgtctacactccggcgtgatcgggacaagatacagggtttccaggcaaaaggggaggctgacattctggccgccttaaagaagttgcaagaccagaggcaatacatcgtggccgagtttgaacaggggcatcagtttctgagagaacgtgaagaacatctgctcgagcaactagctaagttggaacaggaattgactgagggcagggagaaatttaaatccagaggcgtgggagagctggcgagacttgctctggtgatcagcgaactagaaggaaaagcacagcagccagctgccgagcttatgcaggatacccgagactttcttaaccgatatcctcggaagaaattctgggtgggcaaacctattgccagagtggtcaagaagaaaacaggggagtttagtgacaagcttctcagcctgcagcgcgggctgagggaatttcagggaaagctgctacgagatttagaatataagaccgtcagcgttacactggacccacaatctgcctccggctatctgcagctcagtgaggactggaaatgtgtaacgtacaccagtctgtataagtctgcatatctgcacccccaacagtttgactgcgagcccggtgtccttgggtcgaaggggtttacctggggtaaagtttattgggaggtcgaggtcgaaagggagggatggagcgaagatgaagaagagggtgacgaagaggaggagggtgaggaagaggaagaggaagaggaagcgggctacggcgatggttacgatgactgggagacggatgaagacgaagaatctttgggagacgaagaggaagaagaagaggaggaggaggaggaagtgctggagtcctgtatggtcggcgtcgcacgagacagcgttaagagaaagggcgacctgagtctgagacccgaggacggcgtgtgggccctgcgccttagctctagcgggatctgggctaatacctcgcccgaggcggagctgttccctgctttgcgaccacgccgagtggggatcgccttggactacgagggaggcaccgtgacctttacgaacgcggagtcccaggagctgatctatacgtttactgctacctttacacggcgactggtgccgttcctctggctcaagtggccaggcactcggctgcttcttagaccttag

SEQ ID NO: 269359 - DNA, 1620 bp, Artificial Sequence
  derived and/or modified sequence
atggccaccagcgcccccctgcggagcctggaggaggaggtgacctgctccatctgcttggactacctgcgggatccagtgactatcgattgtggtcacgtcttctgtcgcagttgtacaaccgacgttagacccatctccggctctcgcccggtttgtcccctctgcaagaaaccttttaaaaaggagaatatcaggcccgtctggcagttagcctccctagtcgaaaatatcgaaagactgaaggtcgataaaggtaggcaacctggagaagtaacacgcgaacaacaggatgctaagctttgtgagagacatagagagaaactgcactactactgcgaggacgatgggaaattactttgtgtcatgtgcagggagtccagagagcaccgtccacatactgccgtcctaatggaaaaggccgcacaaccccaccgggagaagatcctgaaccacttgtctactttgcgaagagaccgtgacaagatacagggttttcaagccaaaggtgaagcggatatcctcgcagccctaaaaaagcttcaggaccagcggcaatacatcgttgcagaatttgagcagggacatcaatttctccgcgagcgagaggagcacctcctggaacagttagcaaagcttgagcaagagttgaccgagggccgcgagaagtttaagtcaagaggggttggcgaactcgccagattggcattggtgatctcggagctcgaaggaaaggcacagcagcctgcagccgaactcatgcaggacacccgtgatttcctcaataggtatccaagaaaaaaattctgggtggggaagccaatcgccagagtagtgaagaaaaagaccggcgaattttcggataagttgctttcactccaaagaggactgagagaattccagggcaagctgctgcgggacctggagtataagaccgtgtcagtgacgctggaccctcagtcggctagtggctatctgcagctgagcgaagactggaagtgtgttacttacaccagcctctacaagtccgcctatctacatccacagcaatttgattgcgaacccggcgttctcggctccaagggatttacatggggcaaggtgtactgggaggtggaagtcgaacgagagggctggagtgaggacgaggaggaaggagacgaggaagaagaaggggaagaggaggaggaggaggaggaggcaggatatggtgatgggtacgacgattgggagactgacgaagatgaagagtctctgggagacgaggaagaagaggaagaggaagaagaggaagaggtgcttgaatcctgcatggttggtgttgctagagatagcgtgaagaggaagggagatctgagcctcagacccgaagacggcgtctgggccctgaggttgtcatcaagtggaatctgggcgaataccagccccgaagctgagttgttccctgccttgcggccaagaagggtgggcattgctttagactatgagggtggaaccgtgacgttcactaacgctgaatcacaggaactaatctacacctttacggccaccttcacacggcgcctggtgccttttctctggctcaagtggccgggcacacggttgctgctgcgcccgtag

SEQ ID NO: 269360 - DNA, 1620 bp, Artificial Sequence
  derived and/or modified sequence
atggccaccagcgcccccctgcggagcctggaggaggaggtgacctgctccatctgtttggattacttgcgggaccctgtcaccatagactgcggccacgttttttgccgatcctgcacgactgacgtgagacccatctctggctcacgacccgtttgccccctgtgcaaaaaaccatttaaaaaagaaaacattcgacctgtgtggcagttagccagtctcgtggaaaatatcgagcgcctcaaggtcgataaaggtcgccagcctggggaagtcacccgcgaacagcaggacgccaaactgtgcgagcggcaccgagagaaactgcattactattgcgaagatgacggcaaactgctttgcgttatgtgtcgcgaatctcgagagcatcgcccccacacggctgtactgatggaaaaagccgcccaaccccatcgagaaaaaatcctgaaccacctgtccacactgcgccgcgacagagacaagatacaagggttccaagccaagggcgaggccgacatcctcgctgcattgaaaaagctgcaggaccagaggcagtacatcgtagctgagtttgagcagggacatcagttccttagagagagggaggaacatctcctggaacagttagcaaaattggagcaggagctcacggaaggcagagaaaagttcaagtctcggggagttggagaacttgccagactagccctggtgatttccgagttggaggggaaggcccagcagcccgctgcagagctcatgcaggatacacgcgactttctgaatcgataccctaggaagaaattctgggtggggaaacctatcgccagagttgtgaagaagaagaccggggagttcagtgataaattgttaagcctccagcgggggttgcgggagttccagggtaagctcctgagagatctagaatataaaactgtctcggttactctggacccacagtctgcttccggctacttgcaactatccgaggactggaaatgcgtgacctacacatccctgtacaaaagcgcttacttgcacccccagcagtttgactgtgagcccggggtgctaggatcaaagggattcacgtggggaaaggtgtattgggaagtcgaagtggagcgagaggggtggagcgaggatgaggaggagggtgacgaagaggaggaaggcgaggaagaggaggaggaggaggaagcaggatacggggacggatacgatgattgggaaactgacgaggatgaggagtccctgggggacgaggaggaggaggaagaagaggaagaggaggaggtccttgagagctgcatggtcggagtggcacgcgacagcgtgaagcgcaagggagatctctcacttaggcccgaagatggagtctgggcactcaggctgagcagtagtgggatttgggctaacacctcacctgaagccgaactgttccccgcactaagacccaggcgtgtaggcatcgctctggattatgaaggaggcaccgtgacatttacgaacgctgagagccaggagttgatatatacttttaccgccacttttacgagaagactcgtaccattcctgtggctgaaatggccaggtacgcggcttttactgagaccctag

SEQ ID NO: 269361 - DNA, 1620 bp, Artificial Sequence
  derived and/or modified sequence
atggccaccagcgcccccctgcggagcctggaggaggaggtgacctgttcaatctgcctagattatctccgggacccagtcacgattgactgcggtcacgtgttctgtcgttcctgtactaccgatgtgcgtcccataagcggatcgagacccgtgtgtccgctatgcaaaaaacctttcaagaaagaaaatatcaggcccgtgtggcagcttgcatcactggtagagaacatagaacgccttaaggttgacaagggacggcaacccggagaagtgacacgcgagcagcaggacgcaaaactctgcgagcgccatagagagaagctgcattattattgtgaggatgacggcaaactgctgtgcgtaatgtgcagggagagccgggagcatcgcccccatactgccgtgcttatggagaaggctgctcaaccgcaccgggagaagattttaaaccacctgtccacgctaagaagagaccgggacaagatccaaggttttcaggccaaaggagaggctgacatcctggctgccctcaaaaagctccaggaccagcggcagtatatcgtagcggagttcgaacagggccatcagttcctcagggaaagggaggagcatttgttggaacaattagctaagttggaacaggagctcacagaggggcgcgagaagttcaagagccgtggagtgggcgaattagcccgccttgccctggtgattagcgagctcgagggaaaggcgcaacaaccagcagccgagctgatgcaggacactagggattttctgaacagatacccaaggaaaaaattttgggttggtaagccaatagcgcgggtggtcaagaaaaagaccggtgaattctccgataaactgttatctttacagagagggcttcgggaattccaaggaaaactccttagagacttggagtacaaaacggtgagcgtcactctcgacccacaatcagccagtgggtatctgcagctcagcgaggactggaagtgtgtgacctataccagcctctataagagtgcttatctgcacccccagcagttcgactgtgagcccggggtcttaggtagtaagggtttcacatggggcaaggtgtactgggaggtggaggtggaaagagaggggtggagtgaagatgaagaagagggggacgaggaggaggaaggcgaagaagaggaggaggaggaagaggccgggtatggggacggctatgacgattgggagaccgacgaagacgaagagagcctcggcgacgaggaggaggaagaagaggaagaggaggaggaagtcctggagtcatgtatggttggcgttgcgcgcgacagcgtgaagaggaagggagatctgagcctcaggcctgaggatggcgtttgggctcttagactgtcctccagtgggatttgggcaaatactagcccagaggccgagctcttcccggccctgagaccacgaagagttgggatcgcacttgactatgaaggaggaaccgtcacttttactaatgccgaatcccaggagctgatttatacttttaccgctacattcactaggcggctggtacccttcctgtggctgaaatggcccggcactaggttactgttgcgaccttag

SEQ ID NO: 269362 - DNA, 1620 bp, Artificial Sequence
  derived and/or modified sequence
atggccaccagcgcccccctgcggagcctggaggaggaggtgacctgctcaatctgtctggactatctccgtgatcccgtgactatcgattgtgggcacgtattttgccgcagctgtacaacagacgtaaggcccattagcggctctagacccgtctgcccactgtgcaagaagccttttaagaaagaaaacattcggcccgtgtggcagttggcctcgctcgtggaaaacatagaaagactcaaagtcgacaaggggcggcagccaggggaggtcactcgcgagcagcaggatgccaaactctgcgaacgccatcgagaaaagctccactactactgcgaggacgatgggaaactgctttgtgttatgtgccgcgagtctcgggagcacagacctcataccgctgttctgatggaaaaggccgctcagcctcatagggagaagatcctgaaccacctgtccacccttcggagagacagggataagatccaagggttccaggccaaaggggaggcggacattctagcagcactgaaaaagctgcaagatcagcggcaatacattgtggcagagtttgaacagggccaccagtttttaagggagcgagaggaacatcttctggagcaactggcaaaattggagcaggaactcactgaaggacgcgagaagtttaaaagtcgtggagttggtgaactggctaggctagctctcgtaatcagtgaactggaaggcaaagcacaacaacccgccgcagagttgatgcaggatacccgggattttcttaaccgctatcccagaaaaaagttctgggtgggaaaacctatcgccagagtcgtgaagaaaaagacgggggagttttctgataagttactgtccctgcaacgaggcctgagggagttccaggggaagctgttaagagatctggagtataaaactgtctctgtcactttggaccctcaaagcgcttctggttacctgcagctcagtgaagattggaaatgcgtgacttacaccagcctgtacaaatctgcgtatcttcatccacaacaatttgattgcgagcccggagtgctcggctctaagggatttacctggggcaaggtttactgggaggttgaggttgagagagaaggctggtcagaagacgaagaagaaggagacgaagaggaagagggagaggaggaagaggaggaggaggaagccggctatggagacggatatgacgactgggagacagacgaagatgaagaatctctgggagatgaagaggaagaagaagaagaggaggaagaagaggtgcttgaaagctgcatggtgggagtggcaagagattctgtcaaacgtaaaggagatttgagtcttcggccagaagacggggtttgggccctgaggctgtcgtcttcaggcatatgggccaatacaagtcccgaggccgaactgtttcccgccctgcgaccgaggcgcgtggggatagccctcgattacgaaggagggactgtgacatttactaacgccgaaagtcaagaactaatttacaccttcacagcaacatttacgcggcggctcgtccctttcctttggttgaagtggcccggcacaagattactgcttcgcccctag

SEQ ID NO: 269363 - DNA, 1620 bp, Artificial Sequence
  derived and/or modified sequence
atggccaccagcgcccccctgcggagcctggaggaggaggtgacctgctccatctgtctcgactatctcagggaccccgttaccatagactgtggacacgtgttctgtaggtcatgtacgactgacgtgcgccccatatccgggtctcggccagtctgccccctgtgcaagaagccgttcaagaaagagaacatcaggcctgtgtggcagctcgcctcccttgtggagaatatcgagcgactgaaggtcgacaaggggagacagcccggagaggtgacacgtgaacaacaggacgctaagctctgtgagcgccatcgggagaagctgcactattactgcgaggatgacggcaaactgctctgcgtgatgtgtcgtgaatctagagagcaccgtccacacacggccgtgctcatggagaaggccgcccagccacacagggaaaagatcttgaatcacctgtccactctgaggagggaccgagataaaatacagggatttcaggctaagggagaggcagacattctcgccgcactgaagaagctgcaggatcagcggcagtacattgttgcggagtttgagcagggccatcagttccttagggaacgcgaggagcatctcctcgaacagctggccaagctggagcaggagctaactgaaggacgcgagaagtttaaatcacggggggttggcgaactggcacgcctggcgctggtgatatccgagctggagggaaaggcccagcagccagccgcagaattgatgcaggacactcgggatttcctgaacaggtatccaagaaaaaaattctgggtcgggaaaccaatcgccagggttgtgaaaaaaaaaacaggcgaattcagtgacaaattgctgagcctgcaaagagggctgagagagtttcaaggtaagttactgagagatctagagtataaaaccgtgtctgtgacgctcgacccacaaagtgcctccggctacttacagttgtctgaagactggaaatgtgtcacatacacttccctttataaaagcgcctatctacatcctcagcagtttgattgtgaaccgggcgtgctgggatcaaagggtttcacttggggtaaagtgtactgggaagtggaagtggaacgcgagggatggagcgaggacgaagaagaaggcgacgaggaagaagaaggggaggaagaagaggaagaggaagaagcgggatacggagatggctacgatgattgggagactgacgaggacgaggagtccctgggggatgaggaggaggaggaagaggaagaggaggaggaggttctggagtcctgcatggttggagtggccagggattctgtgaaacgcaagggagacctgtcccttcggccagaagacggcgtttgggcgcttaggctgtccagctcggggatctgggcaaatacgtctcctgaggctgagctgtttccagcccttcggcctagaagagtaggaattgccctggattatgagggaggtacggtgaccttcaccaacgcagagtcccaagagcttatttacacctttacggctactttcacccgacgcctggtcccttttctctggctgaagtggccaggcacgcgtttgctgctcagaccctag

SEQ ID NO: 269364 - DNA, 1620 bp, Artificial Sequence
  derived and/or modified sequence
atggccaccagcgcccccctgcggagcctggaggaggaggtgacctgcagcatctgtctagattacctgagagacccggtcaccattgactgtggccatgtcttttgtcgcagctgtaccactgacgtgaggcctatcagtggttcacgcccggtgtgtccactttgcaagaagccatttaaaaaggagaacatcagaccagtgtggcagctggcttcccttgtcgagaatattgagcgcctcaaggtcgataaaggcagacaacccggcgaagtgacgagggaacaacaggacgccaagctctgcgagcgtcatcgagagaagctgcactattattgcgaggacgacggcaaactgctgtgtgtgatgtgcagagagtcaagggaacaccggccacacacagcagtgctgatggagaaggcagcccagccccaccgggaaaaaattctgaatcatctgtctacattaaggcgtgatcgtgataaaattcaaggctttcaggcaaaaggagaggccgacatcttagctgcgctgaagaagctgcaggatcagcggcagtacattgttgctgaattcgagcagggccaccagtttctcagggagagagaggagcacctgttagaacagcttgcaaagctggagcaagagctgaccgaagggagggagaaatttaagagtaggggggtaggtgagctggcgcggcttgccctcgttattagcgagctggaaggcaaggcacagcagccagctgccgagctgatgcaggacactcgtgatttcctgaatcggtatccacgtaaaaaattttgggtcggcaaacctatcgccagagttgtaaaaaaaaaaaccggcgagttttcagataaactgctcagcctgcagagagggctgcgggagttccaaggtaagctgctcagagacctggagtataagacagtaagcgttaccctggatccacagtcagcttccggttaccttcagctctcagaagattggaagtgcgtaacatatacttccctctataagtcagcatacctgcacccacagcagttcgactgcgaaccgggcgtgttgggatcaaagggcttcacctggggaaaagtttattgggaagtggaggtggagagggagggctggagcgaggacgaggaggagggtgatgaagaagaggaaggagaggaggaagaagaggaagaggaagccggatacggagacgggtatgatgattgggaaacggacgaagatgaggagtctcttggagatgaggaggaagaggaagaggaggaggaagaggaggttcttgagagttgtatggtcggtgtcgctcgggattcagtgaaacggaagggtgatctctcattgcgtcctgaagacggggtgtgggcccttcgtttgtcatccagtggtatatgggctaacaccagtccagaagcagaactgtttcccgcactgcggccccgtcgtgtgggcattgccctggattatgaaggcgggaccgtgacattcaccaatgccgagagtcaagagctcatttacactttcacggcgacatttactcggcgcttggtccctttcctctggctcaaatggcccggtacacgccttctcctgcgcccctag

SEQ ID NO: 269365 - DNA, 1620 bp, Artificial Sequence
  derived and/or modified sequence
atggccaccagcgcccccctgcggagcctggaggaggaggtgacctgcagtatttgcttagactacttgagggacccagtcaccatagattgtggccacgtgttttgcagaagctgtaccacggatgttcgccctatctcaggttctcggcctgtatgtccactatgtaaaaagccatttaagaaagaaaatatccggcccgtctggcagcttgctagcctggtggaaaatatagaacggcttaaggtagacaagggcaggcagccaggggaagtgacacgggaacagcaagacgccaagctgtgcgagagacaccgcgagaagttgcattactactgcgaagacgacggcaaactgctttgcgtcatgtgtagggagtcaagagagcacaggccacataccgcagtgcttatggaaaaagcggcacaaccacatcgcgaaaagatacttaatcacttgtccacccttcgtcgtgaccgtgacaaaatacagggcttccaagccaaaggcgaggccgacattctggccgctcttaaaaaactccaggatcagcgtcagtacatcgtggctgagtttgaacaaggccatcagtttttgagggaacgagaagaacaccttttggagcagttagccaagctggaacaggaactgaccgaaggcagagaaaagtttaagtccaggggggtgggtgaattagcccgactagcccttgtaatcagcgagctggaaggtaaagctcagcagcccgccgcagagcttatgcaggacacacgtgactttttaaatcgctatccacggaagaagttttgggtgggaaaacccattgctagggtggtgaaaaaaaaaaccggcgagttcagtgacaagctcctttctctgcagagaggtctccgggaattccagggcaaactcctcagggatttggagtataagactgtatcagtgacacttgacccccaatccgcctccggttacctgcagctttccgaggactggaagtgtgtgacctacaccagcttgtacaaaagtgcctacctgcacccccagcagtttgattgcgaacctggagttctgggctccaaaggattcacctggggcaaagtgtactgggaagtggaagtagaaagggagggttggagtgaggatgaggaagagggagatgaggaagaggaaggcgaggaggaagaggaagaagaggaggccggatatggcgatggctatgacgattgggagaccgatgaagacgaggagtccctgggtgatgaggaagaggaagaagaggaggaggaggaagaggtgctggagagttgtatggtcggcgtcgctcgggacagcgttaagagaaagggggacctaagcttgcggccagaggacggagtatgggcccttagactgtctagctccggtatctgggccaacaccagcccagaggccgaactcttccctgcactgagaccaaggagggttgggatcgcattggactatgagggtggtaccgtgaccttcactaatgccgagtctcaggagcttatttacacattcacagcaacctttactcgccgtcttgttccgttcctgtggctgaagtggcccggcacacggctgttgctccggccatag

SEQ ID NO: 269366 - DNA, 1620 bp, Artificial Sequence
  derived and/or modified sequence
atggccaccagcgcccccctgcggagcctggaggaggaggtgacctgttctatctgtttggactacctccgcgaccctgtgactatcgattgcggacacgtgttttgcaggtcatgcacaaccgatgtgcggccaatctctggctctcgtccggtgtgccctctctgcaagaagccgttcaagaaagaaaacattcgcccggtatggcaacttgcctctctggtggagaacatagaaagactcaaggtggataagggcaggcaaccaggggaggttacacgcgagcagcaagatgccaagctgtgtgagaggcaccgcgaaaagcttcactactattgtgaggacgacggtaaattgttgtgcgtcatgtgcagggaaagccgggaacacaggccccatacggcagtgctgatggagaaggccgctcagcctcacagagagaaaattctgaatcacttgagtactttgagacgtgaccgggacaagatccaggggtttcaggccaagggggaggccgatatcctcgcggctctcaagaagctgcaggaccagagacagtacatcgtggctgaatttgaacagggtcatcagttcctccgtgaacgagaagaacacctgctggagcagctagctaagctcgaacaggagctgacagaagggcgggaaaagtttaaatcgcgcggcgtgggtgagctcgctcgtttggccctcgtgatcagcgaactcgagggtaaagcccaacagccagcagctgagttgatgcaagacacacgtgattttctgaaccgttatccgcggaagaagttctgggtgggcaagcctatcgcacgggtggtgaaaaagaagacaggcgaattttccgataagcttctgtccttgcaacgcggcctgcgcgagtttcagggcaagctccttcgcgacctggaatacaagaccgtgtcggtgactctggatcctcagtccgcttccggatacttacaactgagtgaagactggaaatgtgtaacatatacgagcctttacaaatcagcatatcttcatccgcagcagttcgactgtgagcccggagttctgggtagcaaaggatttacttggggcaaagtatattgggaagtggaagtcgaacgcgaagggtggagcgaggatgaagaggagggggacgaagaggaggaaggtgaggaagaagaagaagaagaagaggccggttacggggacggatacgatgactgggagaccgacgaagatgaagaatctttaggagacgaggaggaggaggaagaagaggaggaagaagaagtgcttgagtcatgcatggtgggcgtggctagggatagcgtgaaacggaagggtgacctctcgttgcggcctgaagacggcgtgtgggccttacgcctgagttcatcgggcatctgggcaaatacctcccctgaggcagagctctttcccgccctgcgacccagacgagtgggtatagcattggactacgaaggcggtacggtgacatttacaaacgctgagtcccaggagctgatctatacatttacggcaacttttacccgcaggctggtaccttttttgtggttgaagtggcctggaacccgtctgctcctacggccctag

SEQ ID NO: 269367 - DNA, 747 bp, Artificial Sequence
  derived and/or modified sequence
atggccaccagcgcccccctgcggagcctggaggaggaggtgacctgcagtatctgtctggactatctgcgggacccagttaccatcgactgcggccatgttttctgccgtagctgcaccactgacgttaggcctattagcgggtccagacctgtttgccctctgtgtaagaaaccattcaaaaaagagaatatccgcccagtctggcagttggcttcgctggtcgaaaacattgaacgactaaaagtggacaagggcagacaacctggagaagtgactcgggagcagcaggatgccaaactttgtgagagacatagagaaaagctacattactactgcgaagacgatgggaagcttctgtgtgttatgtgccgggagtcccgcgaacatcggccccacacagccgtcctgatggagaaagccgcacaaccccatcgcgagaagattttaaaccacctctcgacgctgcggcgtgatagagataagatccagggctttcaagctaaaggcgaggccgatattctggcagccttgaagaagctgcaggatcagaggcagtacatagtggccgagttcgagcagggacatcagtttctgcgagagcgcgaagagcacctgcttgaacaactggcaaagctggagcaggagctgacagaggggcgtgaaaagtttaagagcagaggagtaggggaacttgccaggctggctctggtgatctccgagctagaaggaaaggcacaacagtag

SEQ ID NO: 269368 - DNA, 1620 bp, Artificial Sequence
  derived and/or modified sequence
atggccaccagcgcccccctgcggagcctggaggaggaggtgacctgtagcatatgcctggactacctcagggaccctgtgacgattgattgtggtcacgtgttctgtcgatcttgtacaaccgacgtgagaccgatttctggaagccggccagtttgtcctctgtgcaaaaaaccttttaagaaggaaaacattcgtcccgtgtggcagctggcctccctcgtcgaaaacattgagaggcttaaggtcgataaaggaagacagcccggcgaggtgaccagagagcagcaggacgcgaagctctgcgagcgccacagggagaaattacactactactgcgaagacgatggaaagcttctctgtgttatgtgcagggagagccgggaacatcgaccccacaccgcagtgctaatggagaaggctgcccaaccccatcgcgaaaagattcttaatcacttgagcactttacgtcgcgacagagataaaattcagggattccaggccaagggggaagcagacatcctggcagcgctcaaaaaactacaggaccagaggcagtacatcgtggctgaatttgaacaaggccaccagttcttgcgagaaagggaagagcatctgctggagcagctcgctaaactagaacaggaattaactgaagggcgcgaaaaattcaagagccgaggcgttggcgaattagcacggctcgctctggtcatttcagagctcgaaggcaaagctcaacagcctgctgccgaactaatgcaggacactagagatttcctgaaccggtaccccagaaaaaaattttgggtgggcaaacccatcgccagggtcgtcaaaaagaagactggagagttcagcgacaagctgctgagcctgcagcgtgggctacgagaatttcaaggaaagctgcttcgagatttggagtacaagaccgtgtccgtgacactggatcctcaaagcgcatccgggtatctccagttgtctgaggactggaagtgtgtgacctatactagtctgtataagagcgcgtatcttcacccacagcagtttgactgtgagcctggcgtactcggatcgaaaggctttacatggggaaaagtctactgggaggtggaggtggagagagaagggtggagcgaggacgaagaagaaggtgatgaggaagaagagggggaagaggaggaagaagaggaagaagcagggtacggtgacggttacgatgattgggaaactgacgaagatgaggagtccttgggcgatgaagaagaggaggaggaggaggaggaggaagaagtcctggaaagttgcatggtgggagtcgcgcgcgattccgtgaagcggaagggagacctctcactgagacccgaggatggcgtgtgggcgctgaggctgagctcctccggaatctgggccaacaccagccctgaggccgagctatttcccgcattgcggcccagacgagtcggtatagctctggattatgaaggggggactgtcacatttactaacgcggagtctcaggaactcatttacactttcacggccacatttacacgtagactcgtgccttttctgtggttgaagtggccaggcacaaggctgctgcttcgaccctag

SEQ ID NO: 269369 - DNA, 1620 bp, Artificial Sequence
  derived and/or modified sequence
atggccaccagcgcccccctgcggagcctggaggaggaggtgacctgtagcatctgcctggactatctgcgcgaccctgttacgatcgactgtggccacgtgttctgtcgcagctgcaccactgatgtgcgcccaattagcggcagtcgacccgtctgccccttgtgtaagaagccctttaaaaaggagaacattcgacccgtgtggcaactggcgtccttggttgagaatatcgagcgactgaaggtggataagggcagacagcccggcgaagtgactcgagagcaacaagatgccaaactgtgtgaaaggcaccgagaaaagttacactactactgcgaagacgacggtaagcttttgtgcgtgatgtgcagggagtccagggaacaccggccacacaccgccgtgctgatggaaaaggcggcccagcctcaccgggaaaagattctcaatcatctatctacattgcgcagagaccgggacaagatccaaggcttccaggctaagggtgaggctgatattctcgcagccctgaagaagttacaggaccagcgccagtatatcgtcgcggaattcgaacaaggtcatcagttcctgcgggagagagaggaacacttgctggaacaactggcaaagcttgagcaagagctcactgagggacgggagaagttcaaatcacggggagttggagagctcgcgcgtctcgcgctcgtgatttcagagctggagggaaaggcccagcagcccgccgctgaactgatgcaagatactcgtgactttctcaaccgttaccctaggaaaaaattttgggttggcaaacccatcgcccgcgtcgtaaagaaaaaaactggtgagttttccgataaactgctctcgctgcagaggggcctgcgggaatttcaagggaaattactccgcgacctagaatacaagaccgtcagcgtgacgctggatccacagtctgcgtcaggatacctacagctctctgaggattggaaatgcgtaacctacacttccctgtataaatccgcctacctacatccacaacaatttgactgcgaacccggagtattggggagtaagggttttacctggggcaaggtgtattgggaggtggaggtcgagcgagagggatggtctgaagacgaggaggagggtgatgaggaggaggaaggcgaggaggaagaggaagaagaagaagccggatacggcgatggatacgatgactgggaaacggacgaggatgaagaatccctgggagacgaggaggaagaggaggaagaagaagaagaagaggtccttgaatcttgcatggttggggttgctagggattccgtcaagcgaaagggtgacctctctctaaggcccgaggatggggtctgggcactgcgattaagctctagtggaatttgggccaacacgagccctgaggccgaactctttcccgccctgcgtccacgcagagttggaatagcactagattacgagggcgggaccgtgacttttacgaatgctgaatctcaggaattgatatatacattcactgcaacttttactagacggcttgtgccctttctttggctcaaatggcctggaaccagacttctcttgaggccatag

SEQ ID NO: 269370 - DNA, 1620 bp, Artificial Sequence
  derived and/or modified sequence
atggccaccagcgcccccctgcggagcctggaggaggaggtgacctgtagtatttgcctggattatttacgggatccagtcacgatcgactgtggacacgttttttgccgatcatgcactacggacgtccgacccatctcaggttcaaggcccgtatgccctttgtgcaagaaaccatttaagaaggagaacatcagacccgtttggcagctggcctcccttgtagagaacatcgaaagattaaaggtcgacaagggcagacagcctggcgaagtgacaagagaacagcaggacgctaagctttgtgagagacatcgagaaaaactccattattattgtgaggacgacggtaagctcctgtgtgtcatgtgtcgggaatcacgggaacaccgcccacacacagccgtcttaatggaaaaggcggcacagccacaccgggaaaagatcctcaaccatctctcgacacttcgtcgggaccgtgataaaatacaaggttttcaggccaaaggagaggcagatatccttgccgccctcaaaaaactccaggaccaaaggcagtacatcgtggcagaattcgagcaggggcaccagttcctgcgggagagagaagagcacctgctagaacaactcgccaagcttgagcaggaactcacggagggcagagaaaaattcaaaagccgaggcgttggagagctcgcacgtttagctctcgttatttccgagctggagggtaaggctcaacagcctgccgccgagctcatgcaagacaccagagactttctgaatcggtacccacggaaaaagttttgggtgggaaagcctatagcccgcgtggtaaagaaaaagacgggcgagttctccgataagttgctgagtctgcaaaggggtctgcgggagtttcaaggaaagctgctgcgggacctggagtacaaaactgtttctgttactcttgatccccagtccgccagcgggtacctccagttgagcgaggattggaagtgcgtaacatacacatccctgtacaaatctgcatatctccatccgcagcagttcgattgtgagccaggcgtcctcggcagtaagggcttcacctggggcaaggtttattgggaagtcgaggttgaacgggaagggtggtctgaggatgaagaagaaggcgacgaggaggaagaaggggaagaggaagaggaagaagaggaggccggctatggagacggctacgatgattgggaaaccgatgaggacgaggagtcgctcggagacgaagaggaggaagaggaggaggaagaggaagaggtcctcgaatcatgcatggtcggggtggcgcgcgattccgtgaaacgcaaaggagacctgtcactgagacctgaggacggtgtgtgggcactgcggctatcctcctctggcatttgggctaatacatcacctgaggccgaattgtttcctgctctccggccaaggcgggtagggatcgccctggactacgagggcggaaccgtgacttttaccaacgccgaatcacaggagttgatctacacattcacagcaacattcaccaggagactggtgcctttcctgtggctgaagtggccgggcacacgacttctcctgaggccctag

SEQ ID NO: 269371 - DNA, 747 bp, Artificial Sequence
  derived and/or modified sequence
atggccaccagcgcccccctgcggagcctggaggaggaggtgacctgtagcatctgtttagattacctgagggatccggtgactatagattgcgggcacgtcttctgccggagctgtaccactgacgtgcggccaattagcggatcccgtccagtgtgtcctttgtgcaagaagcctttcaagaaagagaatataagaccagtctggcagctcgcctccctagtggagaacattgaacgcctgaaggtagacaaagggagacagcccggagaagttacgagggagcaacaggacgcgaaattgtgtgagaggcaccgcgaaaagctgcactactattgcgaggacgatggaaagttgctctgtgtgatgtgtcgggagtcccgcgagcatcgtccacacacagcggtcttaatggagaaagccgctcaaccccatagggaaaaaatcttaaaccacctgtcaacactcagaagggacagggacaagatccaagggttccaagccaagggagaggcagatatactcgctgccttaaagaagcttcaagaccaaaggcagtatattgtcgcggagttcgagcaaggccatcagtttctacgtgaacgggaggagcatctgctggaacagctggccaagctggagcaggagttaaccgagggacgcgagaagtttaaaagccgcggagtgggcgaactcgcaagacttgccctggtgatcagcgaactcgagggtaaggctcagcagtag

SEQ ID NO: 269372 - DNA, 747 bp, Artificial Sequence
  derived and/or modified sequence
atggccaccagcgcccccctgcggagcctggaggaggaggtgacctgtagtatatgtctcgactacctgagagaccctgtaactattgactgtgggcacgtcttctgcagatcctgtacaaccgacgtcaggcctattagtggaagccggccggtttgtcctctatgtaaaaagccctttaaaaaggaaaacattcgtcccgtgtggcaactagcttcccttgtagagaacatcgagaggctgaaagtagacaagggaagacaacctggggaggtgacccgagagcaacaggatgctaaattatgcgagcgccaccgagaaaagttgcactactactgcgaggatgatggtaagctcctgtgtgtgatgtgcagagaatcaagagaacaccgccctcatactgccgtcctcatggaaaaagccgcccagccccatcgagaaaaaatccttaaccatctttctacgctgcgtagagaccgggacaagatccagggcttccaagcgaaaggggaagccgacatcctggccgccctgaagaaattgcaggaccaacgccagtatattgtcgcagaattcgaacaaggacaccagttcttacgcgagagggaggagcacttgcttgaacaattggcaaagctggaacaggaactgactgagggaagggagaaattcaaatctaggggagtaggggaactggccaggctcgcccttgtcattagcgaattggaagggaaagctcagcagtag

SEQ ID NO: 269373 - DNA, 1620 bp, Artificial Sequence
  derived and/or modified sequence
atggccaccagcgcccccctgcggagcctggaggaggaggtgacctgttctatttgcctcgattacctgcgggacccggtgacaattgattgtggccacgtgttctgccgcagttgcactacggatgttagacccatctctgggagtagacctgtttgcccgttgtgcaaaaagccatttaagaaggaaaacatcaggcccgtatggcagctggctagcttagttgagaacatagagcggctgaaggtggacaaagggcgacagcccggtgaagtgactcgagagcaacaggacgctaagctttgtgagcgccaccgcgagaaactccactactattgtgaagacgatggcaaactgctgtgcgtaatgtgtagggaatcaagagagcaccgcccgcacaccgctgtactcatggaaaaagctgctcagccccaccgggaaaagattcttaatcacctgtccactctccggcgggaccgtgataagatccagggttttcaagccaagggcgaggccgatatcctggctgccctgaaaaaactccaagatcaacggcaatatattgtagctgaattcgagcaggggcaccagtttctgcgcgaacgggaagagcacctgctcgagcaacttgccaaacttgaacaggagctgacggaaggacgggaaaagttcaagtcccgcggagtcggcgaactggccagactggcactggttatctctgagctcgaaggcaaagctcaacaaccagcagcagagctgatgcaggacactagagacttcctcaatcggtacccccgcaagaagttctgggtgggaaaacccatcgccagggtcgtgaaaaagaagacaggggagttctcagataagctgctcagcctccagcggggactgcgagagtttcagggtaagctgttaagggatttggagtataaaacagtctctgtgacccttgaccctcaatcagctagtggatacctgcagcttagcgaggattggaagtgcgtgacctatacatccctgtacaaatcagcctatttacacccccaacaatttgactgtgaaccgggcgtgttagggagcaaaggtttcacgtggggcaaagtttattgggaagttgaggttgagcgggagggttggtccgaggacgaggaagaaggcgacgaagaggaggagggcgaagaggaagaggaggaggaagaagctggctacggggacggctacgacgattgggaaactgacgaagacgaggaatctctgggcgacgaagaagaggaggaagaggaagaggaagaagaggtattagaatcttgtatggtgggagtcgccagagattctgttaaacgtaagggcgatctcagtctcaggccggaggatggagtgtgggccctgagactttcctcctcaggcatttgggcaaacacatcacccgaggccgaactcttccccgcactgagacctcgcagggtgggcatcgcattagactacgagggcgggacggtgacattcactaacgcggaaagtcaggaactgatttatactttcacagcgacctttacacgtcgcttagtgcctttcctttggctcaagtggcctggaactaggctgctgcttcgcccctag

SEQ ID NO: 269374 - DNA, 747 bp, Artificial Sequence
  derived and/or modified sequence
atggccaccagcgcccccctgcggagcctggaggaggaggtgacctgtagtatatgcttagactacttacgcgatcccgttaccattgactgcgggcacgttttttgtcgctcctgtaccacagacgttaggcctatctcagggagcagacccgtgtgccccctgtgtaagaaaccctttaaaaaggaaaatattagaccagtttggcagctggcgagtttagtagagaatatagagcgtttaaaggtcgataaagggagacagcccggggaagtgacccgggaacaacaggatgcaaaactttgcgagcggcaccgagaaaagttgcattactattgcgaggatgacggtaagttactgtgtgttatgtgtcgcgagagtcgcgaacacagaccccacactgcagttcttatggaaaaagccgcacagccccaccgggagaagatcctgaatcacttgtcaactttgaggcgcgaccgagataagattcaagggtttcaggctaagggcgaagccgatatcctggcagccttaaagaagctgcaagaccagagacagtatatcgtggcagaatttgaacagggacaccagttcttgcgtgagcgcgaggaacacctccttgaacagcttgccaagctggagcaagaactgacagagggccgggagaagtttaaatctaggggagtcggcgagctcgcacgacttgcccttgtgattagcgagctggaggggaaggctcagcaatag

SEQ ID NO: 269375 - DNA, 1620 bp, Artificial Sequence
  derived and/or modified sequence
atggccaccagcgcccccctgcggagcctggaggaggaggtgacctgttccatctgcctggattatcttcgtgaccctgtgacaatcgattgcggacatgtgttctgccggtcatgtacaactgatgtcaggcccatttcaggctcccgccccgtttgccccctgtgtaaaaaaccttttaagaaggagaatatccgccccgtgtggcaacttgcatctctggtggaaaacatcgagagactgaaagttgataagggaaggcaaccaggagaagtcactagggagcagcaggatgccaagctgtgcgaacgtcatcgagagaaacttcactattactgtgaagatgatgggaagctgctgtgtgtgatgtgtcgcgaatcacgagagcatcgaccacacacggctgtgctaatggaaaaggctgcccagcctcaccgggaaaagattttgaaccatttaagcacattacggcgagaccgggacaaaattcaggggtttcaggccaaaggagaggccgatatcctggctgctctgaagaagctgcaagaccagaggcagtatatcgtcgctgaattcgagcaggggcaccagttcctcagagagagagaagagcatttgctcgagcagctcgccaaactggagcaggagctgactgaagggagagagaagttcaagtcccggggcgtcggagagttggcaagactggcactggtcatttcagagcttgagggaaaggcccagcagcctgcagcggaactcatgcaggacactcgcgatttcctcaacagatacccccgtaaaaaattctgggtgggtaagcccatagcgagagtcgtgaagaagaagactggggagttctcagacaaactactcagcttgcagcggggcctgcgggaattccagggcaagctccttagagacctggagtacaagaccgtgagtgtgacgctggatccgcaatccgcctctggctacttgcagctcagcgaggactggaagtgcgtgacttacacctcgctttacaaatctgcctatctgcatcctcagcagtttgactgcgaacccggagtcttggggtccaaaggcttcacctggggtaaggtttattgggaggtggaggtggagagggaaggatggtccgaggacgaggaagagggcgacgaggaagaggagggtgaggaggaagaagaagaggaagaagccgggtacggagatggttacgacgattgggagaccgacgaggacgaggaaagcctgggggacgaggaggaggaagaggaagaagaggaggaggaggtgctcgagtcatgcatggtgggcgtggctagggacagcgtaaaaaggaagggagatctgtctctgagacctgaagatggcgtgtgggccctccggctttcgagttccgggatttgggctaacacatccccagaggcagagctcttccctgccctacgcccccgccgggtgggcatcgccctcgactatgagggtgggacggtcactttcaccaatgccgagagtcaggagttaatctacacattcactgcaacctttactcggcggctggtgccattcctgtggctcaagtggccgggtacgagacttcttctccggccgtag

SEQ ID NO: 269376 - DNA, 1620 bp, Artificial Sequence
  derived and/or modified sequence
atggccaccagcgcccccctgcggagcctggaggaggaggtgacctgcagcatttgtctagactatctccgagacccggtaactatcgattgtggccacgtgttttgtcgctcttgcaccactgacgtccggcctatcagcggaagcagacccgtctgccccctgtgcaaaaaaccattcaaaaaggagaatatccgacctgtgtggcagctggcctccttagttgaaaatattgagagactaaaagtggataaaggacgccagccaggagaagtgacacgtgaacaacaggatgcaaagctctgcgaacgtcatcgggagaagctgcactactattgtgaagacgacgggaagctgctatgcgtgatgtgtcgcgagtccagggagcaccgcccccatacagccgtgctcatggagaaggcagcgcagcctcatagagaaaaaattctcaatcacctcagcacactgcgaagagatagagacaaaattcagggctttcaagcaaagggcgaggccgacatcttggctgctctgaagaaactccaggaccagagacagtacatagtggcggagtttgagcagggtcaccagtttctgcgggagcgggaggagcacctccttgagcagttggcgaaactggaacaggagctcaccgagggaagagaaaagttcaaatcgagaggtgtcggcgagctggcacggctggctctagttatctccgagctcgagggaaaggctcaacaacctgcggccgaacttatgcaagatacgcgcgattttctcaaccgctacccaagaaagaagttttgggtggggaagccgatcgcaagagtcgtgaagaaaaagactggagaattcagcgataaactcctttccctccagcggggactgcgcgaatttcagggtaaactgttgcgagatctggagtataaaaccgtgagtgtaacattggacccacaatctgcctcaggctacctccaactttcagaagattggaaatgtgtgacatatacttcattatataagtccgcatatctccatccccagcaattcgattgtgagcctggcgtgctgggcagtaaggggtttacttggggtaaagtgtactgggaggtagaagttgagagagaaggctggagtgaagacgaggaagaaggggacgaggaggaggaaggtgaagaggaggaggaggaagaagaggcagggtatggggacggctacgatgattgggagactgacgaggacgaagagagtctcggtgacgaagaggaggaggaggaagaagaagaggaggaggtgctggagagttgtatggtcggcgtcgccagggatagcgtgaaaaggaagggggacttatcattgcgccctgaagatggcgtatgggctctgcgattaagtagtagcggaatctgggcaaacacatcccccgaagccgagctgttcccagcactccgaccacggcgggttgggatagccttggactatgaggggggaacagttacctttaccaatgcagagtctcaagagctcatatacacctttacagctacgttcacccggcggcttgtgcctttcctgtggctgaagtggcctggaactaggctgctcttacgtccatag

SEQ ID NO: 269377 - DNA, 1620 bp, Artificial Sequence
  derived and/or modified sequence
atggccaccagcgcccccctgcggagcctggaggaggaggtgacctgtagtatctgcctggactatttgagggaccctgttacaatcgattgcgggcatgtgttctgtcgtagttgcacaacagacgtacgccctatttctgggagcaggccggtgtgccccctgtgcaagaagccctttaagaaggaaaatatccgtccggtgtggcaacttgcctccctggtggagaatattgagagactgaaggtggacaaaggtcggcagccgggcgaggtaacacgcgagcagcaagacgcaaagctttgtgagagacaccgagagaaattacactattactgcgaggatgacgggaagctgctatgtgtgatgtgccgggaatcccgggaacacagaccacatactgctgtcctgatggaaaaggctgcacaaccccatcgcgagaagattctgaatcatttgagtaccctccggcgtgatcgggataaaattcaaggcttccaggcaaaaggcgaggccgacatcctggcggcactgaaaaagttacaggatcagaggcaatatattgttgcagaattcgaacaaggacaccaattcctgagagagcgcgaagagcacctcctcgagcaacttgctaaattggaacaagaactgaccgaggggcgtgaaaagtttaagtcacggggagtgggggaattggcccgattggcactggtgatctccgaactggaggggaaagcccagcagccggccgcagagctgatgcaagacactagagacttcctgaatcgctatccgaggaagaaattctgggttggaaagcctatagctcgggtcgtgaagaagaaaacgggagagtttagcgacaaacttcttagtctccagcgcggcctcagagagtttcagggtaaactgctccgggacttagaatataagaccgttagcgttacacttgatccacaaagtgcctctggatatctgcaactgtctgaggattggaagtgcgtgacctatacctccctatacaagtccgcctacttgcatccacagcagttcgactgcgaaccaggggtgctggggtcaaaaggattcacctggggaaaggtgtattgggaagtggaggttgagcgggagggctggagcgaggatgaggaagaaggggacgaagaagaggagggcgaggaggaagaggaagaggaggaagcagggtacggggatggatatgatgactgggagactgacgaggatgaggaaagcctgggagacgaggaagaggaggaggaggaagaagaagaagaggtgttggagagctgcatggttggagtggcacgcgattctgttaaaagaaaaggagatctgtccctcaggcctgaagatggcgtatgggcccttaggctgagttcctccggcatttgggccaacacaagccccgaggctgagctcttccccgctctaaggcctagacgagtgggcatcgccctagattacgaagggggtacagtgacgttcacgaatgccgagtcccaggaattaatttacacctttacagccacctttaccagaaggctggttcccttcctgtggctgaagtggcccggaactagactgctgctgagaccttag

SEQ ID NO: 269378 - DNA, 1620 bp, Artificial Sequence
  derived and/or modified sequence
atggccaccagcgcccccctgcggagcctggaggaggaggtgacctgctcaatttgtctggactatctgagggacccggtgacgatcgactgcggccatgtcttctgcaggtcatgtactaccgacgtgcgcccaatctctggctcaaggcccgtgtgccctctttgtaaaaagcctttcaagaaggaaaacatccgacccgtctggcagctggcatccctcgtagagaacatcgaacgtctgaaggtcgataaagggaggcaacccggagaggtcacgcgggaacagcaagacgccaaactgtgcgaaagacatcgcgagaaattgcactactattgtgaagacgacgggaagctgctttgtgtaatgtgccgagagagtagagagcacagaccgcataccgccgttctcatggagaaggcggctcaacctcatcgcgagaagatactgaaccatctcagtacactgaggcgggaccgagacaagattcagggcttccaggccaagggtgaagccgatattctcgcagctttgaaaaaactgcaagatcagagacagtacatagttgccgaatttgaacaaggccatcagttcctgcgtgagcgggaggagcacctgcttgaacagttagccaaattggagcaagaactgaccgagggcagggaaaagtttaagagccgcggggtgggggagctcgccagactggccctggtcatctccgagcttgagggcaaggctcagcagcccgcagccgaactgatgcaagacacacgggactttctgaaccgatatccgcggaaaaaattctgggtgggaaagcctatcgcgcgggtggtcaagaagaagactggcgaattctccgataagttgctctccctgcagcgaggactgcgcgagttccaggggaagctgctgagggatctagagtataagacagtttctgtgaccttggaccctcagtcagcctctggttacctgcagttgagcgaggattggaagtgcgtgacctatacctctctctacaagtccgcgtatctgcacccgcagcagttcgattgtgaacccggcgtattagggagcaaggggttcacatggggtaaggtctactgggaagtcgaggtggagagagaggggtggtctgaagatgaagaggagggcgacgaggaggaagagggagaagaagaggaagaagaggaagaggctgggtatggggacggctatgatgattgggaaactgatgaggatgaagaatcactgggtgacgaagaggaggaagaagaagaagaagaggaagaggtgcttgaatcatgtatggtcggcgtcgcaagggacagcgtaaagagaaaaggcgatctgagcctccggcctgaagacggtgtctgggcacttcgcttgtcctcctccggaatctgggcaaacacaagtccagaagctgagcttttcccagcgcttcggcccagaagagtgggcatagcattggattacgaaggagggacagtcacctttacaaatgcagagtcacaggagttaatatacacctttaccgcaacatttacccgtcgactcgttccttttctgtggctcaaatggcccggaacacgcttactgttgcgcccttag

SEQ ID NO: 269379 - DNA, 1620 bp, Artificial Sequence
  derived and/or modified sequence
atggccaccagcgcccccctgcggagcctggaggaggaggtgacctgtagcatttgcttggactaccttcgggatccagtcaccatcgactgtggacatgtcttctgtaggagctgcacgacagatgtgcggcctatatccggctccaggcctgtctgcccgttgtgtaaaaaaccctttaagaaggagaatattcgaccggtatggcaattggcctccctcgtggagaacatcgaacggctgaaggtagacaagggccgccagccaggagaagtcactcgcgaacaacaagacgccaagctgtgtgagcgccatcgggaaaaactccactactactgcgaggacgacgggaagcttctctgcgtaatgtgccgggagtccagagaacatcggccccataccgctgtgttgatggagaaggctgctcagcctcacagagaaaagattctgaaccacctgagcactcttcgaagagatcgcgacaagattcaagggttccaggccaagggggaggccgatatcctggccgcattgaagaagcttcaggatcagcgtcagtatatcgtcgccgagttcgaacagggccatcagtttctgagagaacgagaagagcatcttcttgagcagctcgcaaagctcgagcaggaattaactgagggccgggaaaagttcaaatcccgcggagtgggggagcttgcacgattggctctggtgatttccgagcttgagggcaaagcgcagcagcccgccgctgagctaatgcaggacactcgcgatttccttaatagataccctaggaagaagttctgggtaggtaaaccgatagcgagggtcgttaagaaaaaaaccggggaattcagtgataaactcctgtccttgcaaagaggattgcgcgagttccagggtaaactgctgcgggacctggagtacaagaccgttagcgttaccctcgacccacagtcggcttccgggtacctgcaactgagcgaggactggaaatgtgttacctatacaagcctttacaagtccgcatacttgcaccctcagcaattcgattgcgagcccggagtgcttggatctaagggattcacatggggcaaagtctactgggaagttgaagttgaaagagagggatggtccgaagacgaagaggagggcgatgaagaggaggagggagaggaggaggaggaggaagaggaggccggatacggtgatggatacgatgactgggaaactgatgaagatgaagagtccctgggtgacgaggaagaggaagaggaggaggaggaggaagaagtgctcgagagctgcatggtaggggtggcacgtgactcagttaaacggaagggggacctgtctctgcggcccgaggacggagtgtgggctttaaggctaagctcctccggtatctgggccaatacgtcacctgaggcagaacttttccccgctctgcgaccccggagggtcggaattgctctcgactacgaggggggcaccgtgaccttcacgaacgccgagtcacaggagctgatatatacattcaccgccacttttacacgtcggttggttccctttctatggcttaagtggcccggaactcgcctgctattaagaccctag

SEQ ID NO: 269380 - DNA, 1620 bp, Artificial Sequence
  derived and/or modified sequence
atggccaccagcgcccccctgcggagcctggaggaggaggtgacctgctccatatgtctcgattacctgagagatccggtgacaatcgattgcggccatgtattttgtagaagctgcaccactgatgtgcgccctatttctggcagtcgaccggtgtgccccctgtgcaaaaagccgttcaaaaaggaaaacatcaggcctgtatggcagctggctagtctggtggagaatattgaaaggctcaaagtagacaagggcaggcagcccggagaagttacccgagagcagcaggacgctaaattgtgtgaacgccatagggaaaaactccactactactgtgaggatgacggaaaactactctgcgtcatgtgtcgcgaatcccgggagcaccggccgcatacagccgtcctgatggagaaggctgcacagcctcaccgcgaaaaaattctgaaccacttaagcacactgcgcagggatagagataagattcaggggttccaggcaaagggcgaggccgacatcttagccgccttaaaaaagctgcaggatcaacgccagtacattgttgctgagtttgagcagggacaccagtttctcagagagagagaggaacatcttcttgagcaactagccaaactggagcaggagttgaccgaaggcagggagaaattcaagtctcggggggtaggggaactggcccgcctggctttggttatctctgagctagaagggaaggctcagcagcccgccgccgaattaatgcaagatactcgtgactttctgaatagatacccccggaagaagttctgggtgggtaagcctatcgcccgagtagtgaaaaaaaagactggtgagttctctgataagctgctctccctgcaaagagggttgagagagtttcagggcaagctgcttcgcgacctggagtataagacagtcagtgtcacactggatcctcagagtgcatcaggttatttgcagttgtccgaagattggaaatgcgtcacttataccagcctatacaaaagtgcctacttacacccgcagcagtttgattgtgaaccaggcgtgctgggcagtaaagggtttacatggggcaaagtctactgggaagtggaggtagagcgtgaaggctggtcagaagacgaagaggagggcgacgaggaggaggaaggagaggaagaggaagaagaggaggaggcgggttatggcgatgggtatgacgactgggaaactgacgaggacgaagagtccctcggggatgaagaagaggaagaagaggaggaggaggaggaggtgcttgagtcatgcatggtgggagtggcacgtgactcagtgaagcggaagggcgatctgagccttcgcccggaagacggcgtgtgggcgctcaggctgagctcctcggggatctgggctaatacctcgccagaggctgagttatttccagcgctgcggccaagacgagtgggcatcgccctcgattatgagggggggacagtgacctttacaaatgcagagagccaagagctgatatacaccttcactgccacctttacgcgccgtctggtgccctttctgtggctcaaatggcccggcacccggttgctcctgcggccatag

SEQ ID NO: 269381 - DNA, 1124 bp, Artificial Sequence
  derived and/or modified sequence
acggggcggggacgagctgtcgcgctggttgctcgtgcaggagcgggacccggaacagaccgccgtgagagaggaggggtgccggccgggattcgcggcccggagctcgggaccggagtcaggaatggagagaagggtaatggttttacctcttattgtggaaacctgttgagatcacagagaatatactgacggcataaaagggcagaaccatagcagggtgcggttgcttcattccagcctcgcagtcacctctgtgccctgctggttgtcttcccagcgctgctgtagttgccttccatggatctataggagagcaagtcctccaggagaagaagtcctcaccagtgaacggagacctctctgaactaaggataccatggccacgtcagccccactacggagcctggaagaggaggtgacctgctccatctgtcttgattacctgcgggaccctgtgaccattgactgtggccacgtcttctgccgcagctgcaccacagacgtccgccccatctcagggagccgccccgtctgcccactctgcaagaagccttttaagaaggagaacatccgacccgtgtggcaactggccagcctggtggagaacattgagcggctgaaggtggacaagggcaggcagccgggagaggtgacccgggagcagcaggatgcaaagttgtgcgagcgacaccgagagaagctgcactactactgtgaggacgacgggaagctgctgtgcgtgatgtgccgggagtcccgggagcacaggccccacacggccgtcctcatggagaaggccgcccagccccacagggaaaaaatcctgaaccacctgagtaccctaaggagggacagagacaaaattcagggcttccaggcaaagggagaagctgatatcctggccgcgctgaagaagctccaggaccagaggcagtacattgtggctgagtttgagcagggtcatcagttcctgagggagcgggaggaacacctgctggaacagctggcgaagctggagcaggagctcacggagggcagggagaagttcaagagccggggcgtcggggagcttgcccggctggccctggtcatctccgaactggagggcaaggcgcagcagc

SEQ ID NO: 269382 - DNA, 3478 bp, Artificial Sequence
  derived and/or modified sequence
aacagaccgccgtgagagaggaggggcgccggccgggattcgcggcccggagctcgggaccggagtcaggaatggagagaagggtaatggtgttacctcttattgtggaaacctgttgagatcacagagaatatactgacggcataaaagggcagaaccatagcagggtgcggttgcttcattccagcctcgcagtcacctctgtgccctgctggttgtcttcccagcgctgctgtagttgccttccatggatctataggagagcaagtcctccaggagctggtggtgtctgtcgattgactgagtgctggagctggcagccctgtgcaggctgccacctttgcccctttactgtgcttgctcctgactctacgtcgcgtctccaaggagaagaagtcctcaccagtgaacggagacctctctgaactaaggataccatggccacgtcagccccactacggagcctggaagaggaggtgacctgctccatctgtcttgattacctgcgggaccctgtgaccattgactgtggccacgtcttctgccgcagctgcaccacagacgtccgccccatctcagggagccgccccgtctgcccactctgcaagaagccttttaagaaggagaacatccgacccgtgtggcaactggccagcctggtggagaacattgagcggctgaaggtggacaagggcaggcagccgggagaggtgacccgggagcagcaggatgcaaagttgtgcgagcgacaccgagagaagctgcactactactgtgaggacgacgggaagctgctgtgcgtgatgtgccgggagtcccgggagcacaggccccacacggccgtcctcatggagaaggccgcccagccccacagggaaaaaatcctgaaccacctgagtaccctaaggagagacagagacaaaattcagggcttccaggcaaagggagaagctgatatcctggccgcgctgaagaagctccaggaccagaggcagtacattgtggctgagtttgagcagggtcatcagttcctgagggagcgggaggaacacctgctggaacagctggcgaagctggagcaggagctcacggagggcagggagaagttcaagagccggggcgtcggggagcttgcccggctggccctggtcatctccgaactggagggcaaggcgcagcagccagctgcagagctcatgcaggacacgagagacttcctaaacaggtatccacggaagaagttctgggttgggaaacccattgctcgagtggttaaaaaaaagaccggagaattctcagataaactcctctctctgcaacgaggcctgagggaattccaggggaagctgctgagagacttggaatataagacagtgagcgtcaccctggacccacagtcggccagtgggtacctgcagctgtcagaggactggaagtgcgtgacctacaccagcctgtacaagagtgcctacctgcacccccagcagtttgactgtgagcctggggtgctgggcagcaagggcttcacctggggcaaggtctactgggaagtggaagtggagagggagggctggtctgaggatgaagaagagggggatgaggaggaagagggagaagaggaggaggaggaagaggaggccggctatggggatggatatgacgactgggaaacggacgaagatgaggaatcgttgggcgatgaagaggaagaagaggaggaggaagaggaggaagttctggaaagctgcatggtgggggtggctagagactctgtgaagaggaagggagacctctccctgcggccagaggatggcgtgtgggcgctgcgcctctcctcctccggcatctgggccaacaccagccccgaggctgagcttttcccagcactgcggccccggagagtgggcatcgccctggattatgaagggggcaccgtgactttcaccaacgcagagtcacaggaactcatctacaccttcactgccaccttcacccggcgcctggtccccttcctgtggctcaagtggccaggaacacgcctcctgctaagaccctgagccctgacatctgcccccagccccaaccctcagatgcttcacttctttggaattccaggactctcaatggggggacgggatgcctggcctaagcacctggagcaggggaccccatatccactggtagccacctccccattgctgtggccccctgaaatctcactcagtgctgttgctccatctactgccctaatggggctcttttcccacctcctgctggtttcccgagggaacttctgaccctggagtccatgagggctcctttcctttttgaccacgaccttggccccagctctgcactctctggaataagggcccgatgcagcattttcttgcccagtgtggcaagacctcagaaaaaccagtcaattacgcctaagatcattttgctgtccttaaaccccccaggttccttcttgcacaaatccactctgctgcccaccttctctggcattttaaacagacctaccccaccccaactcagagttaagcatacatggcaatgctgaaaataaacaaaatccactgaggcttcccaggccatttaaagcctggagtaccagcgcatatcatctcatggggtccagagtggagtccaggcttctctgaaaccagggctgagcatatttccatagccaaggaggtgggactccctggagctatctgtggtcttagggaaggatccagacatacacggctttggggtacaagctgtgatcactgatcaataaattatctctagattggtccttgtgaggggagttttaagaatccagaacatcttgctcttgatcagcacatccaaaaacaccaagacaaacatccagtggagcagaacctctcctgcctcgggagttctgaccgggttccccagcagggtgttaagcctctgtctctggccctaccagcatccaggttccactttcctaggagagagtggagatgggaagacagggaaaggaaggcagcaggaggccacaagcccaccaggtcttcatgtcaagagagggagtaacatgtcttctcattgcccacggacccaacctctgtccaggtgcccctcatcatcacagtttaacacaagctcccctgctccagccaaattgatctcccagtcttgtccttacccattccaagtgctctgccagcccctgttcatccaagttttaagtcctccaccctgttctaagagactgttccaacggctctgggcctcagtggtcacttgaccaccattgtctcagagctgcccactttgtgtgtgtcacatgctgcctgagtcacatgtacatcttatttctgcctctagttttgtaagctcctggagggcggataacatcttatactactcttgtattctcatggcacctagtgcagtgctgggcacagagtaggtgctcaataaagacttgttgaatgaa

SEQ ID NO: 269383 - DNA, 1620 bp, Artificial Sequence
  derived and/or modified sequence
atggccacgagcgccccactgaggtccctcgaggaagaggtcacttgtagcatttgcctggattacctccgcgacccggttactatcgattgtggccatgttttctgccgtagttgcactacggacgtacggcctatctccggcagcaggcccgtgtgtcccctgtgcaaaaaacccttcaagaaagagaatataaggcccgtgtggcagctagctagcttagtggagaatatagagcggctaaaggtcgacaaagggaggcagcctggcgaggtgacaagggaacaacaggatgcaaaattgtgcgagagacaccgcgagaaactgcactattactgtgaggacgacgggaagctcctatgtgtgatgtgccgggaaagtagagaacaccgccctcacaccgccgttctgatggagaaagcagcccagccccacagggagaagatccttaaccacctttctacgctgcgcagggaccgcgacaaaatccaggggttccaagctaagggggaagcggatattctcgcggcactgaaaaaactgcaggaccagaggcagtacatcgttgctgaattcgaacaaggccaccaattcctccgggaaagagaggagcatctgctcgaacagttagcaaagctcgaacaagagctgactgaggggagggagaagtttaagagccgtggtgttggagagctggccagattagccctggtgatcagcgaattggaaggcaaagcccagcagcccgctgctgagctcatgcaagacacccgtgatttcctgaaccggtatcccaggaagaagttctgggtgggtaaaccaattgccagagtggtgaaaaaaaaaaccggcgaattctccgacaagctgttgtcactccagagggggctgcgtgagttccagggaaaattgctcagggatcttgagtacaagacggtgtccgtgactctagaccctcagtccgcctccggatacttacagctttccgaagattggaagtgtgttacctacacctccctctacaagagcgcatacctccacccacagcagttcgactgcgagcccggtgtactagggtccaaaggatttacttgggggaaggtttactgggaagtggaggtagaacgggagggttggagcgaggacgaagaagagggcgacgaggaagaggaaggcgaagaggaagaggaagaggaagaagccggatatggggatgggtatgacgactgggagaccgatgaggatgaggagtctctgggcgatgaggaagaggaagaggaggaagaagaggaggaggtcctggagtcctgcatggtgggagtcgctcgagacagcgtcaagaggaagggtgacctcagtctgagacctgaagatggggtctgggctctgcgtctaagcagcagcgggatatgggccaatacttcaccagaagctgaactctttcccgctctgaggccgaggcgcgttgggatagccctggactatgaaggcggtaccgtgacgttcactaacgcagagtcacaagaactgatatatacattcactgccacctttacacggaggctagtaccctttctctggttaaaatggcccggaaccaggctgctgctgcgcccttag

SEQ ID NO: 269384 - DNA, 3250 bp, Artificial Sequence
  derived and/or modified sequence
gagtcaggaatggagagaagggtaatggttttacctcttattgtggaaacctgttgagatcacagagaatatactgacggcataaaagggcagaaccatagcagggtgcgcgctgctgtagttgccttccatggatctataggagagcaagtcctccaggagaagaagtcctcaccagtgaacggagacctctctgaactaaggataccatggccacgtcagccccactacggagcctggaagaggaggtgacctgctccatctgtcttgattacctgcgggaccctgtgaccattgactgtggccacgtcttctgccgcagctgcaccacagacgtccgccccatctcagggagccgccccgtctgcccactctgcaagaagccttttaagaaggagaacatccgacccgtgtggcaactggccagcctggtggagaacattgagcggctgaaggtggacaagggcaggcagccgggagaggtgacccgggagcagcaggatgcaaagttgtgcgagcgacaccgagagaagctgcactactactgtgaggacgacgggaagctgctgtgcgtgatgtgccgggagtcccgggagcacaggccccacacggccgtcctcatggagaaggccgcccagccccacagggaaaaaatcctgaaccacctgagtaccctaaggagggacagagacaaaattcagggcttccaggcaaagggagaagctgatatcctggccgcgctgaagaagctccaggaccagaggcagtacattgtggctgagtttgagcagggtcatcagttcctgagggagcgggaggaacacctgctggaacagctggcgaagctggagcaggagctcacggagggcagggagaagttcaagagccggggcgtcggggagcttgcccggctggccctggtcatctccgaactggagggcaaggcgcagcagccagctgcagagctcatgcaggacacgagagacttcctaaacaggtatccacggaagaagttctgggttgggaaacccattgctcgagtggttaaaaaaaagaccggagaattctcagataaactcctctctctgcaacgaggcctgagggaattccaggggaagctgctgagagacttggaatataagacagtgagcgtcaccctggacccacagtcggccagtgggtacctgcagctgtcagaggactggaagtgcgtgacctacaccagcctgtacaagagtgcctacctgcacccccagcagtttgactgtgagcctggggtgctgggcagcaagggcttcacctggggcaaggtctactgggaagtggaagtggagagggagggctggtctgaggatgaagaagagggggatgaggaggaagagggagaagaggaggaggaggaagaggaggccggctatggggatggatatgacgactgggaaacggacgaagatgaggaatcgttgggcgatgaagaggaagaagaggaggaggaagaggaggaagttctggaaagctgcatggtgggggtggctagagactctgtgaagaggaagggagacctctccctgcggccagaggatggcgtgtgggcgctgcgcctctcctcctccggcatctgggccaacaccagccccgaggctgagcttttcccagcactgcggccccggagagtgggcatcgccctggattatgaagggggcaccgtgactttcaccaacgcagagtcacaggaactcatctacaccttcactgccaccttcacccggcgcctggtccccttcctgtggctcaagtggccaggaacacgcctcctgctaagaccctgagccctgacatctgcccccagccccaaccctcagatgcttcacttctttggaattccaggactctcaatggggggacgggatgcctggcctaagcacctggagcaggggaccccatatccactggtagccacctccccattgctgtggccccctgaaatctcactcagtgctgttgctccatctactgccctaatggggctcttttcccacctcctgctggtttcccgagggaacttctgaccctggagtccatgagggctcctttcctttttgaccacgaccttggccccagctctgcactctctggaataagggcccgatgcagcattttcttgcccagtgtggcaagacctcagaaaaaccagtcaattacgcctaagatcattttgctgtccttaaaccccccaggttccttcttgcacaaatccactctgctgcccaccttccctggcattttaaacagacctaccccaccccaactcagagttaagcatacatggcaatgctgaaaataaacaaaatccactgaggcttcccaggccatttaaagcctggagtaccagcgcatatcatctcatggggtccagagtggagtccaggcttctctgaaaccagggctgagcatatttccatagccaaggaggtgggactccctggagctatctgtggtcttagggaaggatccagacatacacggctttggggtacaagctgtgatcactgatcaataaattatctctagattggtccttgtgaggggagttttaagaatccagaacatcttgctcttgatcagcacatccaaaaacaccaagacaaacatccagtggagcagaacctctcctgcctcgggagttctgaccaggttccccagcagggtgttaagcctctgtctctggccctaccagcatccaggttccactttcctaggagagagtggagatgggaagacagggaaaggaaggcagcaggaggccacaagcccaccaggtcttcatgtcaagagagggagtaacatgtcttctcattgcccacggacccaacctctgtccaggtgcccctcatcatcacagtttaacacaagctcccctgctccagccaaattgatctcccagtcttgtccttacccattccaagtgctctgccagcccctgttcatccaagttttaagtcctccaccctgttctaagagactgttccaacggctctgggcctcagtggtcacttgaccaccattgtctcagagctgcccactttgtgtgtgtcacatgctgcctgagtcacacgtacatcttatttctgcctctagttttgtaagctcctggagggcggataacatcttatactactcttgtattctcatggcacctagtgcagtgctgggcacagagtaggtgctcaataaagacttgttgaatgaa

SEQ ID NO: 269385 - DNA, 1620 bp, Artificial Sequence
  derived and/or modified sequence
atggccacctccgccccactcaggtccctcgaagaggaagtgacttgttccatttgtctcgactacctgagagatcccgttacaattgactgtggccatgtgttttgtagatcatgcactacggatgtaaggcccatttcaggatctcggccagtgtgcccactgtgcaagaagcccttcaagaaggagaatattcgccctgtgtggcagctggcgtcactggtcgagaacattgagcgactaaaagtagacaaaggacggcagcctggagaggtgacccgagagcagcaagacgccaagctttgcgagcgtcacagagaaaaactgcactactattgcgaagacgatggcaagctcctgtgtgtcatgtgtagggagtccagggaacacagaccccatactgctgttcttatggaaaaggccgctcagcctcacagggaaaaaattctgaatcacctcagcacactgaggagagatcgtgataagattcaagggttccaggccaagggcgaggcagatattctcgcagccctgaagaaactgcaggaccaacggcagtatatcgtggcagaatttgagcagggtcatcaatttttaagagagcgcgaggaacacctgctcgaacagttggcaaagctggaacaagaactcaccgaggggcgtgagaaattcaaatcacgaggcgtgggcgaattggcgaggctggctctcgttatctctgagctggagggcaaggcgcaacagcctgctgcggaactgatgcaggatacaagggacttcttgaatcgttacccgagaaagaagttttgggtgggcaaacccatcgcgagggtggtgaagaagaagaccggggaattcagcgataaactgttatccttacaaaggggcctgcgagagttccagggcaaactgctgcgcgaccttgagtacaaaacagtctcggtcactcttgacccccaatcggcctctgggtatcttcagctgtcagaggattggaaatgtgtgacctacacgagcctatacaaatctgcgtatctccacccacaacagtttgattgcgaacctggcgtccttgggtctaagggattcacttggggaaaggtgtactgggaggtagaagtagagcgcgagggatggagcgaagatgaagaggaaggagatgaagaagaggagggagaggaggaagaagaagaagaggaggctggttacggagacggatacgatgattgggagacggacgaagacgaggaatccctcggcgacgaggaggaggaggaggaagaggaggaggaggaagtactcgagagctgcatggttggcgttgccagggacagcgtcaagcggaagggagacctaagccttaggccggaggacggggtgtgggcccttcgcctctcatccagcggtatttgggcgaacacctcccctgaagccgagctgttccccgcattgagaccccgacgggtggggatcgcccttgattatgaagggggaacagtgactttcacaaacgccgagtcacaggaactgatctatacattcacagcgacatttacgcggagactagttccatttctttggctcaagtggcccggaactagactgttattaagaccttag

SEQ ID NO: 269386 - DNA, 1620 bp, Artificial Sequence
  derived and/or modified sequence
atggctacttcggccccactgcggtctcttgaagaggaagtaacctgcagtatttgtttggactatctcagagacccagtaaccatcgactgtggccacgtattttgccgcagttgcaccacagacgtccggcctatctccgggagcaggccggtttgtccactgtgtaagaagccgtttaagaaggagaatataaggcctgtttggcagttggcgagcttggtggagaatattgagcgtctcaaagtagacaagggaagacaaccaggtgaggtgactcgggaacagcaagacgccaagctgtgcgaacgtcacagagaaaaattacactattattgtgaagatgacgggaagctgctttgcgtgatgtgtagggagagtagggagcataggccccatacagccgtgctgatggagaaagctgcccaaccccacagggagaagatcctgaatcatctaagtactctgcggagagatcgggataaaatacagggctttcaggcgaagggcgaggcagatattttggcggctctcaagaagttgcaagaccagcggcaatatatcgtcgcagagtttgagcagggacaccagtttctccgtgagagagaggagcacctcctcgagcaattggccaagctagagcaggaactaaccgaagggagagaaaaattcaaatcacggggtgttggtgagctggccagattggccctcgtaatctccgagctagagggtaaggcacagcagcccgctgctgaactcatgcaagacacaagggatttcttgaatagatacccacgaaaaaaattctgggtgggcaagcctatagctcgcgtggtaaagaaaaaaacgggcgagttcagtgataagttacttagcctgcaaaggggtctgagagagttccaggggaagttattgagagacctcgaatacaaaacggtctccgtgaccctcgatccccagtccgcctcaggctacctgcaactcagcgaggattggaaatgcgttacctataccagcctgtataagagtgcttacctccatccacaacaatttgattgtgaaccaggagtgctggggagtaaggggtttacatggggaaaggtctactgggaggtagaggtggaacgggaggggtggagtgaagacgaggaagaaggcgatgaggaggaagagggtgaggaagaggaggaggaagaagaggcagggtatggcgatggctatgacgactgggagaccgatgaggacgaagaatcgttgggcgacgaagaagaagaggaggaggaggaggaggaggaggttctcgagtcatgcatggtgggcgtggcacgcgattctgttaagagaaaaggagatctatcccttcggcctgaagacggcgtgtgggccctcagactgtcctccagcggcatttgggctaacaccagtcccgaggctgagctatttccagccctgcgacccaggagggtaggtattgcacttgactacgagggcggtaccgtgacttttactaacgcagagtcacaggaacttatttacactttcacagccacgtttactaggaggctggtgcccttcctgtggctgaagtggccgggaacgcgcctgctgctgaggccttag

SEQ ID NO: 269387 - DNA, 1124 bp, Artificial Sequence
  derived and/or modified sequence
acggggcggggacgagctgtcgcgctggttgctcgtgcaggagcgggacccggaacagaccgccgtgagagaggaggggcgccggccgggattcgcggcccggagctcgggaccggagtcaggaatggagagaagggtaatggttttacctcttattgtggaaacctgttgagatcacagagaatatactgacggcataaaagggcagaaccatagcagggtgcggttgcttcattccagcctcgcagtcacctctgtgccctgctggttgtcttcccagcgctgctgtagttgccttccatggatctataggagagcaagtcctccaggagaagaagtcctcaccagtgaacggagacctctctgaactaaggataccatggccacgtcagccccactacggagcctggaagaggaggtgacctgctccatctgtcttgattacctgcgggaccctgtgaccattgactgtggccacgtcttctgccgcagctgcaccacagacgtccgccccatctcagggagccgccccgtctgcccactctgcaagaagccttttaagaaggagaacatccgacccgtgtggcaactggccagcctggtggagaacattgagcggctgaaggtggacaagggcaggcagccgggagaggtgacccgggagcagcaggatgcaaagttgtgcgagcgacaccgagagaagctgcactactactgtgaggacgacgggaagctgctgtgcgtgatgtgccgggagtcccgggagcacaggccccacacggccgtcctcatggagaaggccgcccagccccacagggaaaaaatcctgaaccacctgagtaccctaaggagggacagagacaaaattcagggcttccaggcaaagggagaagctgatatcctggccgcgctgaagaagctccaggaccagaggcagtacattgtggctgagtttgagcagggtcatcagttcctgagggagcgggaggaacacctgctggaacagctggcgaagctggagcaggagctcacggagggcagggagaagttcaagagccggggcgtcggggagcttgcccggctggccctggtcatctccgaactggagggcaaggcgcagcagc

SEQ ID NO: 269388 - DNA, 747 bp, Artificial Sequence
  derived and/or modified sequence
atggccacaagcgctccactgcgatcccttgaggaagaagtcacatgcagtatatgtcttgattatttaagagatcctgtaacaatcgattgtggacatgtgttttgtaggtcttgcactaccgacgtgcggccaattagtggcagccgacctgtctgtcccctgtgtaagaagcccttcaagaaagaaaacattaggcccgtgtggcagctggctagcttagtggagaatattgagcgactgaaagtggataaaggcagacagccaggcgaggtgactcgagagcagcaagatgcaaaactgtgtgaacgacacagagaaaagctccattactactgcgaagatgatggaaagcttctgtgtgtcatgtgcagagagagtagggagcaccgccctcacacagccgttctgatggagaaagccgcacagccccacagagaaaagattttaaatcacctgtcgacacttagacgggatagggacaagattcagggctttcaggctaaaggagaagctgatatcctggcagcccttaagaagctgcaggaccagcgccagtacatcgtcgcagaattcgagcagggccatcaatttctgagagaacgggaggagcatctactcgagcagcttgctaaactcgagcaggaattaacggaaggccgtgagaaatttaaatcccgcggagtgggcgagctcgctagactggccctggtcatctccgagcttgagggcaaagcgcagcagtag

SEQ ID NO: 269389 - DNA, 1620 bp, Artificial Sequence
  derived and/or modified sequence
atggctacaagcgccccacttcgctcgctggaggaggaggttacctgcagcatttgtcttgactacctgcgagacccagtgacaatcgactgtgggcatgtgttttgtcgaagctgcaccacagatgtgcgtccaatatccggcagtaggcccgtgtgccccctttgcaagaaacctttcaagaaagaaaatattaggcctgtatggcagctggcgagcctggttgaaaatattgaacggctgaaggtggacaaaggacgccagcccggtgaggtgaccagggagcagcaggacgcaaaactgtgcgagaggcaccgtgagaagctccattactactgtgaagatgatggaaaactgctctgtgtaatgtgtcgtgagagcagggaacataggccacacactgctgtgctgatggagaaagctgctcagcctcatagggagaagattctcaaccacctttccaccctcaggcgcgatcgagacaaaatccaagggttccaagcaaaaggggaggctgatattttggcggcacttaagaaactgcaggaccagaggcaatatatcgtggccgaattcgagcaaggacatcagtttctccgggagcgggaggaacacctcctggagcagctggctaaacttgaacaggaactgactgagggaagagagaaatttaagtcccgcggagtgggggaactcgcacgactggcactcgtgatttcggagcttgaaggcaaggctcagcagcccgcagccgagctgatgcaggataccagggattttttgaaccgataccctcgcaaaaagttctgggtgggtaaaccaatcgcgagagtggtgaaaaagaagaccggcgagttcagcgataaacttctgagcttgcagcggggtctgagggagttccaaggcaagctactccgtgatctggagtacaagaccgtgtcagtgacactggacccccaatccgctagtgggtacctacagctttcagaggattggaaatgtgtgacgtacactagcctctataaaagcgcatatctgcatccacagcagttcgattgcgagcctggtgttctaggcagcaagggattcacctgggggaaagtttactgggaagtagaagtggagcgcgagggctggtccgaagacgaagaggagggggacgaggaggaagagggcgaagaggaggaggaagaggaagaagccggatacggagatgggtatgacgactgggagaccgacgaagatgaggagtcgctgggggacgaagaggaggaggaggaggaggaggaggaggaggtcctagagtcatgtatggtgggtgttgcacgagactcggttaagagaaaaggagatttgagtctcaggcctgaggacggggtgtgggccctgcgactgtcttcttcggggatttgggcaaatacttccccggaggctgagctatttcctgctctgcgtcccagacgggttgggatcgctctggactacgagggaggcactgttaccttcactaatgccgagtctcaggagctgatttacacttttaccgcaacttttacccgcagactggtccccttcctatggcttaagtggcccggaactaggttgctcctccgcccatag

SEQ ID NO: 269390 - DNA, 747 bp, Artificial Sequence
  derived and/or modified sequence
atggccacttctgccccactacgttcccttgaggaagaagtgacttgctccatttgccttgattatctgagagacccagttacgatcgactgtggccacgttttttgcaggtcctgcactacggacgtacggcctatttccggcagcaggcctgtgtgtccgttgtgcaagaaaccattcaaaaaggaaaacattcgcccagtttggcagctcgcttccttggttgagaacattgagaggctgaaagtggataagggcagacagcccggagaggtcaccagagagcaacaggacgcaaagctgtgcgagcgacatcgggagaaactgcattactactgtgaggacgatggaaaacttctgtgcgtgatgtgtcgcgagagtcgcgagcaccggcctcacacagcagtcctcatggagaaggccgcacagccccatcgggaaaagatcctgaatcacctcagtacgctgaggagagatagggacaagattcagggatttcaggcaaagggcgaggccgatattcttgctgcacttaaaaagctgcaggaccagcgtcaatacattgtggccgaatttgaacagggccaccagttcctgcgagagcgcgaggaacacctactggagcaacttgctaaattggagcaggagctcactgaagggagggagaaatttaaatccaggggggtgggagaactggctcgcctcgctctggtcatcagtgaactggagggcaaggcccagcagtag

SEQ ID NO: 269391 - DNA, 1620 bp, Artificial Sequence
  derived and/or modified sequence
atggccacatccgcacctctccggtcactggaggaggaagtgacatgctccatctgcctcgattacctccgagaccctgttaccattgattgcggccacgtgttttgccgatcttgtaccacagacgtgcgccctattagcgggagccgccctgtgtgtccactctgcaagaagccctttaagaaggagaacatcagaccggtgtggcagcttgcatccctcgtggaaaacatcgaaaggctcaaggtggacaaggggcgacagccaggagaggttactcgcgagcagcaggacgccaagttatgcgagcggcatagggagaaactccactactactgcgaggatgacgggaagttactgtgcgtcatgtgccgagagagcagggagcaccgtccccatactgccgtgctcatggagaaggcagctcagccccaccgcgaaaaaatcttaaaccacctgtctaccttaaggagggaccgcgacaaaattcaggggtttcaggcaaagggagaagccgatatactggcagccctaaaaaagctgcaggatcagagacagtatattgtcgctgagttcgagcagggccaccagttccttagggagagggaggagcatctgctcgagcagctcgccaaattagagcaggagctaacagaaggcagggagaaatttaaaagcaggggggtaggggaactcgcccgactggcgctggtgatttcagaactcgagggaaaggcccagcagcccgctgctgagctgatgcaggacacccgcgattttctgaataggtaccctaggaaaaaattttgggtgggaaaacccattgccagggtcgtgaagaaaaagactggcgagttttcagataagttgctctccctgcaaagaggcttaagagaatttcaagggaaactcctgagagatttggaatacaaaactgttagcgtgacactggacccgcagagcgcgtctggatatctgcagttgtctgaagattggaaatgtgttacgtacacctcactctataagagtgcctatttgcacccacagcagttcgattgtgagcccggagtattaggcagcaagggatttacgtggggcaaagtttattgggaggtggaagtcgagcgggagggatggagtgaagacgaagaagagggcgatgaagaggaggaaggagaagaagaggaagaggaggaggaagcagggtacggggatggatacgacgattgggaaaccgatgaagacgaggagtctctgggggacgaagaagaggaggaggaagaggaagaagaagaagtgctggagagctgcatggtcggggttgctcgcgactccgtcaagagaaaaggggacctgagcctgaggcctgaggatggtgtctgggcactgagactgtcttctagtggcatttgggccaacacgtcaccagaagccgagctcttccccgctctgaggccaaggcgtgttggcattgctctggactacgaaggcggaacagtcaccttcaccaatgccgaatctcaggagctcatttacacattcactgcaacttttactcggcgtctggtgccttttctgtggcttaaatggcccggaacacggctcctgctgaggccctag

SEQ ID NO: 269392 - DNA, 747 bp, Artificial Sequence
  derived and/or modified sequence
atggcaacctctgccccattaagatctttggaggaagaggttacatgctcaatctgcctcgactatctcagggacccggtcactatcgactgcggccacgtgttctgtcgctcttgcaccaccgatgtgcgccctattagcggctcccgccctgtttgtcctctctgcaaaaagccgtttaagaaagagaacatccggccagtgtggcagcttgcatcattggtcgagaatattgagcgcctcaaggtggacaaggggagacagccaggtgaagtcactcgagagcagcaagacgctaaactctgcgagagacatcgcgaaaaactgcactactactgcgaagatgatggcaagctcctgtgtgtaatgtgccgtgaatcacgtgaacacagacctcacaccgccgtactgatggagaaggccgctcaacctcaccgcgagaagatcctcaaccatcttagtactctgaggcgagatagagacaagattcaaggctttcaggctaaaggtgaggcggatattttagccgcactcaagaagttgcaggaccagcggcagtacattgtggccgagtttgaacagggccatcagttcctgagggaaagagaggaacacttactggaacagctcgctaagctggaacaggaattgacagaaggacgcgagaagttcaagtcacggggagtgggggaactggcacgtcttgccctggtgatttcagaactggagggcaaggcacagcaatag

SEQ ID NO: 269393 - DNA, 747 bp, Artificial Sequence
  derived and/or modified sequence
atggcaactagcgctccattgcgatcactcgaggaagaagtcacctgcagcatctgtctggattacctcagagatccggtgaccatcgactgcggtcatgttttctgccggtcttgcaccactgacgtgcgcccaataagtgggagtagaccagtttgtccactctgcaaaaagccctttaagaaagaaaacatcaggccagtttggcagctggcctccctggtggagaatatcgagagattgaaggtcgataaaggccgtcagcctggcgaggtaacgcgcgagcagcaggacgctaaactctgcgagcgccatagagagaagttgcactactattgcgaggatgacggcaagttactgtgtgtgatgtgccgggaatcaagagagcaccgacctcacaccgccgtgctaatggagaaagccgctcagcctcatagggaaaaaattctgaaccatctctctacattgcgaagagaccgagataagattcagggtttccaggccaagggcgaggcggatatattagcagctctcaagaaactccaagaccagcgccaatatattgtggcagaattcgaacaaggccatcagtttctacgggagagagaggaacacctgcttgagcagctggccaaattagagcaagagctgactgaaggcagagagaagttcaagtcacggggagtgggggagctggccagactcgctctcgtcatttctgaactcgagggtaaggctcaacagtag

SEQ ID NO: 269394 - DNA, 3227 bp, Artificial Sequence
  derived and/or modified sequence
ggccgggattcgcggcccggagctcgggaccggttgcttcattccagcctcgcagtcacctctgtgccctgctggttgtcttcccagcgctgctgtagttgccttccatggatctataggagagcaagtcctccaggagaagaagtcctcaccagtgaacggagacctctctgaactaaggataccatggccacgtcagccccactacggagcctggaagaggaggtgacctgctccatctgtcttgattacctgcgggaccctgtgaccattgactgtggccacgtcttctgccgcagctgcaccacagacgtccgccccatctcagggagccgccccgtctgcccactctgcaagaagccttttaagaaggagaacatccgacccgtgtggcaactggccagcctggtggagaacattgagcggctgaaggtggacaagggcaggcagccgggagaggtgacccgggagcagcaggatgcaaagttgtgcgagcgacaccgagagaagctgcactactactgtgaggacgacgggaagctgctgtgcgtgatgtgccgggagtcccgggagcacaggccccacacggccgtcctcatggagaaggccgcccagccccacagggaaaaaatcctgaaccacctgagtaccctaaggagggacagagacaaaattcagggcttccaggcaaagggagaagctgatatcctggccgcgctgaagaagctccaggaccagaggcagtacattgtggctgagtttgagcagggtcatcagttcctgagggagcgggaggaacacctgctggaacagctggcgaagctggagcaggagctcacggagggcagggagaagttcaagagccggggcgtcggggagcttgcccggctggccctggtcatctccgaactggagggcaaggcgcagcagccagctgcagagctcatgcaggacacgagagacttcctaaacaggtatccacggaagaagttctgggttgggaaacccattgctcgagtggttaaaaaaaagaccggagaattctcagataaactcctctctctgcaacgaggcctgagggaattccaggggaagctgctgagagacttggaatataagacagtgagcgtcaccctggacccacagtcggccagtgggtacctgcagctgtcagaggactggaagtgcgtgacctacaccagcctgtacaagagtgcctacctgcacccccagcagtttgactgtgagcctggggtgctgggcagcaagggcttcacctggggcaaggtctactgggaagtggaagtggagagggagggctggtctgaggatgaagaagagggggatgaggaggaagagggagaagaggaggaggaggaagaggaggccggctatggggatggatatgacgactgggaaacggacgaagatgaggaatcgttgggcgatgaagaggaagaagaggaggaggaagaggaggaagttctggaaagctgcatggtgggggtggctagagactctgtgaagaggaagggagacctctccctgcggccagaggatggcgtgtgggcgctgcgcctctcctcctccggcatctgggccaacaccagccccgaggctgagcttttcccagcactgcggccccggagagtgggcatcgccctggattatgaagggggcaccgtgactttcaccaacgcagagtcacaggaactcatctacaccttcactgccaccttcacccggcgcctggtccccttcctgtggctcaagtggccaggaacacgcctcctgctaagaccctgagccctgacatctgcccccagccccaaccctcagatgcttcacttctttggaattccaggactctcaatggggggacgggatgcctggcctaagcacctggagcaggggaccccatatccactggtagccacctccccattgctgtggccccctgaaatctcactcagtgctgttgctccatctactgccctaatggggctcttttcccacctcctgctggtttcccgagggaacttctgaccctggagtccatgagggctcctttcctttttgaccacgaccttggccccagctctgcactctctggaataagggcccgatgcagcattttcttgcccagtgtggcaagacctcagaaaaaccagtcaattacgcctaagatcattttgctgtccttaaaccccccaggttccttcttgcacaaatccactctgctgcccaccttccctggcattttaaacagacctaccccaccccaactcagagttaagcatacatggcaatgctgaaaataaacaaaatccactgaggcttcccaggccatttaaagcctggagtaccagcgcatatcatctcatggggtccagagtggagtccaggcttctctgaaaccagggctgagcatatttccatagccaaggaggtgggactccctggagctatctgtggtcttagggaaggatccagacatacacggctttggggtacaagctgtgatcactgatcaataaattatctctagattggtccttgtgaggggagttttaagaatccagaacatcttgctcttgatcagcacatccaaaaacaccaagacaaacatccagtggagcagaacctctcctgcctcgggagttctgaccaggttccccagcagggtgttaagcctctgtctctggccctaccagcatccaggttccactttcctaggagagagtggagatgggaagacagggaaaggaaggcagcaggaggccacaagcccaccaggtcttcatgtcaagagagggagtaacatgtcttctcattgcccacggacccaacctctgtccaggtgcccctcatcatcacagtttaacacaagctcccctgctccagccaaattgatctcccagtcttgtccttacccattccaagtgctctgccagcccctgttcatccaagttttaagtcctccaccctgttctaagagactgttccaacggctctgggcctcagtggtcacttgaccaccattgtctcagagctgcccactttgtgtgtgtcacatgctgcctgagtcacacgtacatcttatttctgcctctagttttgtaagctcctggagggcggataacatcttatactactcttgtattctcatggcacctagtgcagtgctgggcacagagtaggtgctcaataaagacttgttgaatgaa

SEQ ID NO: 269395 - DNA, 1620 bp, Artificial Sequence
  derived and/or modified sequence
atggccaccagtgcacctctgcggtccctggaagaggaagtaacctgtagcatttgtctcgattatctcagagacccagtgaccatcgattgtggacacgtattttgcaggtcatgcaccacggacgtgagacctatctccggcagccgtcctgtgtgccctctctgcaagaaaccttttaaaaaggaaaacattagacccgtttggcagctggccagtctagtggaaaatattgagaggctgaaggtagacaaaggaagacagcctggtgaggtgacccgcgagcagcaggacgccaagctttgtgagagacatagggagaagctgcactattactgcgaggacgatggaaagctactatgcgttatgtgcagagaaagtcgagaacaccggcctcacacagctgtccttatggagaaagcggctcagccccaccgtgaaaagattctgaatcaccttagcaccctccggcgagaccgtgacaagatccaagggttccaggccaaaggcgaagctgatatcctcgccgctctcaaaaaactgcaggaccaacgccagtatattgtcgcagagtttgagcaaggccaccagtttctgagagagcgagaagaacatcttcttgaacagctcgctaaactggagcaagagctgacagaagggcgtgagaagtttaaaagccgcggagtgggagaattagccagactggcgctggtgatttccgagctggagggaaaggcccagcaaccagctgcggaactcatgcaggatacacgagactttctcaacagatatcctaggaaaaagttctgggtaggcaaacctattgccagagtggttaagaaaaagactggcgagttttcagacaagttactgagcctccagaggggattaagagaatttcagggaaagctgctgagagatctggaatataagaccgtctcagtgaccctggatcctcagagcgcatccggatatttacagctgtctgaggactggaagtgtgtcacctatacctctctctataaatcggcatatttacatccacagcaatttgactgtgaacccggtgtccttggttctaaggggtttacctggggtaaggtgtattgggaggtagaggttgagagagagggatggagcgaagatgaggaagagggagatgaggaagaggaaggggaagaggaggaggaggaagaggaagccggatatggggacggctatgatgactgggagaccgacgaagacgaggaatccctgggcgacgaagaagaagaggaagaagaagaggaagaggaggttctggagagctgcatggtgggagtggcgcgtgacagcgtaaagaggaagggagatctgagtctgagacccgaggacggagtgtgggccctccgtctgtcaagctccggcatctgggctaacacctcgcccgaagcagagctctttccagcgttgcgccctcgtcgagtcggtatagcgctcgactatgaaggcggaacagtaaccttcaccaatgctgaatcacaggagctgatctacacattcactgccactttcacaagaaggttggtaccgtttctgtggctcaagtggcccggaacaaggctcctcctccggccttag

SEQ ID NO: 269396 - DNA, 1620 bp, Artificial Sequence
  derived and/or modified sequence
atggcaacttctgctcccctgcggtccttagaggaagaagttacctgttcgatctgcctggattaccttcgtgatcctgtcactatagactgtggacacgtcttctgtcggtcttgcaccacagacgtgaggccaatcagcggcagcagacccgtgtgccccctttgcaaaaaacccttcaagaaggaaaacattcgccctgtctggcaactggctagtctggtggagaacatcgaaagactcaaggtagataaaggaaggcaacccggagaggtcactagagaacagcaggatgctaagctctgcgaaagacaccgagagaagctccattactattgtgaggacgatggcaaactgctatgcgtaatgtgccgtgagtctagagaacaccggccacatactgctgtgctcatggagaaggcggcacaaccccacagggagaaaattctgaaccatttgtcaacattacgcagagatagggataaaatccagggctttcaggccaaaggagaggccgacatactggctgccctcaaaaagctgcaggatcagagacagtatatcgttgctgagttcgagcaaggacatcagtttcttcgggagcgcgaagagcacctccttgagcagctcgccaagctcgagcaagaacttactgaaggcagagaaaagtttaagtcacgaggagttggggagttagccaggcttgctctcgtgatttcagaactggaaggcaaagcccagcaaccagccgcagaattaatgcaggatactcgggattttctaaaccgctacccaaggaaaaaattttgggtcgggaagccaatcgcgagagtcgtgaagaaaaagacaggagaattctccgacaagttgctgtccttgcagaggggcctccgcgaatttcaaggtaagctgctccgagacttggaatacaaaacggtcagcgtaacgttggatccccaatccgcgtccggctacctgcagctgagcgaagactggaaatgtgtcacctatacttcattgtacaagtccgcttacctgcacccacaacagttcgactgcgaacccggagtcttaggtagcaaaggttttacctggggcaaagtatactgggaagtcgaggtggagcgcgaggggtggtccgaggacgaagaagaaggtgatgaagaagaggagggtgaggaggaagaagaggaggaagaagccggatacggcgatggatacgacgactgggaaacagatgaagacgaggaaagccttggggacgaagaggaggaggaggaagaggaagaggaggaagttctcgaatcttgcatggttggtgtggcacgagactcagttaagcgtaaaggggatttaagcctaagacctgaagacggagtctgggccttacggctctcctctagtggcatttgggctaacaccagcccagaagccgaactatttcctgcgctgcggcctaggagggtgggtatcgcgctagattacgagggaggcactgtcaccttcacaaatgctgagtcccaggagctgatctatacattcactgcaacgtttaccagacggctcgtgcctttcctgtggctgaaatggcctggtacacggttgttgctccgcccatag

SEQ ID NO: 269397 - DNA, 1620 bp, Artificial Sequence
  derived and/or modified sequence
atggccactagtgctccactgcggagcctggaagaggaggtcacatgcagtatctgcctcgactatttgcgcgatcccgtcaccatcgactgcggccacgtgttttgcagaagttgcaccacggacgtgcggccaatttccggatcccgccctgtctgcccactgtgcaagaaacccttcaagaaggagaatatccgcccagtgtggcagctggcttcacttgtggaaaacatcgaaagactcaaggttgacaaggggcgacagccgggagaagtgaccagagaacaacaggacgctaaactgtgcgaaaggcacagggaaaagctccactattattgtgaagatgatggcaagctcttatgcgtgatgtgtcgggaatcacgcgagcacagaccccatacagccgtactgatggagaaagccgcacaaccgcatagggagaaaatacttaaccacctctcaacacttcgcagggatagggacaaaattcagggctttcaggccaagggggaggctgacattctggccgctttaaagaagctgcaagatcagagacaatatattgtcgctgaatttgaacagggccaccagtttctcagggagcgagaggaacacttgctagaacagctggcaaagttggaacaggaactaaccgaagggagagagaaattcaaaagcagaggcgttggagaactggccaggctggcgctggtaatttccgagctcgaaggtaaggctcaacagcctgcggctgaactaatgcaggacacacgcgatttccttaataggtacccaagaaagaaattctgggttggaaaacccattgcaagggtcgtcaagaagaagactggcgaattctctgacaaactgctgtccctgcagaggggcctgcgagagtttcagggaaagctgctcagggacctcgagtacaagactgtttctgtgactctcgatcctcaatctgcaagtggctatttgcagctgtctgaggactggaagtgtgtgacgtatacttctctgtataaaagcgcttaccttcaccctcagcagtttgattgcgagcctggcgtgctgggctctaaagggttcacttgggggaaggtctactgggaagtagaggttgaaagggaagggtggagcgaagacgaggaggaaggagatgaggaggaggagggggaagaggaggaagaagaggaagaagctgggtacggtgacgggtatgatgattgggagactgatgaggatgaggagagtctcggagacgaggaagaagaggaggaggaggaggaggaggaagttcttgaaagctgcatggtgggggtggcccgagactcagtgaaacggaagggggacttgtcactccggccagaggatggcgtctgggcacttagactcagttctagcggaatctgggctaacaccagtcccgaagctgaactatttccagctctgagaccccgaagagtgggcattgccctcgactacgagggaggaactgtgaccttcactaacgccgagtcccaggagctgatctacacattcacggcgacctttactcggagactggtccccttcttatggctcaagtggcccggaacacggcttttactccggccatag

SEQ ID NO: 269398 - DNA, 1620 bp, Artificial Sequence
  derived and/or modified sequence
atggccacgtccgctcccctgcgctccctcgaagaagaggtgacatgttctatctgtctcgactacctgagggacccagtaaccatcgactgtggccacgttttctgcaggtcttgcaccaccgacgtgcgtcctatttctggctcgagacctgtctgcccgctttgtaagaagccatttaaaaaggagaacattagacccgtgtggcaactcgcaagtttagtggaaaacattgagcgtctgaaagtcgataaggggagacagccaggcgaagttaccagagaacaacaggacgccaaactgtgcgagaggcatagagaaaagctccactattactgcgaagacgatgggaagctgctttgcgtaatgtgtcgcgagtcgcgcgaacatagaccccacacagctgttttgatggaaaaagcagcgcagcctcacagagagaaaatcctcaaccaccttagcacattgaggcgggacagagataagattcagggcttccaggcgaaaggggaggccgacattctggccgcactgaagaagctgcaagatcaaaggcaatatatcgtcgctgaattcgaacaagggcatcagttcttacgcgagcgggaggagcatcttctcgagcaactggcaaaattagagcaggagctaacggagggacgagaaaagtttaaatcacggggagtgggcgaactcgcgaggctcgctctcgtgatctctgagctagagggtaaagcccagcagcccgctgccgagttgatgcaggatacccgcgatttcttaaaccgctaccctcggaagaagttctgggttggaaagccaatcgcccgagtggtcaaaaagaaaacgggtgagttctctgataagctgttgagtttacaaaggggactgcgcgaattccaagggaaactgctgagggacctggagtataagaccgtatcagtgaccctggaccctcagagcgcatctggctatctgcagctgtccgaggactggaaatgcgtcacctatacttccctctataagtctgcataccttcatccacaacagtttgattgcgagccaggggttctgggcagcaaggggtttacttggggcaaggtctattgggaggtggaagtggagcgtgagggttggtctgaggatgaggaagaaggcgatgaggaggaagagggtgaggaggaggaagaggaggaggaggcaggctacggagacggatacgatgactgggagaccgacgaggatgaggagtctctgggggatgaggaggaggaggaggaggaagaagaggaggaagtcctggaaagctgcatggttggagtggcacgcgacagtgtaaaacggaaaggggatcttagtctgcggccagaggacggcgtgtgggcgttgcggctctcttctagcggcatatgggcaaacacctcccctgaagcagagctgttccctgccctacgccctcgaagagtgggtattgccctggattacgagggcggaacggtgacctttacaaacgcagaatcacaggaactgatttatacgtttaccgccacttttaccaggagactggtcccgttcttatggctgaagtggccaggaaccagactcctactgcgaccttag

SEQ ID NO: 269399 - DNA, 1620 bp, Artificial Sequence
  derived and/or modified sequence
atggcaacgagtgcccctttgcggagtctcgaggaagaagtgacctgctctatatgtctggactaccttcgggaccccgtgacgatcgactgtgggcacgtgttctgtcggtcctgcacaacagacgtgaggccgatttccggcagtcgtcccgtgtgtcctctctgcaaaaagcctttcaagaaggagaatattcgtcctgtgtggcagctggcttctcttgtggagaacatagaaaggttaaaagttgacaaggggagacagcccggtgaagttactagggagcaacaggacgccaaactgtgcgagagacatcgggaaaaattgcactactactgtgaggacgacggcaaattgctttgtgtcatgtgtagggaatctcgcgagcatagacctcacactgcggttcttatggaaaaggccgcacagccacaccgggagaaaattctcaatcacctgtcaactttgagacgagacagggacaagatacagggcttccaggccaagggggaagccgatatcttggccgctttaaagaaactccaggaccagcgccagtacatagtagctgaattcgagcagggccaccaatttctccgcgaaagggaggaacatctcctggagcagctggctaaactagaacaggaattgaccgaagggagggaaaagttcaaatcaagaggagtcggtgagttggctcgcctggccctagtgatttccgaactcgaaggaaaggcccagcagccagccgcagagctgatgcaggacacccgcgactttctgaacaggtatccacggaaaaaattttgggtcggtaagccaatagcgcgagtggttaaaaagaaaactggcgagttcagcgataaactcctgagtctgcagagaggtctccgagagtttcagggtaagttgcttcgtgatctcgagtataagacagtgtcagttaccctggacccccaaagcgccagtggctacctccagctctccgaggattggaagtgcgtgacctacacatcattatataaaagcgcatatctacacccgcaacagtttgattgtgagccaggggtgctggggagcaaaggcttcacctggggcaaggtctactgggaggttgaggtggagagggagggatggtccgaggacgaagaagagggtgacgaggaggaggaaggcgaagaagaggaagaggaagaagaagcaggatacggcgatggatatgatgactgggaaaccgatgaagacgaagaatcactgggagatgaggaggaggaagaagaagaagaagaagaggaagtactagagtcctgtatggtgggtgtggcacgggattcagtgaagagaaagggcgatctgtcactgcgccctgaagatggggtctgggcccttagactgtcatcgagcgggatttgggccaacaccagtcctgaggctgaactcttcccagctcttagaccgaggcgggtgggtatagcgctagattacgaaggcggtaccgtgacctttaccaacgcggaaagtcaggagcttatttacaccttcactgctaccttcaccaggcggctggtaccctttctttggctaaaatggccaggcacgcgacttctactcagaccctag

SEQ ID NO: 269400 - DNA, 1620 bp, Artificial Sequence
  derived and/or modified sequence
atggcgacaagcgcacctctgcggagtttggaggaagaggtgacctgctcaatctgtttagactatctacgcgacccagtgaccattgattgcggccacgtgttctgtcgatcgtgcacaaccgatgttagacccatctccgggtcaaggcccgtttgtcccttgtgcaagaaaccttttaagaaggaaaatataaggccagtttggcaactggcaagcctggtggagaatattgaacggctcaaggtggataaagggaggcaaccaggcgaagtgacaagggagcagcaggacgcaaaactgtgtgaacggcatagggaaaagttgcattactattgtgaggatgatggcaagctgctgtgtgtcatgtgcagagagtcccgcgagcaccgccctcacaccgccgtgctcatggagaaagctgctcaacctcacagggaaaaaatcctgaaccatcttagtaccttgagacgcgaccgggataaaatccaaggcttccaggctaagggagaggccgatattcttgccgcacttaagaagctgcaagatcagcggcaatatatcgtggcagaattcgagcaaggccaccagttccttagggaaagagaggaacacctgctggagcagctggcaaaactcgagcaggaacttacagaaggaagggagaaatttaagtcccggggtgttggtgagcttgcaagacttgcgctggtgatttccgaacttgagggaaaggcccagcagccagctgcagaactgatgcaggatacgcgtgattttttgaataggtacccgaggaagaagttctgggttgggaagccgatcgcacgtgtagtcaagaagaagactggagagttcagtgataagttactcagcttgcagcgaggccttcgcgagttccaaggaaagcttcttcgtgacctagaatataagacggtgagcgtgacattagacccccaatcagcctccggatacctgcaactttctgaggactggaagtgcgttacctatactagcctgtacaaaagcgcatacctccatccacagcagtttgattgcgaacctggcgtactggggtctaaaggttttacatggggcaaggtctattgggaagtcgaggtggagagggaaggatggtccgaggatgaggaagaaggtgatgaagaagaggagggcgaggaagaagaagaagaagaagaggctggctatggcgacggctatgacgactgggaaaccgatgaggatgaggaaagcttgggggacgaggaggaagaggaggaagaggaagaagaggaggtcctggagtcctgtatggtaggggtagcacgggattccgtaaaacgcaaaggggacctgtctctcaggccggaagacggtgtctgggcgctgagactgtccagtagtgggatatgggctaacacgagtcctgaagctgaactctttcccgctcttagaccacgaagggtgggaatcgctctggattatgagggcggtacggttaccttcaccaatgctgaatcccaggagctcatctatacctttactgccacatttacacgccgtcttgtgcccttcctctggctcaagtggcctggtacccgcctgttgctccggccatag

SEQ ID NO: 269401 - DNA, 1620 bp, Artificial Sequence
  derived and/or modified sequence
atggccacatctgcgccactgagaagccttgaggaggaggtgacatgctcaatttgcctcgactacttgcgcgatcctgttaccatcgactgtggtcatgtgttttgccgcagttgtaccaccgatgtgagacccattagcggcagccgcccagtctgtccactgtgtaagaagccatttaaaaaggagaatatccgacccgtgtggcagttggcaagtcttgttgaaaacattgagagacttaaagtcgataagggtcgtcagccaggggaggtgaccagggagcagcaagatgccaaactctgcgaacgccatcgagagaagttgcactattactgtgaagatgacggtaagttgctgtgtgttatgtgtagggagtcccgcgaacaccgacctcacacagcagtacttatggaaaaagcagcacaaccacaccgggagaaaatcctcaatcaccttagtactcttcgcagagatcgggacaaaatccagggattccaggctaagggggaggctgatatactggcagctctcaagaaacttcaggatcagagacagtacatcgtagcagaatttgagcagggccaccagtttctgcgggagagagaagagcacttgttagagcaactggcgaaactggagcaggaactcacagaaggacgcgaaaaattcaaatcccgcggtgtaggggaattggccaggctcgcactggttattagcgagctggaaggaaaagctcagcaaccagctgccgaactgatgcaggacacacgcgatttccttaacaggtatcccagaaaaaaattttgggtgggcaagccgattgcgagagtcgtcaagaaaaagacgggggaattttccgataagcttctttctctgcagaggggtctgcgagaatttcagggaaaactgttgagagatctcgagtataagaccgtatcggtcactctcgaccctcagtctgccagtgggtatctgcagctgtccgaagattggaaatgcgtaacttatacaagcctctacaaaagtgcttacctgcacccacaacagtttgactgcgaacctggagtactcggcagcaaaggcttcacttggggcaaggtgtactgggaagtggaggttgagagggaaggctggagcgaggacgaagaagaaggcgatgaagaggaagagggcgaggaggaagaggaagaggaggaggcaggctacggagatgggtacgatgattgggaaaccgacgaagatgaggaatccctgggagacgaagaggaggaagaagaagaggaggaggaggaagtattagagagctgtatggtgggcgtcgcgcgagactctgtgaagcggaagggagatctcagtctgcgacccgaagacggggtgtgggccctgcggctatctagcagcggcatatgggcgaatactagcccggaggcagagctttttcctgctttgcgcccacggcgagtgggaatcgccctggattacgagggtgggaccgtcactttcacgaatgctgagtctcaagaactgatttataccttcactgcaacattcacgcgtcgactggttcctttcttgtggttgaagtggcctggtaccaggcttcttctgaggccatag

SEQ ID NO: 269402 - DNA, 1620 bp, Artificial Sequence
  derived and/or modified sequence
atggcaacgtctgctcccctcagatctctagaagaggaagtcacgtgcagcatctgcctggattatttgcgagacccggtgaccattgattgtgggcatgtcttttgtcgttcttgcaccactgacgttaggccaatcagcggatcgcgtccagtgtgccctctctgcaagaagccttttaagaaggagaacatcagacctgtttggcaattggcctcattagtggaaaacattgaaagactgaaagtggacaaaggacggcagcccggagaggtgactcgggagcagcaagatgccaagctgtgcgaacgacaccgcgaaaagctccattactattgtgaggacgacgggaagttgctctgtgtgatgtgtcgagagagcagggaacacagaccccatactgccgtgctgatggagaaagccgcacagccacatagagaaaagatcttaaaccatctctccacactgaggcgggatagagataagatccaggggttccaggctaagggtgaagctgacatactggccgcacttaagaaattgcaggaccaaaggcagtacattgttgctgagttcgagcaaggtcatcaattcctccgagaacgtgaggaacaccttttggaacagctggccaaactcgaacaagagctcacagagggacgtgaaaaatttaagtccagaggagttggagagctggccaggttggccctcgtgataagtgaactggagggaaaagcacagcagccagccgctgaactgatgcaggacacccgcgacttcctaaatcgttaccctaggaaaaagttttgggtggggaagcctatcgcccgagtggttaagaaaaagaccggagagttcagtgataaactcctttcattgcaacggggtctccgagaatttcagggaaagttgcttagggatctggaatataagacagtttctgtgacgctcgatcctcagagtgcttctggttatttacagctaagtgaagactggaagtgcgtcacatatacctcattgtacaaatcagcctacctgcacccacagcaattcgactgcgaacctggggtccttggctcgaaaggctttacgtggggcaaggtttactgggaggtcgaggtggagagagaagggtggagcgaagatgaggaagaaggtgatgaggaggaggaaggcgaagaggaggaggaggaggaggaggcaggttacggtgatggctacgatgattgggagacggacgaagatgaagagagcctgggtgacgaggaggaagaggaggaggaggaagaagaagaagttctggagtcttgtatggtgggtgtcgcaagagactccgtcaaacggaagggcgacctgtctctcagaccagaagatggggtttgggcgttgcgcctttcttccagcggcatctgggcgaacaccagtccggaagctgaattattcccagcattgaggcccagacgtgtcgggatcgctctggattacgaaggaggcactgtgactttcacaaatgccgaatctcaggaattaatttatactttcaccgcaaccttcactaggagactggttcccttcctctggttgaagtggccaggtactcgcttactgcttcgcccatag

SEQ ID NO: 269403 - DNA, 1620 bp, Artificial Sequence
  derived and/or modified sequence
atggcgaccagtgctcccctcagaagcttggaggaagaagttacctgctctatctgtctcgattatctgagagatccagtcacgatcgactgcggacatgtcttttgccgtagttgtaccaccgacgtcaggcctatttccggttctcggcctgtttgccccctttgcaagaagccttttaagaaagagaacattaggccagtttggcagttggcttctcttgttgaaaatattgaaagactgaaagtggataaaggccgacagcccggtgaggtcacccgcgaacagcaggacgcaaagctgtgcgagcgtcatagggagaagttacactactactgtgaagatgacggaaagctgttatgcgtcatgtgcagagaatcacgagagcataggccgcataccgcagtcctgatggagaaggcagcacagccgcaccgagagaagatcctcaaccacctgagcacactccgccgagacagagacaagattcagggattccaggccaagggagaggctgacattcttgcagcgctgaagaagcttcaggatcagcgccagtacatagtggccgaattcgaacagggacatcagttcctgagagagcgtgaggaacatttactcgaacagctcgcaaagctggaacaagagctaacggaaggcagggaaaagttcaagtcccggggagtcggagaactggccaggctcgctctcgtgatctccgaattagagggaaaagcccagcagccagctgcggagctgatgcaggacacccgcgatttccttaaccgctatcctagaaaaaagttctgggtgggtaagcctatcgcgagggttgtcaagaaaaagacaggtgagttcagtgacaaactgctgtccttgcaacgcggactacgcgagttccaggggaagctcctgagggacctggagtacaagaccgtgtccgttaccttggatcctcagtctgcatccggttacttgcagctcagcgaagactggaagtgcgtgacatacactagcctttacaaaagcgcttatctgcacccacagcagttcgattgtgagccaggcgtgttgggcagcaagggattcacttggggtaaagtgtattgggaggtcgaggtcgagagagaagggtggagtgaggacgaggaggagggcgatgaagaagaggaaggcgaagaggaggaagaggaggaggaggccggttatggcgacggttacgatgattgggagaccgatgaggatgaggaatccctgggagatgaggaagaagaagaggaggaggaggaagaggaagtactcgagtcttgtatggttggggtggcacgggactctgtgaaaagaaaaggcgatctgagcttgaggcccgaggatggagtatgggccctaaggttaagtagcagcggaatatgggccaacacctcacccgaagccgaactgttccccgctcttcgcccacggagggtcgggattgctctcgactatgagggaggcaccgtaacattcacaaacgcggagtcacaagagctgatttatacattcactgccacattcactcgtcggttggtcccctttctctggttgaaatggcccggaactagacttttgctgagaccctag

SEQ ID NO: 269404 - DNA, 747 bp, Artificial Sequence
  derived and/or modified sequence
atggctacgtctgccccactgagatccctggaggaagaggtgacctgtagtatttgcttagactatctacgagatccagtgacaattgattgcggccacgtcttttgcagatcctgcacaactgacgtcagacctattagcgggagcaggcctgtgtgtccactgtgtaagaagccatttaaaaaggagaatataagacccgtgtggcaactggccagcttggtggaaaacattgagcgtcttaaggttgacaaagggagacaacccggagaagtgacacgcgagcagcaagatgccaagctgtgtgagagacatcgggaaaagttacattactattgcgaggacgacgggaagctcctgtgtgtgatgtgtagagaatcccgagaacacaggccccacactgccgtactcatggaaaaagctgctcagccccaccgtgagaagatactcaaccatctctcgactcttcggcgagatagagataagatccagggcttccaagcaaagggcgaagccgatattctagcggctctcaagaaactacaggaccaacgccagtacatagtcgccgagttcgaacaagggcaccagttcctaagagagagagaagagcacctgttggagcaattagctaagttagagcaagagttaaccgaaggacgcgagaagtttaagtcccggggagtcggtgagctggcgcgattggccttggttataagcgaactggaggggaaggctcaacaatag

SEQ ID NO: 269405 - DNA, 1620 bp, Artificial Sequence
  derived and/or modified sequence
atggcaacatctgcccctctcaggtccctcgaagaagaagttacatgctcgatttgcttagactacctgcgagatccagtcaccatcgactgcggccacgtgttttgtcgctcctgcacgacggacgtgaggcccatttcaggcagcagaccagtttgtcctctctgcaagaagccttttaagaaagagaacatccgccctgtttggcagctggccagcctggttgaaaatatcgagagacttaaggtggataagggcagacaacccggagaagtcacacgcgaacagcaagacgccaagctgtgcgagaggcatcgcgaaaaactgcactactactgcgaagacgacggaaagctgttgtgcgtaatgtgtcgcgagtcccgagagcataggccacacaccgcagtgctcatggaaaaagccgctcaaccacacagggaaaagatcctgaatcacctttcaacccttaggagagaccgggacaagatccaaggcttccaagctaaaggagaagccgatatcctcgccgcactgaagaagctccaggaccagaggcagtacatcgtggcagaatttgagcaggggcaccaatttttacgggagcgtgaggagcacctgctagaacagctggccaaactcgagcaagagcttacagagggacgtgagaagttcaagtccaggggcgtgggagagcttgcccgactcgctctggtgattagcgagctggagggcaaagcccaacagcccgctgccgaactaatgcaagatactcgagacttcttgaacagataccctcgcaagaagttctgggtgggtaaacccattgccagagtggtgaaaaaaaaaactggggagttctctgacaaactgctgagcctgcagcgagggctgcgagagttccaagggaaactcttacgggacctcgagtacaagaccgtgagtgtgacactggacccccagagcgcctcagggtatctgcaactttctgaagactggaagtgcgtgacctatactagcttatacaagagcgcatatctccatccacagcagttcgactgtgaacccggagtactaggaagcaaaggttttacgtggggtaaggtatactgggaggtggaggtggaacgggaaggctggagcgaagatgaggaggaaggcgacgaggaggaagagggcgaagaagaagaagaggaggaggaggcgggttacggcgacggttatgacgattgggagactgacgaggacgaagaatctctcggagatgaggaggaggaagaagaggaggaagaagaagaagtactcgaatcttgcatggtcggagttgccagagatagcgttaagaggaagggtgacctgtctctgaggcccgaggacggggtttgggcactccgactctccagcagcggcatttgggctaatacaagtcctgaggctgaattgtttcccgctctgagacctcgtcgagtgggaatcgccttagattatgaaggtgggaccgtgacattcaccaatgccgagtcccaggagcttatctacacctttacagccacgttcacacggagattggtgccatttttgtggcttaagtggcccggaacccgtctgctgcttaggccttag

SEQ ID NO: 269406 - DNA, 1620 bp, Artificial Sequence
  derived and/or modified sequence
atggccacctctgccccactcagatctctggaggaggaggtaacctgctccatctgcttagactatcttagagacccagtcaccatcgactgtgggcacgtgttctgtaggtcctgtacaactgacgttaggcccatttctggcagccgaccggtgtgcccgctatgcaaaaagccctttaagaaggagaatatccggcctgtgtggcagcttgcatcgctggtcgaaaacattgaacgtctcaaggtggacaagggtcgccaacccggagaagttacccgggagcagcaggacgccaaactttgcgaacgccatcgagagaaactgcactattactgtgaagatgatggtaaactcctctgcgttatgtgcagagaatccagagagcacaggccacacaccgctgtcctgatggagaaagctgctcagcctcacagagaaaagattttaaaccacctctctaccctgagacgcgatagagataagattcagggcttccaggcaaaaggtgaggctgacatcctggctgccctcaaaaagctgcaagatcagagacagtacatcgtagccgagtttgagcaggggcatcagttcctgagggaacgtgaggaacacctccttgaacaacttgccaagctggagcaagaactgacagaaggacgggaaaagttcaaatctaggggagtcggtgagctagcaagactcgccctcgtcatcagtgagctcgagggcaaagcccaacagcctgccgcagagctcatgcaggacacgagagatttcttgaaccgctaccctaggaagaaattttgggtaggcaaacccattgcgcgtgtagtgaagaagaagacaggggagttttcagataaactgctgagccttcagagaggactgagggagttccagggtaagcttctgcgcgatctcgaatataagaccgttagcgtgacattagatccacagagcgcatccggctatctgcagctttcggaggactggaagtgtgtgacctatacatctttgtataaatctgcttatctgcacccacagcagtttgattgcgagccgggagtcttgggcagcaaaggcttcacatggggaaaagtgtattgggaggtggaggtggagagggaggggtggtctgaagacgaggaagaaggcgacgaagaggaggagggagaagaggaggaggaagaagaagaagctggatacggggacgggtacgatgactgggagacagatgaggatgaggagagtctgggtgacgaagaagaggaggaagaagaggaagaggaagaggtcctggagtcctgtatggtgggcgtcgccagggatagcgttaagcgaaaaggtgacctctccctgcgaccggaggacggcgtgtgggcacttaggctgagttcttccgggatctgggcaaatactagccctgaagcagagctgttcccagcactgcgtccgcgacgggtgggcatcgcactggattacgagggtggcacggtgaccttcacaaatgccgagagccaggagttgatctacacctttacggccaccttcacacggcgtctggtcccatttctatggctgaagtggcccggtacgagactcctcctacgcccttag

SEQ ID NO: 269407 - DNA, 3318 bp, Artificial Sequence
  derived and/or modified sequence
gggagattacggggcggggacgagctgtcgcgctggttgctcgtgcaggagcgggacccggaacagaccgccgtgagagaggaggggcgccggccgggattcgcggcccggagctcgggaccggttgcttcattccagcctcgcagtcacctctgtgccctgctggttgtcttcccagcgctgctgtagttgccttccatggatctataggagagcaagtcctccaggagaagaagtcctcaccagtgaacggagacctctctgaactaaggataccatggccacgtcagccccactacggagcctggaagaggaggtgacctgctccatctgtcttgattacctgcgggaccctgtgaccattgactgtggccacgtcttctgccgcagctgcaccacagacgtccgccccatctcagggagccgccccgtctgcccactctgcaagaagccttttaagaaggagaacatccgacccgtgtggcaactggccagcctggtggagaacattgagcggctgaaggtggacaagggcaggcagccgggagaggtgacccgggagcagcaggatgcaaagttgtgcgagcgacaccgagagaagctgcactactactgtgaggacgacgggaagctgctgtgcgtgatgtgccgggagtcccgggagcacaggccccacacggccgtcctcatggagaaggccgcccagccccacagggaaaaaatcctgaaccacctgagtaccctaaggagggacagagacaaaattcagggcttccaggcaaagggagaagctgatatcctggccgcgctgaagaagctccaggaccagaggcagtacattgtggctgagtttgagcagggtcatcagttcctgagggagcgggaggaacacctgctggaacagctggcgaagctggagcaggagctcacggagggcagggagaagttcaagagccggggcgtcggggagcttgcccggctggccctggtcatctccgaactggagggcaaggcgcagcagccagctgcagagctcatgcaggacacgagagacttcctaaacaggtatccacggaagaagttctgggttgggaaacccattgctcgagtggttaaaaaaaagaccggagaattctcagataaactcctctctctgcaacgaggcctgagggaattccaggggaagctgctgagagacttggaatataagacagtgagcgtcaccctggacccacagtcggccagtgggtacctgcagctgtcagaggactggaagtgcgtgacctacaccagcctgtacaagagtgcctacctgcacccccagcagtttgactgtgagcctggggtgctgggcagcaagggcttcacctggggcaaggtctactgggaagtggaagtggagagggagggctggtctgaggatgaagaagagggggatgaggaggaagagggagaagaggaggaggaggaagaggaggccggctatggggatggatatgacgactgggaaacggacgaagatgaggaatcgttgggcgatgaagaggaagaagaggaggaggaagaggaggaagttctggaaagctgcatggtgggggtggctagagactctgtgaagaggaagggagacctctccctgcggccagaggatggcgtgtgggcgctgcgcctctcctcctccggcatctgggccaacaccagccccgaggctgagcttttcccagcactgcggccccggagagtgggcatcgccctggattatgaagggggcaccgtgactttcaccaacgcagagtcacaggaactcatctacaccttcactgccaccttcacccggcgcctggtccccttcctgtggctcaagtggccaggaacacgcctcctgctaagaccctgagccctgacatctgcccccagccccaaccctcagatgcttcacttctttggaattccaggactctcaatggggggacgggatgcctggcctaagcacctggagcaggggaccccatatccactggtagccacctccccattgctgtggccccctgaaatctcactcagtgctgttgctccatctactgccctaatggggctcttttcccacctcctgctggtttcccgagggaacttctgaccctggagtccatgagggctcctttcctttttgaccacgaccttggccccagctctgcactctctggaataagggcccgatgcagcattttcttgcccagtgtggcaagacctcagaaaaaccagtcaattacgcctaagatcattttgctgtccttaaaccccccaggttccttcttgcacaaatccactctgctgcccaccttccctggcattttaaacagacctaccccaccccaactcagagttaagcatacatggcaatgctgaaaataaacaaaatccactgaggcttcccaggccatttaaagcctggagtaccagcgcatatcatctcatggggtccagagtggagtccaggcttctctgaaaccagggctgagcatatttccatagccaaggaggtgggactccctggagctatctgtggtcttagggaaggatccagacatacacggctttggggtacaagctgtgatcactgatcaataaattatctctagattggtccttgtgaggggagttttaagaatccagaacatcttgctcttgatcagcacatccaaaaacaccaagacaaacatccagtggagcagaacctctcctgcctcgggagttctgaccaggttccccagcagggtgttaagcctctgtctctggccctaccagcatccaggttccactttcctaggagagagtggagatgggaagacagggaaaggaaggcagcaggaggccacaagcccaccaggtcttcatgtcaagagagggagtaacatgtcttctcattgcccacggacccaacctctgtccaggtgcccctcatcatcacagtttaacacaagctcccctgctccagccaaattgatctcccagtcttgtccttacccattccaagtgctctgccagcccctgttcatccaagttttaagtcctccaccctgttctaagagactgttccaacggctctgggcctcagtggtcacttgaccaccattgtctcagagctgcccactttgtgtgtgtcacatgctgcctgagtcacacgtacatcttatttctgcctctagttttgtaagctcctggagggcggataacatcttatactactcttgtattctcatggcacctagtgcagtgctgggcacagagtaggtgctcaataaagacttgttgaatgaa

SEQ ID NO: 269408 - DNA, 1620 bp, Artificial Sequence
  derived and/or modified sequence
atggctaccagtgcgcctttgcgaagtcttgaggaggaggtcacatgctccatctgtctggattacctccgcgatcccgtaactatcgactgcgggcacgttttttgccgctcttgcacaaccgacgtgcgtccaatctcagggtcgaggccagtgtgccctctatgtaagaaaccattcaaaaaggaaaatatccgcccagtatggcaactggccagcttagtggaaaatatcgaacgtctgaaagttgataagggcagacagcccggagaggttaccagggagcaacaggatgcgaaactatgtgaacgccatagagaaaagctccactactattgtgaagatgatggaaagttgctgtgcgtgatgtgcagggagtcgcgggagcatagaccgcatacagctgttctaatggaaaaagctgcccaacctcatcgggagaaaatcctgaatcatctgagcactctgcgcagagatagggacaagatccaaggtttccaggcaaagggcgaagccgatatactagcagccctgaaaaagttgcaggatcaacgccagtatatcgttgctgagttcgaacagggtcatcaatttctcagagagcgcgaagagcatctgctggagcagttggccaagttagagcaggagctgaccgaaggcagagagaagttcaagtctcgcggagtcggcgagctagctcgtttggccctggttatatcagagcttgaaggtaaggctcagcagcctgcggcagagctgatgcaggataccagagactttctcaatagataccccaggaagaagttttgggtgggaaaaccgattgccagggttgttaagaaaaaaacaggagaattctctgataagttactgagtttgcagcggggtcttagagagtttcagggcaaattactaagggacctggaatacaaaacagttagcgttacattggatccgcagagtgcatcggggtacctacagctgagcgaagactggaaatgcgtaacttacacctctctgtataagtccgcttatctgcatcctcagcagtttgactgcgaacctggtgtactgggctccaagggcttcacatgggggaaagtctactgggaggtggaggtagaacgagagggatggtccgaggacgaagaggaaggagacgaggaggaagagggtgaggaggaagaggaggaggaagaagccggttacggggacggctatgacgactgggaaacagatgaggatgaagagtctttgggcgacgaggaggaagaggaggaggaggaagaagaagaggtgctggaatcctgcatggttggggttgcaagggactccgtgaagaggaagggagacctttctctgcggcctgaagacggggtgtgggcacttcgtttgtcttcatcaggcatttgggccaatacttcgcctgaagccgagctatttcccgcactgcggccaaggcgggtaggcatcgctttggactatgagggtgggaccgtgacattcaccaacgctgaatcccaggaactcatctacaccttcaccgcaacattcacacgacgtttagtccctttcctgtggttgaaatggcctggaacacggctgctgcttaggccctag

SEQ ID NO: 269409 - DNA, 747 bp, Artificial Sequence
  derived and/or modified sequence
atggcaacttccgccccactgagatcccttgaagaagaggtcacatgctctatctgtctcgactacctgcgggatcctgtaaccatcgactgtggacacgtattctgccggagctgtacaactgacgtacgaccaatctccggttcccgacctgtgtgtccactctgtaagaagcctttcaagaaggaaaatataagacccgtgtggcagctcgcctctctggtggagaatattgaacggctcaaagtggacaaaggcagacagccaggcgaggttacaagggagcaacaggacgcgaagctttgcgagaggcaccgcgagaagctgcactactactgcgaagacgatggcaagttactgtgcgtgatgtgtcgcgaaagccgggagcaccgcccacatacggcggttttaatggagaaagctgcacagcctcatagggaaaaaatacttaatcatctgagtactctcaggagagacagggataaaatccaggggtttcaggccaagggtgaggccgacatcctggcagcgttgaagaaactacaggatcagaggcagtatattgttgcagagtttgaacagggccaccagttcctgcgtgaaagagaagagcacctgctggagcagttggcaaagcttgaacaggaactcaccgaaggtcgggagaagtttaagagccggggtgtcggggagctcgctcgattggccctcgtgattagtgagctggaggggaaggcacaacagtag

SEQ ID NO: 269410 - DNA, 747 bp, Artificial Sequence
  derived and/or modified sequence
atggcgacgagcgcccctctgcgatccctcgaggaggaggtgacgtgtagcatctgtctggattacctgcgggacccagttaccatcgattgcggccacgtattctgtcgaagctgtactactgacgtccgcccaattagtggttctcgccctgtttgcccgctttgcaaaaaacctttcaaaaaagaaaatatcaggccggtatggcaactggcaagtctggttgagaatatcgagcggttgaaggtggacaaaggtcggcaacccggagaagtgactagggagcagcaggatgcaaaactctgcgagaggcacagggagaagctacactactactgtgaagacgatgggaaactcctctgtgtaatgtgccgagaaagccgggagcataggcctcacacagctgtgttaatggagaaggctgcacagccccatcgggagaagatcttgaaccacttaagtactctacggagagatagggacaaaatccaaggctttcaggctaagggagaggccgacatcctggctgctctgaaaaaactgcaggatcaacgtcaatatatagtcgccgagttcgagcagggacatcaatttctgcgcgaaagagaagagcatctgcttgagcagttggccaaactggagcaggaactaacagaaggacgcgagaagttcaaaagccgcggtgtaggagagctggccagactcgcactggttattagcgagctggaaggcaaggcacagcaatag

SEQ ID NO: 269411 - DNA, 1620 bp, Artificial Sequence
  derived and/or modified sequence
atggcaacttccgcacctctgagaagcctggaggaagaggtgacctgttccatttgtttagactacctccgcgacccagtaaccatcgattgcggccacgttttctgcaggtcgtgtactaccgatgtccgacccatatcgggatcacgccctgtctgtcctctgtgtaaaaagccttttaagaaggaaaacatcaggcctgtatggcagctcgcgagtctggtggaaaacatcgaaagactgaaggtcgacaaaggtcgacagccaggagaagttactcgggagcagcaagatgcaaagctgtgcgaacggcaccgggagaagctacactattattgtgaggatgacggcaaactactgtgtgtgatgtgccgcgagagccgtgagcaccggccacatacagccgtcttgatggagaaggccgctcagccccaccgtgagaaaattctgaaccatctatcaactttacggcgtgatcgggacaagattcaagggtttcaggcaaaaggagaggccgatatcctcgcagccctgaaaaagctgcaagatcagcgccaatatatcgtcgctgagtttgagcagggccaccagtttctgcgggagcgcgaagaacatctgctggagcagctggccaagctggagcaagagctgactgagggaagggaaaagttcaagagccgtggcgtcggcgaactcgctcggctcgccctagttatctctgagctggagggcaaggcccagcaacccgctgcagagctgatgcaggacactagagactttttgaacagatacccccgaaaaaagttctgggtcggcaaaccgatcgctcgggtagtcaaaaagaagacaggggagttctcagataagcttcttagcctccaaagaggcctgagggaatttcaagggaagctgttacgcgatttggaatacaagaccgtttccgtgaccctcgatccccagtcggcatccggctacctgcaactgtcagaggattggaagtgcgttacctatacatctttgtataaaagcgcctatctgcatccccaacagtttgactgtgagcccggagtcctagggtcaaagggcttcacctgggggaaagtgtattgggaagttgaagttgaaagagagggttggtccgaggatgaggaagagggggacgaagaggaagagggagaggaagaagaggaggaagaagaggcgggttacggtgacgggtatgatgattgggagacagacgaagatgaggaatctctgggcgatgaggaggaagaagaagaggaggaagaagaagaagtgctggagagttgcatggtgggggtagcaagggacagcgtcaagcgcaagggtgatctgtcactgagacccgaggacggtgtttgggcccttaggctaagctcaagtggaatttgggccaacaccagccccgaggctgaacttttccccgctctacgccctaggagggtggggattgccctggactatgaagggggtaccgtcacttttacgaatgcagagtcccaggagctcatatatacttttaccgcgaccttcactcggcgactagtgcccttcctctggctcaagtggccgggaacccgactgctgcttcggccttag

SEQ ID NO: 269412 - DNA, 747 bp, Artificial Sequence
  derived and/or modified sequence
atggccacatctgctccattgcgctcccttgaagaagaagttacctgttccatatgtctggactatctgagggaccccgtgacaatcgattgtggacatgtgttttgtaggtcttgtacaaccgatgtccgcccaatatcgggatctcgtccagtctgccctttatgtaaaaagcccttcaagaaagaaaacatcaggcctgtgtggcagctggcgtccttggtagaaaacatagaaagactcaaggtggacaaaggacgccaaccgggagaggtaactcgtgagcagcaggacgctaagctctgcgagaggcaccgcgagaagctgcattattactgtgaggatgacgggaagctgctatgtgtgatgtgccgcgagtccagagagcacaggcctcatactgccgttttgatggaaaaggccgctcagcctcaccgggaaaaaattctcaatcacttatctactcttaggcgggatcgcgataagatccaggggttccaggcaaagggggaagccgacattctggcagctttaaagaagctacaggaccagaggcaatacatagttgcagagttcgaacagggacatcagtttctgcgcgagcgcgaagagcatctcctcgagcaactggccaaacttgaacaagagctgacggaagggagggagaaatttaagagccgaggggtgggggagttggctcggctcgcccttgtgatttccgagctcgagggtaaagcacagcaatag

SEQ ID NO: 269413 - DNA, 1620 bp, Artificial Sequence
  derived and/or modified sequence
atggccacctccgctccactgcgaagcctcgaggaagaagtgacctgcagtatctgccttgactacctgagggacccggtgacaatcgactgtgggcatgttttctgccggtcttgtaccacggatgtgaggcctatttcgggaagtcgcccagtctgcccactgtgcaagaagccattcaagaaggagaacattcgaccagtttggcaacttgccagtctagtagagaacatcgaaagactcaaagtggacaagggacggcagccaggtgaagtaacccgtgagcagcaagacgccaaactgtgcgaacgacaccgcgaaaagctacactactactgcgaagatgatggcaaactcttgtgtgtcatgtgtcgcgaaagccgggaacataggcctcataccgcggtgttgatggagaaagcagcccagcctcaccgggagaagatattgaatcacttaagcacactgcgccgtgaccgcgataaaattcaggggttccaggccaagggtgaggcagacattctggcagccttgaagaagctgcaggatcaaaggcagtatattgtagccgagttcgagcagggacaccagtttctgcgggagcgcgaggaacatttgctggaacagttggctaagctagagcaagagctcaccgagggacgagagaaatttaaatcacgcggagtgggagaattagccaggctggcccttgttataagtgagctagagggtaaagcccaacagcccgcagcagagctcatgcaagacactagggactttttgaatcgctaccctaggaaaaagttctgggtgggcaagcctatcgcacgcgtcgtgaagaaaaaaaccggagaattcagcgacaaactgctgtcacttcagaggggcctcagagaattccagggtaaactgctgcgggatctggagtataagacagtctccgtaactttggatccccaatctgcgagcggataccttcagctgagcgaagactggaagtgtgtgacatataccagcctgtataagtccgcctacttgcaccctcagcagttcgactgtgagcctggcgttcttggctccaagggatttacctggggcaaagtttactgggaggttgaggtggaaagagaggggtggtctgaagacgaagaagaaggtgacgaagaagaggaaggggaagaggaagaagaagaggaggaggccggttacggtgacgggtacgatgattgggagaccgacgaagacgaggaatctcttggtgacgaggaggaggaagaggaggaggaagaggaggaagtccttgagtcatgcatggtgggcgtggcccgtgactcagtcaaacgtaagggcgatctcagcctgcggccagaggacggggtatgggcactgcggctgagttccagcggaatctgggccaatacaagccctgaagcggaattgttccctgctttgcggcctagacgcgtcggcatcgctttggattatgaaggcggaaccgttaccttcaccaatgccgaaagccaggaacttatttacacgttcacagcaacgttcaccagacgcctggtgccattcttgtggttgaagtggccaggtactcgtctcctcctgcgcccatag

SEQ ID NO: 269414 - DNA, 3318 bp, Artificial Sequence
  derived and/or modified sequence
gggagattacggggcggggacgagctgtcgcgctggttgctcgtgcaggagcgggacccggaacagaccgccgtgagagaggaggggcgccggccgggattcgcggcccggagctcgggaccggttgcttcattccagcctcgcagtcacctctgtgccctgctggttgtcttcccagcgctgctgtagttgccttccatggatctataggagagcaagtcctccaggagaagaagtcctcaccagtgaacggagacctctctgaactaaggataccatggccacgtcagccccactacggagcctggaagaggaggtgacctgctccatctgtcttgattacctgcgggaccctgtgaccattgactgtggccacgtcttctgccgcagctgcaccacagacgtccgccccatctcagggagccgccccgtctgcccactctgcaagaagccttttaagaaggagaacatccgacccgtgtggcaactggccagcctggtggagaacattgagcggctgaaggtggacaagggcaggcagccgggagaggtgacccgggagcagcaggatgcaaagttgtgcgagcgacaccgagagaagctgcactactactgtgaggacgacgggaagctgctgtgcgtgatgtgccgggagtcccgggagcacaggccccacacggccgtcctcatggagaaggccgcccagccccacagggaaaaaatcctgaaccacctgagtaccctaaggagagacagagacaaaattcagggcttccaggcaaagggagaagctgatatcctggccgcgctgaagaagctccaggaccagaggcagtacattgtggctgagtttgagcagggtcatcagttcctgagggagcgggaggaacacctgctggaacagctggcgaagctggagcaggagctcacggagggcagggagaagttcaagagccggggcgtcggggagcttgcccggctggccctggtcatctccgaactggagggcaaggcgcagcagccagctgcagagctcatgcaggacacgagagacttcctaaacaggtatccacggaagaagttctgggttgggaaacccattgctcgagtggttaaaaaaaagaccggagaattctcagataaactcctctctctgcaacgaggcctgagggaattccaggggaagctgctgagagacttggaatataagacagtgagcgtcaccctggacccacagtcggccagtgggtacctgcagctgtcagaggactggaagtgcgtgacctacaccagcctgtacaagagtgcctacctgcacccccagcagtttgactgtgagcctggggtgctgggcagcaagggcttcacctggggcaaggtctactgggaagtggaagtggagagggagggctggtctgaggatgaagaagagggggatgaggaggaagagggagaagaggaggaggaggaagaggaggccggctatggggatggatatgacgactgggaaacggacgaagatgaggaatcgttgggcgatgaagaggaagaagaggaggaggaagaggaggaagttctggaaagctgcatggtgggggtggctagagactctgtgaagaggaagggagacctctccctgcggccagaggatggcgtgtgggcgctgcgcctctcctcctccggcatctgggccaacaccagccccgaggctgagcttttcccagcactgcggccccggagagtgggcatcgccctggattatgaagggggcaccgtgactttcaccaacgcagagtcacaggaactcatctacaccttcactgccaccttcacccggcgcctggtccccttcctgtggctcaagtggccaggaacacgcctcctgctaagaccctgagccctgacatctgcccccagccccaaccctcagatgcttcacttctttggaattccaggactctcaatggggggacgggatgcctggcctaagcacctggagcaggggaccccatatccactggtagccacctccccattgctgtggccccctgaaatctcactcagtgctgttgctccatctactgccctaatggggctcttttcccacctcctgctggtttcccgagggaacttctgaccctggagtccatgagggctcctttcctttttgaccacgaccttggccccagctctgcactctctggaataagggcccgatgcagcattttcttgcccagtgtggcaagacctcagaaaaaccagtcaattacgcctaagatcattttgctgtccttaaaccccccaggttccttcttgcacaaatccactctgctgcccaccttctctggcattttaaacagacctaccccaccccaactcagagttaagcatacatggcaatgctgaaaataaacaaaatccactgaggcttcccaggccatttaaagcctggagtaccagcgcatatcatctcatggggtccagagtggagtccaggcttctctgaaaccagggctgagcatatttccatagccaaggaggtgggactccctggagctatctgtggtcttagggaaggatccagacatacacggctttggggtacaagctgtgatcactgatcaataaattatctctagattggtccttgtgaggggagttttaagaatccagaacatcttgctcttgatcagcacatccaaaaacaccaagacaaacatccagtggagcagaacctctcctgcctcgggagttctgaccgggttccccagcagggtgttaagcctctgtctctggccctaccagcatccaggttccactttcctaggagagagtggagatgggaagacagggaaaggaaggcagcaggaggccacaagcccaccaggtcttcatgtcaagagagggagtaacatgtcttctcattgcccacggacccaacctctgtccaggtgcccctcatcatcacagtttaacacaagctcccctgctccagccaaattgatctcccagtcttgtccttacccattccaagtgctctgccagcccctgttcatccaagttttaagtcctccaccctgttctaagagactgttccaacggctctgggcctcagtggtcacttgaccaccattgtctcagagctgcccactttgtgtgtgtcacatgctgcctgagtcacatgtacatcttatttctgcctctagttttgtaagctcctggagggcggataacatcttatactactcttgtattctcatggcacctagtgcagtgctgggcacagagtaggtgctcaataaagacttgttgaatgaa

SEQ ID NO: 269415 - DNA, 1620 bp, Artificial Sequence
  derived and/or modified sequence
atggcgacctccgcaccccttcgctcgctggaggaggaggtcacttgttcaatatgtcttgactacttgagggatccagtgacgatcgactgtggccacgttttctgtcgaagttgcacaacggacgtgcgcccaatctccggaagcagacccgtatgcccactgtgcaagaaaccatttaaaaaagaaaatatccgcccagtgtggcagttagcctctttagtcgagaatatcgaaagattaaaggtagataaggggcgtcagcccggtgaggtgacgcgggagcagcaagacgcaaaactttgtgagcggcaccgcgagaagctgcactactactgcgaggacgacggtaagcttttatgtgtcatgtgcagggagagtagggaacatagaccccataccgccgttcttatggaaaaagccgctcagccacaccgagagaaaatcctcaaccatctgtctactctgcggagggatcgggataaaattcagggcttccaggccaagggagaagccgatatcctggcggcactgaagaaactgcaagaccagcgtcagtatattgtcgcagagttcgagcagggacaccagtttcttcgggagcgcgaggaacatctcctggagcaactcgccaagctggagcaagagcttacagagggtcgtgaaaagtttaaaagccgtggggtgggcgagctggcgcgtctcgcattagtgatcagcgaactggaaggtaaagcccagcagccggctgccgaactgatgcaggatactagggattttttgaacagatatccgagaaagaagttctgggtgggaaagcccattgcaagagtggttaagaagaagacaggggagttttctgataagttgttaagcctgcagcggggtctgagagaattccaaggcaagcttctgagagaccttgagtacaagaccgtgagcgtgactctggatccacaaagcgcttctgggtacctccaactatctgaggattggaaatgtgtcacttataccagcctgtataagtcagcatatctgcatccacaacagttcgattgtgagccgggtgtactcgggtctaaagggttcacctggggaaaggtttattgggaggtggaggttgaacgcgaaggttggtcagaggacgaggaggagggagatgaggaagaggaaggggaagaggaggaggaggaagaagaggccggttacggtgatggctacgatgattgggagaccgacgaggacgaggagtcactgggtgacgaggaggaggaggaagaggaagaggaagaggaggtcctagaaagctgcatggtaggtgtcgccagagactccgtgaagagaaagggagacctctctttgaggccggaggatggagtgtgggctcttcgtctgtcatcgtctggtatttgggctaacacctccccggaagctgagctttttccagcactgaggcccagacgggtggggatagccctggactatgaggggggaactgtcactttcacgaacgcagagtctcaggaattgatctacacttttaccgccaccttcacccggcgtttggtgcctttcctgtggcttaaatggccgggaacccggctacttttaagaccttag

SEQ ID NO: 269416 - DNA, 1620 bp, Artificial Sequence
  derived and/or modified sequence
atggccacctccgccccactgcgctccctcgaggaggaagtgacctgttcaatctgcttggattaccttagggaccccgttacaatagattgcgggcacgttttttgccggagctgcaccactgatgtgcgcccaattagcgggagtagacccgtgtgcccactgtgtaagaagccctttaaaaaggagaacatccgacctgtttggcagctagcaagtctggtggagaatatcgaaaggttaaaagtggacaaaggacgccaacctggggaagtgacacgtgaacaacaagatgctaagctgtgcgaaagacacagggagaaactacactactattgcgaagatgatgggaaactgttgtgcgtgatgtgccgcgagtccagagaacatagaccacacacggctgtcttaatggagaaagccgctcagccgcatcgcgaaaagatcctcaaccatttaagcacccttcggagggaccgggataaaatccagggcttccaagccaagggcgaggcggatatcctcgcggcactaaagaagctccaggatcagcggcagtatatcgtagctgagttcgagcaagggcaccagttcctgcgagagcgggaggagcatttgctggaacagctcgccaagctggagcaggagctcacagagggtcgggagaagttcaaatcccgcggtgtgggagaactcgctcgcctggctttggtcatctctgaactggagggcaaggcccagcagcccgctgctgaacttatgcaggacactcgcgactttctcaatagataccccaggaagaaattctgggtgggaaaacctattgcacgagtcgtaaaaaagaagacgggagagttttccgataagcttctcagcctccagcggggattgcgagaatttcaggggaagttgctgagagatctggaatataaaactgtgtctgtcactctggatccgcagtcagcttcaggctacttgcagctgtccgaggactggaagtgcgttacttatacatcgctctataaaagtgcctacctgcacccacagcagttcgattgcgaacctggggtgctgggctccaagggatttacatgggggaaggtgtattgggaagttgaggtggagcgggaagggtggtccgaggatgaggaggagggtgatgaggaggaggaaggagaggaggaggaagaagaggaagaagcagggtatggtgacggttacgatgattgggagactgatgaagacgaagagtcactcggggacgaggaggaggaggaggaggaggaagaagaggaggtactggagtcctgcatggtgggtgtggcacgcgattcagtcaagcggaagggggatttgtcactgcgcccagaggatggcgtgtgggccttgcgactatctagttccggaatctgggccaacacctcccccgaggcagaactgttcccagcgctcaggcctagaagggtggggattgctcttgactatgagggcggtaccgttacgttcacgaatgccgaatcgcaggaattgatctacaccttcactgctacgtttactaggcgactcgtcccttttctgtggctcaaatggccaggcactaggctgctcctgaggccgtag

SEQ ID NO: 269417 - DNA, 1620 bp, Artificial Sequence
  derived and/or modified sequence
atggccacaagcgcccctctcagaagtcttgaagaagaggtcacctgcagcatctgtctcgactacctgcgagatccggtcacaatcgattgtgggcacgtgttttgtagatcctgcacgacagatgtgcgtccaatttcagggagtaggcccgtatgccctctgtgtaagaagcccttcaaaaaggagaatattagacccgtgtggcagctggcctctctcgtggaaaatatcgagaggttaaaagttgacaagggtcggcagcccggtgaagtcacgagagagcagcaggacgcgaaactttgtgaaagacaccgcgagaagctccactattattgtgaggacgacgggaagctgctgtgtgttatgtgccgggaatctcgcgaacatagaccacataccgccgtcttaatggagaaggcagcccaaccccatagggaaaagatactgaatcacctgagtacactccggagagaccgggataagatccaggggttccaggccaaaggggaggccgatattctggctgccctgaaaaagctccaggaccaaagacagtacattgtagctgagttcgaacaaggccatcagtttttgagggagagagaagagcacctgctggagcaacttgccaagctcgaacaagaacttactgagggacgcgaaaaattcaagagtagaggagtgggggagttggctaggctggcacttgttatttctgaactggaaggcaaggcccagcagccagcagctgagctgatgcaagacaccagggacttccttaataggtacccacggaagaagttctgggtggggaagccaattgcacgagtggtcaagaaaaaaaccggagagttcagcgacaaactgctgagcctgcaacggggactaagagagtttcaaggcaagctgctcagggatttggagtacaagactgtttcagtgacactcgatccccagtccgcttctggctacctgcagctgagtgaggactggaagtgcgtgacctacacttccttatacaagtctgcctacttacatccacagcagttcgactgtgagcctggggtcttagggagtaaaggatttacgtggggaaaagtctactgggaggtggaggtcgaaagggagggatggagcgaagacgaagaagagggagatgaagaagaggagggtgaggaagaggaggaggaagaagaagccggttacggcgatggatatgacgattgggaaaccgatgaggatgaggaatcactgggcgatgaggaggaagaggaagaggaggaagaagaggaggtgctggagtcttgtatggtcggagtagccagagattcagtgaaaaggaagggtgacttgagcctgaggcctgaagatggcgtgtgggcgttacgactgagctcaagtgggatttgggctaataccagtcccgaagcagagctctttcctgctcttaggccgagaagagtcggcatcgcgttggattacgagggcggtaccgtgacattcactaatgctgagagtcaggaattgatctacacgttcaccgcaacatttacaaggcgcctggtgcccttcttatggctcaagtggccaggtacacgcctgctgctgcgcccttag

SEQ ID NO: 269418 - DNA, 1620 bp, Artificial Sequence
  derived and/or modified sequence
atggccaccagcgcacctttaagatctttggaggaagaagtaacctgctccatttgtctcgactacctgcgggaccctgttactattgactgtgggcacgttttctgcagatcatgcactaccgatgtgaggccaattagtggctctagacccgtgtgtccactttgcaaaaaaccctttaaaaaagagaatattaggcctgtctggcagcttgcaagtttggtagaaaatatagaaaggctgaaggtggataaaggtcggcagccgggtgaggtgacgcgcgagcagcaggacgcaaagctgtgtgagcggcatcgcgaaaaactccattattattgtgaagacgacgggaagctactttgtgtgatgtgccgagagagcagagaacaccggcctcacaccgctgtcctgatggagaaagcggcacagcctcaccgcgagaagatcttgaatcacctgtcgactttaagacgggacagggataaaattcaaggattccaggctaaaggtgaagctgatatcctcgccgctcttaagaagctacaggatcagaggcagtatattgttgcagagtttgaacagggccaccagttcctaagagagcgtgaggagcacctcctggaacagttggcaaagctggaacaggagctcacagaaggccgagaaaagttcaagagccgcggagttggtgagctggccaggctggcgctcgttatttctgagctcgagggcaaagcccagcagcccgctgctgagctgatgcaagatacccgcgatttcctcaatcggtatcccaggaagaagttctgggttggcaagccgatcgcgagggtagtcaagaaaaagacaggggagttttcggataagctcctctctttacaacggggtctgcgggagtttcagggtaagctactgcgtgacctcgagtacaaaacggtcagcgtaactctggatcctcagtccgcaagtggatacttacagctgtccgaagattggaaatgcgtgacatacacgagcctatataagagtgcttatcttcatccacaacaatttgactgcgagcctggcgtcttaggctctaaaggcttcacctggggaaaggtctattgggaggtcgaagtagagagagaggggtggagcgaggacgaggaggagggagacgaggaggaggagggagaggaagaagaagaggaggaggaggccggttacggcgacggatacgacgactgggagacagatgaagatgaagagtctctgggagacgaggaggaagaggaggaagaagaggaggaagaggtgcttgaaagctgtatggtgggcgtggccagagattctgtcaagaggaaaggagatctgagcttaagacctgaagatggagtgtgggccctgaggctctcatcaagcgggatctgggccaataccagcccggaggctgagctgttccccgcattgaggcctaggagggtggggattgccttggactacgagggcggaactgtaacgttcactaacgccgaaagtcaagaactgatttacacatttaccgccacattcacaagacggttggtcccattcttgtggctcaagtggccgggtacgcggctgttgttgagaccttag

SEQ ID NO: 269419 - DNA, 1620 bp, Artificial Sequence
  derived and/or modified sequence
atggccacatcagctcctctacggtccctggaagaagaggtgacatgctctatttgtctagattaccttagggaccctgtcaccatcgattgtggccatgtgttttgccgtagttgcactactgatgttagaccaatctcgggctccagacctgtctgcccgctgtgtaaaaaacctttcaaaaaagagaatatacggccagtctggcagttggcttcccttgttgaaaatatcgagcgcctcaaggtcgataaaggccgacagcccggtgaggtgaccagggagcaacaggacgcaaaactttgcgagagacaccgcgagaagctgcattactattgcgaggacgacggtaagctgctgtgcgtaatgtgccgagagagtcgtgaacaccgcccacatactgctgtgttaatggaaaaagctgctcaacctcaccgtgagaaaatcctcaatcatctttctaccctgagacgcgatcgtgacaagattcaagggttccaagccaagggcgaagccgatatactggccgctctgaagaaattacaggatcagaggcagtacatcgtagcagagtttgagcagggtcaccagttcctcagagagcgcgaagagcatttgctggagcagctggctaagcttgaacaggaacttaccgaaggtcgcgagaagtttaagtcccggggagtgggggaactggcaagactggccctcgtgatctcagagctcgagggaaaggctcagcagcccgcagctgaactgatgcaggataccagggacttcctcaaccggtatcccagaaagaaattttgggtgggaaagcccatcgctagagtcgttaagaagaagactggtgaattctctgacaaattgctatccctgcagagaggtctgagggaatttcaaggcaagctgctcagggacctggaatacaagactgtgagcgtaactctagacccacagagtgcatccgggtacctgcaactgagtgaagattggaaatgcgtgacctacacatccctgtataaaagtgcgtacttacacccgcagcagtttgattgtgaacctggggttctggggtcaaaaggatttacctggggtaaggtgtactgggaagtcgaggttgagagggaagggtggagtgaggatgaagaagagggcgacgaagaggaagaaggcgaggaggaagaggaggaggaggaagctggctatggggacgggtatgatgactgggaaacagacgaggacgaggaatccctgggagacgaagaggaggaggaggaggaggaggaagaagaggtgctagaatcttgtatggtcggagtcgcgagagacagtgtgaaacggaagggcgatctttccctgagacctgaagatggcgtgtgggctcttaggttatcttccagcgggatttgggcaaacacatctccggaggctgagctgtttccagccctccgcccacgcagagtgggaattgctctagattacgagggcggtaccgtgaccttcacaaacgcagaaagccaagagctgatttataccttcactgccacattcacgaggcgcctggtcccattcctctggttgaagtggcccggtactcgactactcctccgaccatag

SEQ ID NO: 269420 - DNA, 3448 bp, Artificial Sequence
  derived and/or modified sequence
ggccgggattcgcggcccggagctcgggaccggagtcaggaatggagagaagggtaatggttttacctcttattgtggaaacctgttgagatcacagagaatatactgacggcataaaagggcagaaccatagcagggtgcggttgcttcattccagcctcgcagtcacctctgtgccctgctggttgtcttcccagcgctgctgtagttgccttccatggatctataggagagcaagtcctccaggagctggtggtgtctgtcgattgactgagtgctggagctggcagccctgtgcaggctgccacctttgcccctttactgtgcttgctcctgactctatgtcgcgtctccaaggagaagaagtcctcaccagtgaacggagacctctctgaactaaggataccatggccacgtcagccccactacggagcctggaagaggaggtgacctgctccatctgtcttgattacctgcgggaccctgtgaccattgactgtggccacgtcttctgccgcagctgcaccacagacgtccgccccatctcagggagccgccccgtctgcccactctgcaagaagccttttaagaaggagaacatccgacccgtgtggcaactggccagcctggtggagaacattgagcggctgaaggtggacaagggcaggcagccgggagaggtgacccgggagcagcaggatgcaaagttgtgcgagcgacaccgagagaagctgcactactactgtgaggacgacgggaagctgctgtgcgtgatgtgccgggagtcccgggagcacaggccccacacggccgtcctcatggagaaggccgcccagccccacagggaaaaaatcctgaaccacctgagtaccctaaggagggacagagacaaaattcagggcttccaggcaaagggagaagctgatatcctggccgcgctgaagaagctccaggaccagaggcagtacattgtggctgagtttgagcagggtcatcagttcctgagggagcgggaggaacacctgctggaacagctggcgaagctggagcaggagctcacggagggcagggagaagttcaagagccggggcgtcggggagcttgcccggctggccctggtcatctccgaactggagggcaaggcgcagcagccagctgcagagctcatgcaggacacgagagacttcctaaacaggtatccacggaagaagttctgggttgggaaacccattgctcgagtggttaaaaaaaagaccggagaattctcagataaactcctctctctgcaacgaggcctgagggaattccaggggaagctgctgagagacttggaatataagacagtgagcgtcaccctggacccacagtcggccagtgggtacctgcagctgtcagaggactggaagtgcgtgacctacaccagcctgtacaagagtgcctacctgcacccccagcagtttgactgtgagcctggggtgctgggcagcaagggcttcacctggggcaaggtctactgggaagtggaagtggagagggagggctggtctgaggatgaagaagagggggatgaggaggaagagggagaagaggaggaggaggaagaggaggccggctatggggatggatatgacgactgggaaacggacgaagatgaggaatcgttgggcgatgaagaggaagaagaggaggaggaagaggaggaagttctggaaagctgcatggtgggggtggctagagactctgtgaagaggaagggagacctctccctgcggccagaggatggcgtgtgggcgctgcgcctctcctcctccggcatctgggccaacaccagccccgaggctgagcttttcccagcactgcggccccggagagtgggcatcgccctggattatgaagggggcaccgtgactttcaccaacgcagagtcacaggaactcatctacaccttcactgccaccttcacccggcgcctggtccccttcctgtggctcaagtggccaggaacacgcctcctgctaagaccctgagccctgacatctgcccccagccccaaccctcagatgcttcacttctttggaattccaggactctcaatggggggacgggatgcctggcctaagcacctggagcaggggaccccatatccactggtagccacctccccattgctgtggccccctgaaatctcactcagtgctgttgctccatctactgccctaatggggctcttttcccacctcctgctggtttcccgagggaacttctgaccctggagtccatgagggctcctttcctttttgaccacgaccttggccccagctctgcactctctggaataagggcccgatgcagcattttcttgcccagtgtggcaagacctcagaaaaaccagtcaattacgcctaagatcattttgctgtccttaaaccccccaggttccttcttgcacaaatccactctgctgcccaccttccctggcattttaaacagacctaccccaccccaactcagagttaagcatacatggcaatgctgaaaataaacaaaatccactgaggcttcccaggccatttaaagcctggagtaccagcgcatatcatctcatggggtccagagtggagtccaggcttctctgaaaccagggctgagcatatttccatagccaaggaggtgggactccctggagctatctgtggtcttagggaaggatccagacatacacggctttggggtacaagctgtgatcactgatcaataaattatctctagattggtccttgtgaggggagttttaagaatccagaacatcttgctcttgatcagcacatccaaaaacaccaagacaaacatccagtggagcagaacctctcctgcctcgggagttctgaccaggttccccagcagggtgttaagcctctgtctctggccctaccagcatccaggttccactttcctaggagagagtggagatgggaagacagggaaaggaaggcagcaggaggccacaagcccaccaggtcttcatgtcaagagagggagtaacatgtcttctcattgcccacggacccaacctctgtccaggtgcccctcatcatcacagtttaacacaagctcccctgctccagccaaattgatctcccagtcttgtccttacccattccaagtgctctgccagcccctgttcatccaagttttaagtcctccaccctgttctaagagactgttccaacggctctgggcctcagtggtcacttgaccaccattgtctcagagctgcccactttgtgtgtgtcacatgctgcctgagtcacacgtacatcttatttctgcctctagttttgtaagctcctggagggcggataacatcttatactactcttgtattctcatggcacctagtgcagtgctgggcacagagtaggtgctcaataaagacttgttgaatgaa

SEQ ID NO: 269421 - DNA, 3250 bp, Artificial Sequence
  derived and/or modified sequence
gagtcaggaatggagagaagggtaatggttttacctcttattgtggaaacctgttgagatcacagagaatatactgacggcataaaagggcagaaccatagcagggtgcgcgctgctgtagttgccttccatggatctataggagagcaagtcctccaggagaagaagtcctcaccagtgaacggagacctctctgaactaaggataccatggccacgtcagccccactacggagcctggaagaggaggtgacctgctccatctgtcttgattacctgcgggaccctgtgaccattgactgtggccacgtcttctgccgcagctgcaccacagacgtccgccccatctcagggagccgccccgtctgcccactctgcaagaagccttttaagaaggagaacatccgacccgtgtggcaactggccagcctggtggagaacattgagcggctgaaggtggacaagggcaggcagccgggagaggtgacccgggagcagcaggatgcaaagttgtgcgagcgacaccgagagaagctgcactactactgtgaggacgacgggaagctgctgtgcgtgatgtgccgggagtcccgggagcacaggccccacacggccgtcctcatggagaaggccgcccagccccacagggaaaaaatcctgaaccacctgagtaccctaaggagggacagagacaaaattcagggcttccaggcaaagggagaagctgatatcctggccgcgctgaagaagctccaggaccagaggcagtacattgtggctgagtttgagcagggtcatcagttcctgagggagcgggaggaacacctgctggaacagctggcgaagctggagcaggagctcacggagggcagggagaagttcaagagccggggcgtcggggagcttgcccggctggccctggtcatctccgaactggagggcaaggcgcagcagccagctgcagagctcatgcaggacacgagagacttcctaaacaggtatccacggaagaagttctgggttgggaaacccattgctcgagtggttaaaaaaaagaccggagaattctcagataaactcctctctctgcaacgaggcctgagggaattccaggggaagctgctgagagacttggaatataagacagtgagcgtcaccctggacccacagtcggccagtgggtacctgcagctgtcagaggactggaagtgcgtgacctacaccagcctgtacaagagtgcctacctgcacccccagcagtttgactgtgagcctggggtgctaggcagcaagggcttcacctggggcaaggtctactgggaagtggaagtggagagggagggctggtctgaggatgaagaagagggggatgaggaggaagagggagaagaggaggaggaggaagaggaggccggctatggggatggatatgacgactgggaaacggacgaagatgaggaatcgttgggcgatgaagaggaagaagaggaggaggaagaggaggaagttctggaaagctgcatggtgggggtggctagagactctgtgaagaggaagggagacctctccctgcggccagaggatggcgtgtgggcgctgcgcctctcctcctccggcatctgggccaacaccagccccgaggctgagcttttcccagcactgcggccccggagagtgggcatcgccctggattatgaagggggcaccgtgactttcaccaacgcagagtcacaggaactcatctacaccttcactgccaccttcacccggcgcctggtccccttcctgtggctcaagtggccaggaacacgcctcctgctaagaccctgagccctgacatctgcccccagccccaaccctcagatgcttcacttctttggaattccaggactctcaatggggggacgggatgcctggcctaagcacctggagcaggggaccccatatccactggtagccacctccccattgctgtggccccctgaaatctcactcagtgctgttgctccatctactgccctaatggggctcttttcccacctcctgctggtttcccgagggaacttctgaccctggagtccatgagggctcctttcctttttgaccacgaccttggccccagctctgcactctctggaataagggcccgatgcagcattttcttgcccagtgtggcaagacctcagaaaaaccagtcaattacgcctaagatcattttgctgtccttaaaccccccaggttccttcttgcacaaatccactctgctgcccaccttccctggcattttaaacagacctaccccaccccaactcagagttaagcatacatggcaatgctgaaaataaacaaaatccactgaggcttcccaggccatttaaagcctggagtaccagcgcatatcatctcatggggtccagagtggagtccaggcttctctgaaaccagggctgagcatatttccatagccaaggaggtgggactccctggagctatctgtggtcttagggaaggatccagacatacacggctttggggtacaagctgtgatcactgatcaataaattatctctagattggtccttgtgaggggagttttaagaatccagaacatcttgctcttgatcagcacatccaaaaacaccaagacaaacatccagtggagcagaacctctcctgcctcgggagttctgaccgggttccccagcagggtgttaagcctctgtctctggccctaccagcatccaggttccactttcctaggagagagtggagatgggaagacagggaaaggaaggcagcaggaggccacaagcccaccaggtcttcatgtcaagagagggagtaacatgtcttctcattgcccacggacccaacctctgtccaggtgcccctcatcatcacagtttaacacaagctcccctgctccagccaaattgatctcccagtcttgtccttacccattccaagtgctctgccagcccctgttcatccaagttttaagtcctccaccctgttctaagagactgttccaacggctctgggcctcagtggtcacttgaccaccattgtctcagagctgcccactttgtgtgtgtcacatgctgcctgagtcacatgtacatcttatttctgcctctagttttgtaagctcctggagggcggataacatcttatactactcttgtattctcatggcacctagtgcagtgctgggcacagagtaggtgctcaataaagacttgttgaatgaa

SEQ ID NO: 269422 - DNA, 3318 bp, Artificial Sequence
  derived and/or modified sequence
gggagattacggggcggggacgagctgtcgcgctggttgctcgtgcaggagcgggacccggaacagaccgccgtgagagaggaggggcgccggccgggattcgcggcccggagctcgggaccggttgcttcattccagcctcgcagtcacctctgtgccctgctggttgtcttcccagcgctgctgtagttgccttccatggatctataggagagcaagtcctccaggagaagaagtcctcaccagtgaacggagacctctctgaactaagaataccatggccacgtcagccccactacggagcctggaagaggaggtgacctgctccatctgtcttgattacctgcgggaccctgtgaccattgactgtggccacgtcttctgccgcagctgcaccacagacgtccgccccatctcagggagccgccccgtctgcccactctgcaagaagccttttaagaaggagaacatccgacccgtgtggcaactggccagcctggtggagaacattgagcggctgaaggtggacaagggcaggcagccgggagaggtgacccgggagcagcaggatgcaaagttgtgcgagcgacaccgagagaagctgcactactactgtgaggacgacgggaagctgctgtgcgtgatgtgccgggagtcccgggagcacaggccccacacggccgtcctcatggagaaggccgcccagccccacagggaaaaaatcctgaaccacctgagtaccctaaggagagacagagacaaaattcagggcttccaggcaaagggagaagctgatatcctggccgcgctgaagaagctccaggaccagaggcagtacattgtggctgagtttgagcagggtcatcagttcctgagggagcgggaggaacacctgctggaacagctggcgaagctggagcaggagctcacggagggcagggagaagttcaagagccggggcgtcggggagcttgcccggctggccctggtcatctccgaactggagggcaaggcgcagcagccagctgcagagctcatgcaggacacgagagacttcctaaacaggtatccacggaagaagttctgggttgggaaacccattgctcgagtggttaaaaaaaagaccggagaattctcagataaactcctctctctgcaacgaggcctgagggaattccaggggaagctgctgagagacttggaatataagacagtgagcgtcaccctggacccacagtcggccagtgggtacctgcagctgtcagaggactggaagtgcgtgacctacaccagcctgtacaagagtgcctacctgcacccccagcagtttgactgtgagcctggggtgctgggcagcaagggcttcacctggggcaaggtctactgggaagtggaagtggagagggagggctggtctgaggatgaagaagagggggatgaggaggaagagggagaagaggaggaggaggaagaggaggccggctatggggatggatatgacgactgggaaacggacgaagatgaggaatcgttgggcgatgaagaggaagaagaggaggaggaagaggaggaagttctggaaagctgcatggtgggggtggctagagactctgtgaagaggaagggagacctctccctgcggccagaggatggcgtgtgggcgctgcgcctctcctcctccggcatctgggccaacaccagccccgaggctgagcttttcccagcactgcggccccggagagtgggcatcgccctggattatgaagggggcaccgtgactttcaccaacgcagagtcacaggaactcatctacaccttcactgccaccttcacccggcgcctggtccccttcctgtggctcaagtggccaggaacacgcctcctgctaagaccctgagccctgacatctgcccccagccccaaccctcagatgcttcacttctttggaattccaggactctcaatggggggacgggatgcctggcctaagcacctggagcaggggaccccatatccactggtagccacctccccattgctgtggccccctgaaatctcactcagtgctgttgctccatctactgccctaatggggctcttttcccacctcctgctggtttcccgagggaacttctgaccctggagtccatgagggctcctttcctttttgaccacgaccttggccctagctctgcactctctggaataagggcccgatgcagcattttcttgcccagtgtggcaagacctcagaaaaaccagtcaattacgcctaagatcattttgctgtccttaaaccccccaggttccttcttgcacaaatccactctgctgcccaccttccctggcattttaaacagacctaccccaccccaactcagagttaagcatacatggcaatgctgaaaataaacaaaatccactgaggcttcccaggccatttaaagcctggagtaccagcgcatatcatctcatggggtccagagtggagtccaggcttctctgaaaccagggctgagcatatttccatagccaaggaggtgggactccctggagctatctgtggtcttagggaaggatccagacatacacggctttggggtacaagctgtgatcactgatcaataaattatctctagattggtccttgtgaggggagttttaagaatccagaacatcttgctcttgatcagcacatccaaaaacaccaagacaaacatccagtggagcagaacctctcctgcctcgggagttctgaccgggttccccagcagggtgttaagcctctgtctctggccctaccagcatccaggttccactttcctaggagagagtggagatgggaagacagggaaaggaaggcagcaggaggccacaagcccaccaggtcttcatgtcaagagagggagtaacatgtcttctcattgcccacggacccaacctctgtccaggtgcccctcatcatcacagtttaacacaagctcccctgctccagccaaattgatctcccagtcttgtccttacccattccaagtgctctgccagcccctgttcatccaagttttaagtcctccaccctgttataagagactgttccaacggctctgggcctcagtggtcacttgaccaccattgtctcagagctgcccactttgtgtgtgtcacatgctgcctgagtcacatgtacatcttatttctgcctctagttttgtaagctcctggagggcggataacatcttatactactcttgtattctcatggcacctagtgcagtgctgggcacagagtaggtgctcaataaagacttgttgaatgaa

SEQ ID NO: 269423 - DNA, 3250 bp, Artificial Sequence
  derived and/or modified sequence
gagtcaggaatggagagaagggtaatggtgttacctcttattgtggaaacctgttgagatcacagagaatatactgacggcataaaagggcagaaccatagcagggtgcgcgctgctgtagttgccttccatggatctataggagagcaagtcctccaggagaagaagtcctcaccagtgaacggagacctctctgaactaagaataccatggccacgtcagccccactacggagcctggaagaggaggtgacctgctccatctgtcttgattacctgcgggaccctgtgaccattgactgtggccacgtcttctgccgcagctgcaccacagacgtccgccccatctcagggagccgccccgtctgcccactctgcaagaagccttttaagaaggagaacatccgacccgtgtggcaactggccagcctggtggagaacattgagcggctgaaggtggacaagggcaggcagccgggagaggtgacccgggagcagcaggatgcaaagttgtgcgagcgacaccgagagaagctgcactactactgtgaggacgacgggaagctgctgtgcgtgatgtgccgggagtcccgggagcacaggccccacacggccgtcctcatggagaaggccgcccagccccacagggaaaaaatcctgaaccacctgagtaccctaaggagagacagagacaaaattcagggcttccaggcaaagggagaagctgatatcctggccgcgctgaagaagctccaggaccagaggcagtacattgtggctgagtttgagcagggtcatcagttcctgagggagcgggaggaacacctgctggaacagctggcgaagctggagcaggagctcacggagggcagggagaagttcaagagccggggcgtcggggagcttgcccggctggccctggtcatctccgaactggagggcaaggcgcagcagccagctgcagagctcatgcaggacacgagagacttcctaaacaggtatccacggaagaagttctgggttgggaaacccattgctcgagtggttaaaaaaaagaccggagaattctcagataaactcctctctctgcaacgaggcctgagggaattccaggggaagctgctgagagacttggaatataagacagtgagcgtcaccctggacccacagtcggccagtgggtacctgcagctgtcagaggactggaagtgcgtgacctacaccagcctgtacaagagtgcctacctgcacccccagcagtttgactgtgagcctggggtgctgggcagcaagggcttcacctggggcaaggtctactgggaagtggaagtggagagggagggctggtctgaggatgaagaagagggggatgaggaggaagagggagaagaggaggaggaggaagaggaggccggctatggggatggatatgacgactgggaaacggacgaagatgaggaatcgttgggcgatgaagaggaagaagaggaggaggaagaggaggaagttctggaaagctgcatggtgggggtggctagagactctgtgaagaggaagggagacctctccctgcggccagaggatggcgtgtgggcgctgcgcctctcctcctccggcatctgggccaacaccagccccgaggctgagcttttcccagcactgcggccccggagagtgggcatcgccctggattatgaagggggcaccgtgactttcaccaacgcagagtcacaggaactcatctacaccttcactgccaccttcacccggcgcctggtccccttcctgtggctcaagtggccaggaacacgcctcctgctaagaccctgagccctgacatctgcccccagccccaaccctcagatgcttcacttctttggaattccaggactctcaatggggggacgggatgcctggcctaagcacctggagcaggggaccccatatccactggtagccacctccccattgctgtggccccctgaaatctcactcagtgctgttgctccatctactgccctaatggggctcttttcccacctcctgctggtttcccgagggaacttctgaccctggagtccatgagggctcctttcctttttgaccacgaccttggccctagctctgcactctctggaataagggcccgatgcagcattttcttgcccagtgtggcaagacctcagaaaaaccagtcaattacgcctaagatcattttgctgtccttaaaccccccaggttccttcttgcacaaatccactctgctgcccaccttccctggcattttaaacagacctaccccaccccaactcagagttaagcatacatggcaatgctgaaaataaacaaaatccactgaggcttcccaggccatttaaagcctggagtaccagcgcatatcatctcatggggtccagagtggagtccaggcttctctgaaaccagggctgagcatatttccatagccaaggaggtgggactccctggagctatctgtggtcttagggaaggatccagacatacacggctttggggtacaagctgtgatcactgatcaataaattatctctagattggtccttgtgaggggagttttaagaatccagaacatcttgctcttgatcagcacatccaaaaacaccaagacaaacatccagtggagcagaacctctcctgcctcgggagttctgaccgggttccccagcagggtgttaagcctctgtctctggccctaccagcatccaggttccactttcctaggagagagtggagatgggaagacagggaaaggaaggcagcaggaggccacaagcccaccaggtcttcatgtcaagagagggagtaacatgtcttctcattgcccacggacccaacctctgtccaggtgcccctcatcatcacagtttaacacaagctcccctgctccagccaaattgatctcccagtcttgtccttacccattccaagtgctctgccagcccctgttcatccaagttttaagtcctccaccctgttataagagactgttccaacggctctgggcctcagtggtcacttgaccaccattgtctcagagctgcccactttgtgtgtgtcacatgctgcctgagtcacatgtacatcttatttctgcctctagttttgtaagctcctggagggcggataacatcttatactactcttgtattctcatggcacctagtgcagtgctgggcacagagtaggtgctcaataaagacttgttgaatgaa

SEQ ID NO: 269424 - DNA, 3478 bp, Artificial Sequence
  derived and/or modified sequence
aacagaccgccgtgagagaggaggggcgccggccgggattcgcggcccggagctcgggaccggagtcaggaatggagagaagggtaatggttttacctcttattgtggaaacctgttgagatcacagagaatatactgacggcataaaagggcagaaccatagcagggtgcggttgcttcattccagcctcgcagtcacctctgtgccctgctggttgtcttcccagcgctgctgtagttgccttccatggatctataggagagcaagtcctccaggagctggtggtgtctgtcgattgactgagtgctggagctggcagccctgtgcaggctgccacctttgcccctttactgtgcttgctcctgactctatgtcgcgtctccaaggagaagaagtcctcaccagtgaacggagacctctctgaactaaggataccatggccacgtcagccccactacggagcctggaagaggaggtgacctgctccatctgtcttgattacctgcgggaccctgtgaccattgactgtggccacgtcttctgccgcagctgcaccacagacgtccgccccatctcagggagccgccccgtctgcccactctgcaagaagccttttaagaaggagaacatccgacccgtgtggcaactggccagcctggtggagaacattgagcggctgaaggtggacaagggcaggcagccgggagaggtgacccgggagcagcaggatgcaaagttgtgcgagcgacaccgagagaagctgcactactactgtgaggacgacgggaagctgctgtgcgtgatgtgccgggagtcccgggagcacaggccccacacggccgtcctcatggagaaggccgcccagccccacagggaaaaaatcctgaaccacctgagtaccctaaggagggacagagacaaaattcagggcttccaggcaaagggagaagctgatatcctggccgcgctgaagaagctccaggaccagaggcagtacattgtggctgagtttgagcagggtcatcagttcctgagggagcgggaggaacacctgctggaacagctggcgaagctggagcaggagctcacggagggcagggagaagttcaagagccggggcgtcggggagcttgcccggctggccctggtcatctccgaactggagggcaaggcgcagcagccagctgcagagctcatgcaggacacgagagacttcctaaacaggtatccacggaagaagttctgggttgggaaacccattgctcgagtggttaaaaaaaagaccggagaattctcagataaactcctctctctgcaacgaggcctgagggaattccaggggaagctgctgagagacttggaatataagacagtgagcgtcaccctggacccacagtcggccagtgggtacctgcagctgtcagaggactggaagtgcgtgacctacaccagcctgtacaagagtgcctacctgcacccccagcagtttgactgtgagcctggggtgctgggcagcaagggcttcacctggggcaaggtctactgggaagtggaagtggagagggagggctggtctgaggatgaagaagagggggatgaggaggaagagggagaagaggaggaggaggaagaggaggccggctatggggatggatatgacgactgggaaacggacgaagatgaggaatcgttgggcgatgaagaggaagaagaggaggaggaagaggaggaagttctggaaagctgcatggtgggggtggctagagactctgtgaagaggaagggagacctctccctgcggccagaggatggcgtgtgggcgctgcgcctctcctcctccggcatctgggccaacaccagccccgaggctgagcttttcccagcactgcggccccggagagtgggcatcgccctggattatgaagggggcaccgtgactttcaccaacgcagagtcacaggaactcatctacaccttcactgccaccttcacccggcgcctggtccccttcctgtggctcaagtggccaggaacacgcctcctgctaagaccctgagccctgacatctgcccccagccccaaccctcagatgcttcacttctttggaattccaggactctcaatggggggacgggatgcctggcctaagcacctggagcaggggaccccatatccactggtagccacctccccattgctgtggccccctgaaatctcactcagtgctgttgctccatctactgccctaatggggctcttttcccacctcctgctggtttcccgagggaacttctgaccctggagtccatgagggctcctttcctttttgaccacgaccttggccccagctctgcactctctggaataagggcccgatgcagcattttcttgcccagtgtggcaagacctcagaaaaaccagtcaattacgcctaagatcattttgctgtccttaaaccccccaggttccttcttgcacaaatccactctgctgcccaccttccctggcattttaaacagacctaccccaccccaactcagagttaagcatacatggcaatgctgaaaataaacaaaatccactgaggcttcccaggccatttaaagcctggagtaccagcgcatatcatctcatggggtccagagtggagtccaggcttctctgaaaccagggctgagcatatttccatagccaaggaggtgggactccctggagctatctgtggtcttagggaaggatccagacatacacggctttggggtacaagctgtgatcactgatcaataaattatctctagattggtccttgtgaggggagttttaagaatccagaacatcttgctcttgatcagcacatccaaaaacaccaagacaaacatccagtggagcagaacctctcctgcctcgggagttctgaccaggttccccagcagggtgttaagcctctgtctctggccctaccagcatccaggttccactttcctaggagagagtggagatgggaagacagggaaaggaaggcagcaggaggccacaagcccaccaggtcttcatgtcaagagagggagtaacatgtcttctcattgcccacggacccaacctctgtccaggtgcccctcatcatcacagtttaacacaagctcccctgctccagccaaattgatctcccagtcttgtccttacccattccaagtgctctgccagcccctgttcatccaagttttaagtcctccaccctgttctaagagactgttccaacggctctgggcctcagtggtcacttgaccaccattgtctcagagctgcccactttgtgtgtgtcacatgctgcctgagtcacacgtacatcttatttctgcctctagttttgtaagctcctggagggcggataacatcttatactactcttgtattctcatggcacctagtgcagtgctgggcacagagtaggtgctcaataaagacttgttgaatgaa

SEQ ID NO: 269425 - DNA, 1124 bp, Artificial Sequence
  derived and/or modified sequence
acggggcggggacgagctgtcgcgctggttgctcgtgcaggagcgggacccggaacagaccgccgtgagagaggaggggcgccggccgggattcgcggcccggagctcgggaccggagtcaggaatggagagaagggtaatggtgttacctcttattgtggaaacctgttgagatcacagagaatatactgacggcataaaagggcagaaccatagcagggtgcggttgcttcattccagcctcgcagtcacctctgtgccctgctggttgtcttcccagcgctgctgtagttgccttccatggatctataggagagcaagtcctccaggagaagaagtcctcaccagtgaacggagacctctctgaactaagaataccatggccacgtcagccccactacggagcctggaagaggaggtgacctgctccatctgtcttgattacctgcgggaccctgtgaccattgactgtggccacgtcttctgccgcagctgcaccacagacgtccgccccatctcagggagccgccccgtctgcccactctgcaagaagccttttaagaaggagaacatccgacccgtgtggcaactggccagcctggtggagaacattgagcggctgaaggtggacaagggcaggcagccgggagaggtgacccgggagcagcaggatgcaaagttgtgcgagcgacaccgagagaagctgcactactactgtgaggacgacgggaagctgctgtgcgtgatgtgccgggagtcccgggagcacaggccccacacggccgtcctcatggagaaggccgcccagccccacagggaaaaaatcctgaaccacctgagtaccctaaggagagacagagacaaaattcagggcttccaggcaaagggagaagctgatatcctggccgcgctgaagaagctccaggaccagaggcagtacattgtggctgagtttgagcagggtcatcagttcctgagggagcgggaggaacacctgctggaacagctggcgaagctggagcaggagctcacggagggcagggagaagttcaagagccggggcgtcggggagcttgcccggctggccctggtcatctccgaactggagggcaaggcgcagcagc

SEQ ID NO: 269426 - DNA, 1124 bp, Artificial Sequence
  derived and/or modified sequence
acggggcggggacgagctgtcgcgctggttgctcgtgcaggagcgggacccggaacagaccgccgtgagagaggaggggcgccggccgggattcgcggcccggagctcgggaccggagtcaggaatggagagaagggtaatggtgttacctcttattgtggaaacctgttgagatcacagagaatatactgacggcataaaagggcagaaccatagcagggtgcggttgcttcattccagcctcgcagtcacctctgtgccctgctggttgtcttcccagcgctgctgtagttgccttccatggatctataggagagcaagtcctccaggagaagaagtcctcaccagtgaacggagacctctctgaactaaggataccatggccacgtcagccccactacggagcctggaagaggaggtgacctgctccatctgtcttgattacctgcgggaccctgtgaccattgactgtggccacgtcttctgccgcagctgcaccacagacgtccgccccatctcagggagccgccccgtctgcccactctgcaagaagccttttaagaaggagaacatccgacccgtgtggcaactggccagcctggtggagaacattgagcggctgaaggtggacaagggcaggcagccgggagaggtgacccgggagcagcaggatgcaaagttgtgcgagcgacaccgagagaagctgcactactactgtgaggacgacgggaagctgctgtgcgtgatgtgccgggagtcccgggagcacaggccccacacggccgtcctcatggagaaggccgcccagccccacagggaaaaaatcctgaaccacctgagtaccctaaggagagacagagacaaaattcagggcttccaggcaaagggagaagctgatatcctggccgcgctgaagaagctccaggaccagaggcagtacattgtggctgagtttgagcagggtcatcagttcctgagggagcgggaggaacacctgctggaacagctggcgaagctggagcaggagctcacggagggcagggagaagttcaagagccggggcgtcggggagcttgcccggctggccctggtcatctccgaactggagggcaaggcgcagcagc

SEQ ID NO: 269427 - DNA, 1041 bp, Artificial Sequence
  derived and/or modified sequence
ggccgggattcgcggcccggagctcgggaccggagtcaggaatggagagaagggtaatggttttacctcttattgtggaaacctgttgagatcacagagaatatactgacggcataaaagggcagaaccatagcagggtgcggttgcttcattccagcctcgcagtcacctctgtgccctgctggttgtcttcccagcgctgctgtagttgccttccatggatctataggagagcaagtcctccaggagaagaagtcctcaccagtgaacggagacctctctgaactaaggataccatggccacgtcagccccactacggagcctggaagaggaggtgacctgctccatctgtcttgattacctgcgggaccctgtgaccattgactgtggccacgtcttctgccgcagctgcaccacagacgtccgccccatctcagggagccgccccgtctgcccactctgcaagaagccttttaagaaggagaacatccgacccgtgtggcaactggccagcctggtggagaacattgagcggctgaaggtggacaagggcaggcagccgggagaggtgacccgggagcagcaggatgcaaagttgtgcgagcgacaccgagagaagctgcactactactgtgaggacgacgggaagctgctgtgcgtgatgtgccgggagtcccgggagcacaggccccacacggccgtcctcatggagaaggccgcccagccccacagggaaaaaatcctgaaccacctgagtaccctaaggagggacagagacaaaattcagggcttccaggcaaagggagaagctgatatcctggccgcgctgaagaagctccaggaccagaggcagtacattgtggctgagtttgagcagggtcatcagttcctgagggagcgggaggaacacctgctggaacagctggcgaagctggagcaggagctcacggagggcagggagaagttcaagagccggggcgtcggggagcttgcccggctggccctggtcatctccgaactggagggcaaggcgcagcagc

SEQ ID NO: 269428 - DNA, 3250 bp, Artificial Sequence
  derived and/or modified sequence
gagtcaggaatggagagaagggtaatggtgttacctcttattgtggaaacctgttgagatcacagagaatatactgacggcataaaagggcagaaccatagcagggtgcgcgctgctgtagttgccttccatggatctataggagagcaagtcctccaggagaagaagtcctcaccagtgaacggagacctctctgaactaaggataccatggccacgtcagccccactacggagcctggaagaggaggtgacctgctccatctgtcttgattacctgcgggaccctgtgaccattgactgtggccacgtcttctgccgcagctgcaccacagacgtccgccccatctcagggagccgccccgtctgcccactctgcaagaagccttttaagaaggagaacatccgacccgtgtggcaactggccagcctggtggagaacattgagcggctgaaggtggacaagggcaggcagccgggagaggtgacccgggagcagcaggatgcaaagttgtgcgagcgacaccgagagaagctgcactactactgtgaggacgacgggaagctgctgtgcgtgatgtgccgggagtcccgggagcacaggccccacacggccgtcctcatggagaaggccgcccagccccacagggaaaaaatcctgaaccacctgagtaccctaaggagagacagagacaaaattcagggcttccaggcaaagggagaagctgatatcctggccgcgctgaagaagctccaggaccagaggcagtacattgtggctgagtttgagcagggtcatcagttcctgagggagcgggaggaacacctgctggaacagctggcgaagctggagcaggagctcacggagggcagggagaagttcaagagccggggcgtcggggagcttgcccggctggccctggtcatctccgaactggagggcaaggcgcagcagccagctgcagagctcatgcaggacacgagagacttcctaaacaggtatccacggaagaagttctgggttgggaaacccattgctcgagtggttaaaaaaaagaccggagaattctcagataaactcctctctctgcaacgaggcctgagggaattccaggggaagctgctgagagacttggaatataagacagtgagcgtcaccctggacccacagtcggccagtgggtacctgcagctgtcagaggactggaagtgcgtgacctacaccagcctgtacaagagtgcctacctgcacccccagcagtttgactgtgagcctggggtgctgggcagcaagggcttcacctggggcaaggtctactgggaagtggaagtggagagggagggctggtctgaggatgaagaagagggggatgaggaggaagagggagaagaggaggaggaggaagaggaggccggctatggggatggatatgacgactgggaaacggacgaagatgaggaatcgttgggcgatgaagaggaagaagaggaggaggaagaggaggaagttctggaaagctgcatggtgggggtggctagagactctgtgaagaggaagggagacctctccctgcggccagaggatggcgtgtgggcgctgcgcctctcctcctccggcatctgggccaacaccagccccgaggctgagcttttcccagcactgcggccccggagagtgggcatcgccctggattatgaagggggcaccgtgactttcaccaacgcagagtcacaggaactcatctacaccttcactgccaccttcacccggcgcctggtccccttcctgtggctcaagtggccaggaacacgcctcctgctaagaccctgagccctgacatctgcccccagccccaaccctcagatgcttcacttctttggaattccaggactctcaatggggggacgggatgcctggcctaagcacctggagcaggggaccccatatccactggtagccacctccccattgctgtggccccctgaaatctcactcagtgctgttgctccatctactgccctaatggggctcttttcccacctcctgctggtttcccgagggaacttctgaccctggagtccatgagggctcctttcctttttgaccacgaccttggccccagctctgcactctctggaataagggcccgatgcagcattttcttgcccagtgtggcaagacctcagaaaaaccagtcaattacgcctaagatcattttgctgtccttaaaccccccaggttccttcttgcacaaatccactctgctgcccaccttctctggcattttaaacagacctaccccaccccaactcagagttaagcatacatggcaatgctgaaaataaacaaaatccactgaggcttcccaggccatttaaagcctggagtaccagcgcatatcatctcatggggtccagagtggagtccaggcttctctgaaaccagggctgagcatatttccatagccaaggaggtgggactccctggagctatctgtggtcttagggaaggatccagacatacacggctttggggtacaagctgtgatcactgatcaataaattatctctagattggtccttgtgaggggagttttaagaatccagaacatcttgctcttgatcagcacatccaaaaacaccaagacaaacatccagtggagcagaacctctcctgcctcgggagttctgaccgggttccccagcagggtgttaagcctctgtctctggccctaccagcatccaggttccactttcctaggagagagtggagatgggaagacagggaaaggaaggcagcaggaggccacaagcccaccaggtcttcatgtcaagagagggagtaacatgtcttctcattgcccacggacccaacctctgtccaggtgcccctcatcatcacagtttaacacaagctcccctgctccagccaaattgatctcccagtcttgtccttacccattccaagtgctctgccagcccctgttcatccaagttttaagtcctccaccctgttctaagagactgttccaacggctctgggcctcagtggtcacttgaccaccattgtctcagagctgcccactttgtgtgtgtcacatgctgcctgagtcacatgtacatcttatttctgcctctagttttgtaagctcctggagggcggataacatcttatactactcttgtattctcatggcacctagtgcagtgctgggcacagagtaggtgctcaataaagacttgttgaatgaa

SEQ ID NO: 269429 - DNA, 3478 bp, Artificial Sequence
  derived and/or modified sequence
aacagaccgccgtgagagaggaggggtgccggccgggattcgcggcccggagctcgggaccggagtcaggaatggagagaagggtaatggttttacctcttattgtggaaacctgttgagatcacagagaatatactgacggcataaaagggcagaaccatagcagggtgcggttgcttcattccagcctcgcagtcacctctgtgccctgctggttgtcttcccagcgctgctgtagttgccttccatggatctataggagagcaagtcctccaggagctggtggtgtctgtcgattgactgagtgctggagctggcagccctgtgcaggctgccacctttgcccctttactgtgcttgctcctgactctatgtcgcgtctccaaggagaagaagtcctcaccagtgaacggagacctctctgaactaaggataccatggccacgtcagccccactacggagcctggaagaggaggtgacctgctccatctgtcttgattacctgcgggaccctgtgaccattgactgtggccacgtcttctgccgcagctgcaccacagacgtccgccccatctcagggagccgccccgtctgcccactctgcaagaagccttttaagaaggagaacatccgacccgtgtggcaactggccagcctggtggagaacattgagcggctgaaggtggacaagggcaggcagccgggagaggtgacccgggagcagcaggatgcaaagttgtgcgagcgacaccgagagaagctgcactactactgtgaggacgacgggaagctgctgtgcgtgatgtgccgggagtcccgggagcacaggccccacacggccgtcctcatggagaaggccgcccagccccacagggaaaaaatcctgaaccacctgagtaccctaaggagggacagagacaaaattcagggcttccaggcaaagggagaagctgatatcctggccgcgctgaagaagctccaggaccagaggcagtacattgtggctgagtttgagcagggtcatcagttcctgagggagcgggaggaacacctgctggaacagctggcgaagctggagcaggagctcacggagggcagggagaagttcaagagccggggcgtcggggagcttgcccggctggccctggtcatctccgaactggagggcaaggcgcagcagccagctgcagagctcatgcaggacacgagagacttcctaaacaggtatccacggaagaagttctgggttgggaaacccattgctcgagtggttaaaaaaaagaccggagaattctcagataaactcctctctctgcaacgaggcctgagggaattccaggggaagctgctgagagacttggaatataagacagtgagcgtcaccctggacccacagtcggccagtgggtacctgcagctgtcagaggactggaagtgcgtgacctacaccagcctgtacaagagtgcctacctgcacccccagcagtttgactgtgagcctggggtgctaggcagcaagggcttcacctggggcaaggtctactgggaagtggaagtggagagggagggctggtctgaggatgaagaagagggggatgaggaggaagagggagaagaggaggaggaggaagaggaggccggctatggggatggatatgacgactgggaaacggacgaagatgaggaatcgttgggcgatgaagaggaagaagaggaggaggaagaggaggaagttctggaaagctgcatggtgggggtggctagagactctgtgaagaggaagggagacctctccctgcggccagaggatggcgtgtgggcgctgcgcctctcctcctccggcatctgggccaacaccagccccgaggctgagcttttcccagcactgcggccccggagagtgggcatcgccctggattatgaagggggcaccgtgactttcaccaacgcagagtcacaggaactcatctacaccttcactgccaccttcacccggcgcctggtccccttcctgtggctcaagtggccaggaacacgcctcctgctaagaccctgagccctgacatctgcccccagccccaaccctcagatgcttcacttctttggaattccaggactctcaatggggggacgggatgcctggcctaagcacctggagcaggggaccccatatccactggtagccacctccccattgctgtggccccctgaaatctcactcagtgctgttgctccatctactgccctaatggggctcttttcccacctcctgctggtttcccgagggaacttctgaccctggagtccatgagggctcctttcctttttgaccacgaccttggccccagctctgcactctctggaataagggcccgatgcagcattttcttgcccagtgtggcaagacctcagaaaaaccagtcaattacgcctaagatcattttgctgtccttaaaccccccaggttccttcttgcacaaatccactctgctgcccaccttccctggcattttaaacagacctaccccaccccaactcagagttaagcatacatggcaatgctgaaaataaacaaaatccactgaggcttcccaggccatttaaagcctggagtaccagcgcatatcatctcatggggtccagagtggagtccaggcttctctgaaaccagggctgagcatatttccatagccaaggaggtgggactccctggagctatctgtggtcttagggaaggatccagacatacacggctttggggtacaagctgtgatcactgatcaataaattatctctagattggtccttgtgaggggagttttaagaatccagaacatcttgctcttgatcagcacatccaaaaacaccaagacaaacatccagtggagcagaacctctcctgcctcgggagttctgaccgggttccccagcagggtgttaagcctctgtctctggccctaccagcatccaggttccactttcctaggagagagtggagatgggaagacagggaaaggaaggcagcaggaggccacaagcccaccaggtcttcatgtcaagagagggagtaacatgtcttctcattgcccacggacccaacctctgtccaggtgcccctcatcatcacagtttaacacaagctcccctgctccagccaaattgatctcccagtcttgtccttacccattccaagtgctctgccagcccctgttcatccaagttttaagtcctccaccctgttctaagagactgttccaacggctctgggcctcagtggtcacttgaccaccattgtctcagagctgcccactttgtgtgtgtcacatgctgcctgagtcacatgtacatcttatttctgcctctagttttgtaagctcctggagggcggataacatcttatactactcttgtattctcatggcacctagtgcagtgctgggcacagagtaggtgctcaataaagacttgttgaatgaa

SEQ ID NO: 269430 - DNA, 3478 bp, Artificial Sequence
  derived and/or modified sequence
aacagaccgccgtgagagaggaggggcgccggccgggattcgcggcccggagctcgggaccggagtcaggaatggagagaagggtaatggtgttacctcttattgtggaaacctgttgagatcacagagaatatactgacggcataaaagggcagaaccatagcagggtgcggttgcttcattccagcctcgcagtcacctctgtgccctgctggttgtcttcccagcgctgctgtagttgccttccatggatctataggagagcaagtcctccaggagctggtggtgtctgtcgattgactgagtgctggagctggcagccctgtgcaggctgccacctttgcccctttactgtgcttgctcctgactctatgtcgcgtctccaaggagaagaagtcctcaccagtgaacggagacctctctgaactaagaataccatggccacgtcagccccactacggagcctggaagaggaggtgacctgctccatctgtcttgattacctgcgggaccctgtgaccattgactgtggccacgtcttctgccgcagctgcaccacagacgtccgccccatctcagggagccgccccgtctgcccactctgcaagaagccttttaagaaggagaacatccgacccgtgtggcaactggccagcctggtggagaacattgagcggctgaaggtggacaagggcaggcagccgggagaggtgacccgggagcagcaggatgcaaagttgtgcgagcgacaccgagagaagctgcactactactgtgaggacgacgggaagctgctgtgcgtgatgtgccgggagtcccgggagcacaggccccacacggccgtcctcatggagaaggccgcccagccccacagggaaaaaatcctgaaccacctgagtaccctaaggagagacagagacaaaattcagggcttccaggcaaagggagaagctgatatcctggccgcgctgaagaagctccaggaccagaggcagtacattgtggctgagtttgagcagggtcatcagttcctgagggagcgggaggaacacctgctggaacagctggcgaagctggagcaggagctcacggagggcagggagaagttcaagagccggggcgtcggggagcttgcccggctggccctggtcatctccgaactggagggcaaggcgcagcagccagctgcagagctcatgcaggacacgagagacttcctaaacaggtatccacggaagaagttctgggttgggaaacccattgctcgagtggttaaaaaaaagaccggagaattctcagataaactcctctctctgcaacgaggcctgagggaattccaggggaagctgctgagagacttggaatataagacagtgagcgtcaccctggacccacagtcggccagtgggtacctgcagctgtcagaggactggaagtgcgtgacctacaccagcctgtacaagagtgcctacctgcacccccagcagtttgactgtgagcctggggtgctgggcagcaagggcttcacctggggcaaggtctactgggaagtggaagtggagagggagggctggtctgaggatgaagaagagggggatgaggaggaagagggagaagaggaggaggaggaagaggaggccggctatggggatggatatgacgactgggaaacggacgaagatgaggaatcgttgggcgatgaagaggaagaagaggaggaggaagaggaggaagttctggaaagctgcatggtgggggtggctagagactctgtgaagaggaagggagacctctccctgcggccagaggatggcgtgtgggcgctgcgcctctcctcctccggcatctgggccaacaccagccccgaggctgagcttttcccagcactgcggccccggagagtgggcatcgccctggattatgaagggggcaccgtgactttcaccaacgcagagtcacaggaactcatctacaccttcactgccaccttcacccggcgcctggtccccttcctgtggctcaagtggccaggaacacgcctcctgctaagaccctgagccctgacatctgcccccagccccaaccctcagatgcttcacttctttggaattccaggactctcaatggggggacgggatgcctggcctaagcacctggagcaggggaccccatatccactggtagccacctccccattgctgtggccccctgaaatctcactcagtgctgttgctccatctactgccctaatggggctcttttcccacctcctgctggtttcccgagggaacttctgaccctggagtccatgagggctcctttcctttttgaccacgaccttggccctagctctgcactctctggaataagggcccgatgcagcattttcttgcccagtgtggcaagacctcagaaaaaccagtcaattacgcctaagatcattttgctgtccttaaaccccccaggttccttcttgcacaaatccactctgctgcccaccttccctggcattttaaacagacctaccccaccccaactcagagttaagcatacatggcaatgctgaaaataaacaaaatccactgaggcttcccaggccatttaaagcctggagtaccagcgcatatcatctcatggggtccagagtggagtccaggcttctctgaaaccagggctgagcatatttccatagccaaggaggtgggactccctggagctatctgtggtcttagggaaggatccagacatacacggctttggggtacaagctgtgatcactgatcaataaattatctctagattggtccttgtgaggggagttttaagaatccagaacatcttgctcttgatcagcacatccaaaaacaccaagacaaacatccagtggagcagaacctctcctgcctcgggagttctgaccgggttccccagcagggtgttaagcctctgtctctggccctaccagcatccaggttccactttcctaggagagagtggagatgggaagacagggaaaggaaggcagcaggaggccacaagcccaccaggtcttcatgtcaagagagggagtaacatgtcttctcattgcccacggacccaacctctgtccaggtgcccctcatcatcacagtttaacacaagctcccctgctccagccaaattgatctcccagtcttgtccttacccattccaagtgctctgccagcccctgttcatccaagttttaagtcctccaccctgttataagagactgttccaacggctctgggcctcagtggtcacttgaccaccattgtctcagagctgcccactttgtgtgtgtcacatgctgcctgagtcacatgtacatcttatttctgcctctagttttgtaagctcctggagggcggataacatcttatactactcttgtattctcatggcacctagtgcagtgctgggcacagagtaggtgctcaataaagacttgttgaatgaa

SEQ ID NO: 269431 - DNA, 3478 bp, Artificial Sequence
  derived and/or modified sequence
aacagaccgccgtgagagaggaggggtgccggccgggattcgcggcccggagctcgggaccggagtcaggaatggagagaagggtaatggttttacctcttattgtggaaacctgttgagatcacagagaatatactgacggcataaaagggcagaaccatagcagggtgcggttgcttcattccagcctcgcagtcacctctgtgccctgctggttgtcttcccagcgctgctgtagttgccttccatggatctataggagagcaagtcctccaggagctggtggtgtctgtcgattgactgagtgctggagctggcagccctgtgcaggctgccacctttgcccctttactgtgcttgctcctgactctatgtcgcgtcttcaaggagaagaagtcctcaccagtgaacggagacctctctgaactaaggataccatggccacgtcagccccactacggagcctggaagaggaggtgacctgctccatctgtcttgattacctgcgggaccctgtgaccattgactgtggccacgtcttctgccgcagctgcaccacagacgtccgccccatctcagggagccgccccgtctgcccactctgcaagaagccttttaagaaggagaacatccgacccgtgtggcaactggccagcctggtggagaacattgagcggctgaaggtggacaagggcaggcagccgggagaggtgacccgggagcagcaggatgcaaagttgtgcgagcgacaccgagagaagctgcactactactgtgaggacgacgggaagctgctgtgcgtgatgtgccgggagtcccgggagcacaggccccacacggccgtcctcatggagaaggccgcccagccccacagggaaaaaatcctgaaccacctgagtaccctaaggagggacagagacaaaattcagggcttccaggcaaagggagaagctgatatcctggccgcgctgaagaagctccaggaccagaggcagtacattgtggctgagtttgagcagggtcatcagttcctgagggagcgggaggaacacctgctggaacagctggcgaagctggagcaggagctcacggagggcagggagaagttcaagagccggggcgtcggggagcttgcccggctggccctggtcatctccgaactggagggcaaggcgcagcagccagctgcagagctcatgcaggacacgagagacttcctaaacaggtatccacggaagaagttctgggttgggaaacccattgctcgagtggttaaaaaaaagaccggagaattctcagataaactcctctctctgcaacgaggcctgagggaattccaggggaagctgctgagagacttggaatataagacagtgagcgtcaccctggacccacagtcggccagtgggtacctgcagctgtcagaggactggaagtgcgtgacctacaccagcctgtacaagagtgcctacctgcacccccagcagtttgactgtgagcctggggtgctaggcagcaagggcttcacctggggcaaggtctactgggaagtggaagtggagagggagggctggtctgaggatgaagaagagggggatgaggaggaagagggagaagaggaggaggaggaagaggaggccggctatggggatggatatgacgactgggaaacggacgaagatgaggaatcgttgggcgatgaagaggaagaagaggaggaggaagaggaggaagttctggaaagctgcatggtgggggtggctagagactctgtgaagaggaagggagacctctccctgcggccagaggatggcgtgtgggcgctgcgcctctcctcctccggcatctgggccaacaccagccccgaggctgagcttttcccagcactgcggccccggagagtgggcatcgccctggattatgaagggggcaccgtgactttcaccaacgcagagtcacaggaactcatctacaccttcactgccaccttcacccggcgcctggtccccttcctgtggctcaagtggccaggaacacgcctcctgctaagaccctgagccctgacatctgcccccagccccaaccctcagatgcttcacttctttggaattccaggactctcaatggggggacgggatgcctggcctaagcacctggagcaggggaccccatatccactggtagccacctccccattgctgtggccccctgaaatctcactcagtgctgttgctccatctactgccctaatggggctcttttcccacctcctgctggtttcccgagggaacttctgaccctggagtccatgagggctcctttcctttttgaccacgaccttggccccagctctgcactctctggaataagggcccgatgcagcattttcttgcccagtgtggcaagacctcagaaaaaccagtcaattacgcctaagatcattttgctgtccttaaaccccccaggttccttcttgcacaaatccactctgctgcccaccttccctggcattttaaacagacctaccccaccccaactcagagttaagcatacatggcaatgctgaaaataaacaaaatccactgaggcttcccaggccatttaaagcctggagtaccagcgcatatcatctcatggggtccagagtggagtccaggcttctctgaaaccagggctgagcatatttccatagccaaggaggtgggactccctggagctatctgtggtcttagggaaggatccagacatacacggctttggggtacaagctgtgatcactgatcaataaattatctctagattggtccttgtgaggggagttttaagaatccagaacatcttgctcttgatcagcacatccaaaaacaccaagacaaacatccagtggagcagaacctctcctgcctcgggagttctgaccgggttccccagcagggtgttaagcctctgtctctggccctaccagcatccaggttccactttcctaggagagagtggagatgggaagacagggaaaggaaggcagcaggaggccacaagcccaccaggtcttcatgtcaagagagggagtaacatgtcttctcattgcccacggacccaacctctgtccaggtgcccctcatcatcacagtttaacacaagctcccctgctccagccaaattgatctcccagtcttgtccttacccattccaagtgctctgccagcccctgttcatccaagttttaagtcctccaccctgttctaagagactgttccaacggctctgggcctcagtggtcacttgaccaccattgtctcagagctgcccactttgtgtgtgtcacatgctgcctgagtcacatgtacatcttatttctgcctctagttttgtaagctcctggagggcggataacatcttatactactcttgtattctcatggcacctagtgcagtgctgggcacagagtaggtgctcaataaagacttgttgaatgaa

SEQ ID NO: 269432 - protein, 137 aa, Artificial Sequence
  derived and/or modified sequence
MTTPANWNSPLRPGEKYPLVVFSHGLGAFRTLYSAIGIDLASHGFIVAAVEHRDRSASATYYFKDQSAAEIGDKSWLYLRTLKQEEETHIRNEQVRQRAKECSQALSLILDIDHGKPVKNALDLKFDMEQLKVSYKK

SEQ ID NO: 269433 - DNA, 660 bp, Artificial Sequence
  derived and/or modified sequence
atggctgccgccagctttggacagacgaagattccgcggggaaatggaccttactccgtggggtgtacagacctaatgtttgatcatactaacaagggcacatttttacggctttactatccttcccaggataacgataggctggacaccctgtggatccctaataaggagtacttctggggcctgagtaaattcctgggcacccattggctgatggggaatattctgcgactactctttggcagtatgacgacaccagctaattggaactccccactacgcccaggagaaaaataccccttggtggtgttttcccacggattgggagcctttcgcaccctgtattccgcgatcggaatagatctggcttcccacggcttcatagtggcagcggtggagcatagggaccgaagtgcctctgccacgtattattttaaggatcaatcagcagccgaaatcggcgataagtcatggctttacctacggacccttaagcaggaggaagaaacccacatcagaaatgagcaagttcggcagcgcgccaaggagtgtagccaggctctgagtctaatcctcgatatcgaccacggtaagcccgttaagaatgcattggatctcaaatttgatatggaacagcttaaggtatcttacaagaagtag

SEQ ID NO: 269434 - DNA, 414 bp, Artificial Sequence
  derived and/or modified sequence
atgactacccctgccaactggaactcccccttgaggcccggcgaaaaatatcctttagtcgtgtttagccacggacttggcgctttcaggactctttacagtgcgattggcatcgacctggcaagccacggattcatcgtcgctgccgtggaacaccgagaccgatctgctagtgcgacttactacttcaaagatcaaagcgctgctgaaatcggggacaagtcttggctttatctccgtactctcaagcaggaggaggagacacatattagaaatgaacaggtcaggcagagagccaaggaatgttcccaggctctgagtctgatcttagacatcgaccacggcaaaccagtcaaaaacgctctggacttgaaattcgacatggaacagcttaaggtgtcatacaagaaatag

SEQ ID NO: 269435 - DNA, 660 bp, Artificial Sequence
  derived and/or modified sequence
atggctgctgccagctttggccagaccaagatccccagaggaaatggcccctacagcgtgggctgcacagacctgatgtttgaccacaccaacaagggcaccttcctgcggctgtactaccccagccaggacaatgaccggctggacaccctgtggatccccaacaaggagtacttctggggcctgagcaagttcctgggcacccactggctgatgggcaacatcctgcggctgctgtttggctccatgaccaccccagccaactggaacagccccctgcggcctggagagaagtaccccctggtggtgttcagccacggcctgggcgccttccgcaccctgtacagcgccatcggcatcgacctggccagccacggcttcatcgtggccgctgtggagcaccgggacagaagtgccagcgccacctactacttcaaggaccagagcgctgctgagattggagacaagtcctggctgtacctgcggaccctgaagcaggaggaggagacccacatcagaaatgagcaggtgcggcagagggccaaggaatgttcccaggccctgagcctcatcctggacatcgaccacggcaagcctgtgaagaatgccctggacctgaagtttgacatggagcagctgaaggtgtcctacaagaagtag

SEQ ID NO: 269436 - DNA, 414 bp, Artificial Sequence
  derived and/or modified sequence
atgaccaccccagccaactggaacagccccctgcggcctggagagaagtaccccctggtggtgttcagccacggcctgggcgccttccgcaccctgtacagcgccatcggcatcgacctggccagccacggcttcatcgtggccgctgtggagcaccgggacagaagtgccagcgccacctactacttcaaggaccagagcgctgctgagattggagacaagtcctggctgtacctgcggaccctgaagcaggaggaggagacccacatcagaaatgagcaggtgcggcagagggccaaggaatgttcccaggccctgagcctcatcctggacatcgaccacggcaagcctgtgaagaatgccctggacctgaagtttgacatggagcagctgaaggtgtcctacaagaagtag

SEQ ID NO: 269437 - DNA, 660 bp, Artificial Sequence
  derived and/or modified sequence
atggccgccgccagcttcggccagaccaagatcccccggggcaacggtccatactctgtcggttgtactgacctgatgttcgatcatactaacaaaggaaccttcctgcgactctactatccttcacaagataatgatcggctggacacactctggataccgaataaagagtacttttggggactttcgaaatttctgggaactcactggttgatgggcaatatcctgagactactgtttgggagcatgactacgccagcaaactggaactcgcctcttaggcctggtgaaaagtatcctctggtagtattttcccacgggctcggcgcctttagaacattgtactccgccattggcatagacctcgccagccacggttttattgtggctgccgtcgaacatcgagatcggagcgcctcggcgacctattacttcaaagatcaatccgctgccgaaatcggcgacaagtcgtggctctacttaagaaccctgaaacaagaagaagagacacatattcgtaatgagcaggtgcgacagcgggccaaagagtgttcccaggcgctgtccctaattctcgacattgatcacggcaagcccgtgaaaaacgcgctggacttaaagttcgatatggagcagctcaaagtgagctacaagaagtag

SEQ ID NO: 269438 - DNA, 414 bp, Artificial Sequence
  derived and/or modified sequence
atgaccacccccgccaactggaacagccccctgcggcccggcgagaagtatccactggtggtgttctcacacgggctcggagcctttagaaccctttactcagctatcgggatcgacctggcatcacacggattcatcgtggctgcggttgaacatagggatcgctccgccagcgcaacttattattttaaggatcaaagcgcagccgaaatcggagacaagagctggctctacctgaggactttgaaacaagaggaggaaacgcatattcgcaatgagcaggtgcgccagcgagccaaggagtgtagccaggcactgtcactgattttggatatagaccacggtaaacccgtgaagaatgctttggatctgaagttcgatatggagcaacttaaggtgtcttataagaagtag

SEQ ID NO: 269439 - DNA, 1709 bp, Artificial Sequence
  derived and/or modified sequence
agagctgctcggcccgcagccagggggacagcggctggtcggaggctcgcagtgctgtcggcgagaagcagtcgggtttggagcgcttgggtcgcgttggtgcgcggtggaacgcgcccagggaccccagttcccgcgagcagctccgcgccgcgcctgacatgggtcaacaaaatacaagtactgatggctgctgcaagctttggccaaactaaaatcccccggggaaatgggccttattccgttggttgtacagacttaatgtttgatcacactaataagggcaccttcttgcgtttatattatccatcccaagataatgatcgccttgacaccctttggatcccaaataaagaatatttttggggtcttagcaaatttcttggaacacactggcttatgggcaacattttgaggttactctttggttcaatgacaactcctgcaaactggaattcccctctgaggcctggtgaaaaatatccacttgttgttttttctcatggtcttggggcattcaggacactttattctgctattggcattgacctggcatctcatgggtttatagttgctgctgtagaacacagagatagatctgcatctgcaacttactatttcaaggaccaatctgctgcagaaataggggacaagtcttggctctaccttagaaccctgaaacaagaggaggagacacatatacgaaatgagcaggtacggcaaagagcaaaagaatgttcccaagctctcagtctgattcttgacattgatcatggaaagccagtgaagaatgcattagatttaaagtttgatatggaacaactgaaggtaagctataaaaagtaatttttctcttgtcctacagttctttattgttttttgtcatttaattttctgctatattgcaaggtacaatatgataaagggctgcaaccagccccctccccaatgcgcacacacagacacacaaagcagtacaggtaaagtattgcagcaatgaagaatgcattatcttggactagatatgaaattgccaaaagttagtcagttttgatctacaaaaacagcaatgtcatatggttcaactcaactcctgtggaagtattattatttcatggacagctcctgcatgtttttaagcttgatcttgaaaacttgacacaagtttgggagcgggtggaaaaatatcagacagagtgggcagcatgaacaaagactcaaaagtgtgtgtggcatgtgaagtgcagggattagggggaactagagaataagatgatggtctgttctccagatacaatgaagaaatttgttatccctcaagcagccactctcttctgtatccttgcctttgtacatgttgtccccttggcctgacacacccttccccttgcctaactcctacctaatttcaagactccagttgagcatcacctcctctaagaagctttcttggaccccaatacccacttctggactgggctcgctgtctgtcatgtgtgctcctttgtaccactgtactgtattgcatcatgcctctgtataactttcttccctgatggactgcaaactcactgaaatgagactgcagtacctggcacagagtaggtactcaataaatactcatggaatgaacaaacaaataaacatggggtgaggagaggcagaagtcagaactgatgttgaagtttccagtgtgggtgactacaaag

SEQ ID NO: 269440 - DNA, 1210 bp, Artificial Sequence
  derived and/or modified sequence
aggccgcgctaggcggacccaggacacagcccgcgcgcagcccacccgcccgccgcctgccagagctgctcggcccgcagccagggggacagcggctggtcggaggctcgcagtgctgtcggcgagaagcagtcgggtttggagcgcttgggtcgcgttggtgcgcggtggaacgcgcccagggaccccagttcccgcgagcagctccgcgccgcgcctgagttcaatgacaactcctgcaaactggaattcccctctgaggcctggtgaaaaatatccacttgttgttttttctcatggtcttggggcattcaggacactttattctgctattggcattgacctggcatctcatgggtttatagttgctgctgtagaacacagagatagatctgcatctgcaacttactatttcaaggaccaatctgctgcagaaataggggacaagtcttggctctaccttagaaccctgaaacaagaggaggagacacatatacgaaatgagcaggtacggcaaagagcaaaagaatgttcccaagctctcagtctgattcttgacattgatcatggaaagccagtgaagaatgcattagatttaaagtttgatatggaacaactgaaggtaagctataaaaagtaatttttctcttgtcctacagttctttattgttttttgtcatttaattttctgctatattgcaaggtacaatatgataaagggctgcaaccagccccctccccaatgcgcacacacagacacacaaagcagtacaggtaaagtattgcagcaatgaagaatgcattatcttggactagatatgaaattgccaaaagttagtcagttttgatctacaaaaacagcaatgtcatatggttcaactcaactcctgtggaagtattattatttcatggacagctcctgcatgtttttaagcttgatcttgaaaacttgacacaagtttgggagcgggtggaaaaatatcagacagagtgggcagcatgaacaaagactcaaaagtgtgtgtggcatgtgaagtgcagggattagggggaactagagaataagatgatggtctgttctccagatacaatgaagaaatttgttatccctcaagcagccactctcttctgtatccttgcctttgtacatgttgtccccttggcctgacacacccttccccttgcctaactcctacctaatttcaagact

SEQ ID NO: 269441 - DNA, 660 bp, Artificial Sequence
  derived and/or modified sequence
atggcggctgccagttttggacaaactaagataccacggggaaacggcccatatagcgtgggatgtacagatctgatgttcgatcacaccaacaaagggacctttctaaggctgtactacccatcccaggataatgataggttggatactttatggatccctaacaaagaatatttctggggactgagcaagtttctgggtactcattggttgatggggaatatccttagactactctttggctcaatgacaacccccgcaaactggaattcccccctgcgcccaggcgaaaaatatccgttggtggtgttcagtcatggtctgggagccttccgaactctctactctgccatcgggattgacctggccagccatgggttcatcgtcgccgctgtcgaacatcgggacagaagtgcttcagcgacatactattttaaagaccaaagtgccgcagagattggcgataaatcatggctatatcttaggacacttaagcaggaagaggaaactcacatccggaacgagcaggtgcgccagagagctaaagaatgtagtcaggctctcagcttgatcttggacatcgaccacggcaaacccgtgaaaaacgcactggatctcaaattcgatatggagcagctgaaggtgagttacaaaaagtag

SEQ ID NO: 269442 - DNA, 414 bp, Artificial Sequence
  derived and/or modified sequence
atgacgacccctgccaactggaatagcccactacgccctggcgaaaaatatcctctggtcgtcttctcacacgggctcggagccttcaggacactatacagcgctataggcatcgacctggccagccatggatttattgtagctgcagtggaacatcgcgataggagcgctagcgctacgtattacttcaaagaccaaagtgctgctgagattggtgataagtcatggctctacctgaggaccctgaaacaggaggaggagactcatattagaaacgaacaagtgcggcagagagccaaggagtgcagccaggccctgtccctgatcctggacatcgaccacggcaagcctgtgaagaacgctctagacctgaagtttgacatggaacagctgaaagtgtcttacaaaaagtag

SEQ ID NO: 269443 - DNA, 660 bp, Artificial Sequence
  derived and/or modified sequence
atggccgccgccagcttcggccagaccaagatccccagaggcaacggcccctacagcgtgggctgcaccgacctgatgttcgaccacaccaacaagggcaccttcctgagactgtactaccccagccaggacaacgacagactggacaccctgtggatccccaacaaggagtacttctggggcctgagcaagttcctgggcacccactggctgatgggcaacatcctgagactgctgttcggcagcatgaccacccccgccaactggaacagccccctgagacccggcgagaagtaccccctggtggtgttcagccacggcctgggcgccttcagaaccctgtacagcgccatcggcatcgacctggccagccacggcttcatcgtggccgccgtggagcacagagacagaagcgccagcgccacctactacttcaaggaccagagcgccgccgagatcggcgacaagagctggctgtacctgagaaccctgaagcaggaggaggagacccacatcagaaacgagcaggtgagacagagagccaaggagtgcagccaggccctgagcctgatcctggacatcgaccacggcaagcccgtgaagaacgccctggacctgaagttcgacatggagcagctgaaggtgagctacaagaagtag

SEQ ID NO: 269444 - DNA, 414 bp, Artificial Sequence
  derived and/or modified sequence
atgaccacccccgccaactggaacagccccctgagacccggcgagaagtaccccctggtggtgttcagccacggcctgggcgccttcagaaccctgtacagcgccatcggcatcgacctggccagccacggcttcatcgtggccgccgtggagcacagagacagaagcgccagcgccacctactacttcaaggaccagagcgccgccgagatcggcgacaagagctggctgtacctgagaaccctgaagcaggaggaggagacccacatcagaaacgagcaggtgagacagagagccaaggagtgcagccaggccctgagcctgatcctggacatcgaccacggcaagcccgtgaagaacgccctggacctgaagttcgacatggagcagctgaaggtgagctacaagaagtag

SEQ ID NO: 269445 - protein, 300 aa, Artificial Sequence
  derived and/or modified sequence
MEFPFDVDALFPERITVLDQHLRPPARRPGTTTPARVDLQQQIMTIIDELGKASAKAQNLSAPITSASRMQSNRHVVYILKDSSARPAGKGAIIGFIKVGYKKLFVLDDREAHNEVEPLCILDFYIHESVQRHGHGRELFQYMLQKERVEPHQLAIDRPSQKLLKFLNKHYNLETTVPQVNNFVIFEGFFAHQHPPARKLPPKRAEGDIKPYSSSDREFLKVAVEPPWPLNRAPRRATPPAHPPPRSSSLGNSPERGPLRPFVPEQELLRSLRLCPPHPTARLLLAADPGGSPAQRRRTR

SEQ ID NO: 269446 - protein, 398 aa, Artificial Sequence
  derived and/or modified sequence
MEFPFDVDALFPERITVLDQHLRPPARRPGTTTPARVDLQQQIMTIIDELGKASAKAQNLSAPITSASRMQSNRHVVYILKDSSARPAGKGAIIGFIKVGYKKLFVLDDREAHNEVEPLCILDFYIHESVQRHGHGRELFQYMLQKERVEPHQLAIDRPSQKLLKFLNKHYNLETTVPQVNNFVIFEGFFAHQHPPARKLPPKRAEGDIKPYSSSDREFLKVAVEPPWPLNRAPRRATPPAHPPPRSSSLGNSPERGPLRPFVPEQELLRSLRLCPPHPTARLLLAADPGGSPAQRRRTRGTPPGLVAQSCCYSRHGGVNSSSPNTGNQDSKQGEQETKNRSASEEQALSQDGSGEKPMHTAPPQAPAPPAQSWTVGGDILNARFIRNLQERRSTRPW

SEQ ID NO: 269447 - protein, 323 aa, Artificial Sequence
  derived and/or modified sequence
MEFPFDVDALFPERITVLDQHLRPPARRPGTTTPARVDLQQQIMTIIDELGKASAKAQNLSAPITSASRMQSNRHVVYILKDSSARPAGKGAIIGFIKVGYKKLFVLDDREAHNEVEPLCILDFYIHESVQRHGHGRELFQYMLQKERVEPHQLAIDRPSQKLLKFLNKHYNLETTVPQVNNFVIFEGFFAHQHRPPAPSLRATRHSRAAAVDPTPAAPARKLPPKRAEGDIKPYSSSDREFLKVAVEPPWPLNRAPRRATPPAHPPPRSSSLGNSPERGPLRPFVPEQELLRSLRLCPPHPTARLLLAADPGGSPAQRRRTR

SEQ ID NO: 269448 - protein, 421 aa, Artificial Sequence
  derived and/or modified sequence
MEFPFDVDALFPERITVLDQHLRPPARRPGTTTPARVDLQQQIMTIIDELGKASAKAQNLSAPITSASRMQSNRHVVYILKDSSARPAGKGAIIGFIKVGYKKLFVLDDREAHNEVEPLCILDFYIHESVQRHGHGRELFQYMLQKERVEPHQLAIDRPSQKLLKFLNKHYNLETTVPQVNNFVIFEGFFAHQHRPPAPSLRATRHSRAAAVDPTPAAPARKLPPKRAEGDIKPYSSSDREFLKVAVEPPWPLNRAPRRATPPAHPPPRSSSLGNSPERGPLRPFVPEQELLRSLRLCPPHPTARLLLAADPGGSPAQRRRTRGTPPGLVAQSCCYSRHGGVNSSSPNTGNQDSKQGEQETKNRSASEEQALSQDGSGEKPMHTAPPQAPAPPAQSWTVGGDILNARFIRNLQERRSTRPW

SEQ ID NO: 269449 - DNA, 1197 bp, Artificial Sequence
  derived and/or modified sequence
atggagttccccttcgacgtggacgccctgttccccgagagaatcaccgtgctggaccagcacctgagaccccccgccagaagacccggcaccaccacccccgccagagtggacctgcagcagcagatcatgaccatcatcgacgagctgggcaaggccagcgccaaggcccagaacctgagcgcccccatcaccagcgccagcagaatgcagagcaacagacacgtggtgtacatcctgaaggacagcagcgccagacccgccggcaagggcgccatcatcggcttcatcaaggtgggctacaagaagctgttcgtgctggacgacagagaggcccacaacgaggtggagcccctgtgcatcctggacttctacatccacgagagcgtgcagagacacggccacggcagagagctgttccagtacatgctgcagaaggagagagtggagccccaccagctggccatcgacagacccagccagaagctgctgaagttcctgaacaagcactacaacctggagaccaccgtgccccaggtgaacaacttcgtgatcttcgagggcttcttcgcccaccagcacccccccgccagaaagctgccccccaagagagccgagggcgacatcaagccctacagcagcagcgacagagagttcctgaaggtggccgtggagcccccctggcccctgaacagagcccccagaagagccaccccccccgcccaccccccccccagaagcagcagcctgggcaacagccccgagagaggccccctgagacccttcgtgcccgagcaggagctgctgagaagcctgagactgtgccccccccaccccaccgccagactgctgctggccgccgaccccggcggcagccccgcccagagaagaagaaccagaggcaccccccccggcctggtggcccagagctgctgctacagcagacacggcggcgtgaacagcagcagccccaacaccggcaaccaggacagcaagcagggcgagcaggagaccaagaacagaagcgccagcgaggagcaggccctgagccaggacggcagcggcgagaagcccatgcacaccgcccccccccaggcccccgccccccccgcccagagctggaccgtgggcggcgacatcctgaacgccagattcatcagaaacctgcaggagagaagaagcaccagaccctggtag

SEQ ID NO: 269450 - DNA, 1266 bp, Artificial Sequence
  derived and/or modified sequence
atggagttccccttcgacgtggacgccctgttccccgagagaatcaccgtgctggaccagcacctgagaccccccgccagaagacccggcaccaccacccccgccagagtggacctgcagcagcagatcatgaccatcatcgacgagctgggcaaggccagcgccaaggcccagaacctgagcgcccccatcaccagcgccagcagaatgcagagcaacagacacgtggtgtacatcctgaaggacagcagcgccagacccgccggcaagggcgccatcatcggcttcatcaaggtgggctacaagaagctgttcgtgctggacgacagagaggcccacaacgaggtggagcccctgtgcatcctggacttctacatccacgagagcgtgcagagacacggccacggcagagagctgttccagtacatgctgcagaaggagagagtggagccccaccagctggccatcgacagacccagccagaagctgctgaagttcctgaacaagcactacaacctggagaccaccgtgccccaggtgaacaacttcgtgatcttcgagggcttcttcgcccaccagcacagaccccccgcccccagcctgagagccaccagacacagcagagccgccgccgtggaccccacccccgccgcccccgccagaaagctgccccccaagagagccgagggcgacatcaagccctacagcagcagcgacagagagttcctgaaggtggccgtggagcccccctggcccctgaacagagcccccagaagagccaccccccccgcccaccccccccccagaagcagcagcctgggcaacagccccgagagaggccccctgagacccttcgtgcccgagcaggagctgctgagaagcctgagactgtgccccccccaccccaccgccagactgctgctggccgccgaccccggcggcagccccgcccagagaagaagaaccagaggcaccccccccggcctggtggcccagagctgctgctacagcagacacggcggcgtgaacagcagcagccccaacaccggcaaccaggacagcaagcagggcgagcaggagaccaagaacagaagcgccagcgaggagcaggccctgagccaggacggcagcggcgagaagcccatgcacaccgcccccccccaggcccccgccccccccgcccagagctggaccgtgggcggcgacatcctgaacgccagattcatcagaaacctgcaggagagaagaagcaccagaccctggtag

SEQ ID NO: 269451 - DNA, 1386 bp, Artificial Sequence
  derived and/or modified sequence
tggggcgggtccgaccgcgcacaatgggccatggagttcccgttcgatgtggacgcgctgttcccggagcggatcacggtgctggaccagcacctgaggcccccagcccgccgacccggaaccacaacgccggcccgtgttgatctacagcagcaaattatgaccattatagatgaactgggcaaggcttctgccaaggcccagaatctttccgctcctatcactagtgcatcaaggatgcagagtaaccgccatgttgtttatattctcaaagacagttcagcccgaccggctggaaaaggagccattattggtttcatcaaagttggatacaagaagctctttgtactggatgatcgtgaggctcataatgaggtagaaccactttgcatcctggacttttacatccatgagtctgtgcaacgccatggccatgggcgagaactcttccagtatatgttgcagaaggagcgagtggaaccgcaccaactggcaattgaccgaccctcacagaagctgctgaaattcctgaataagcactacaatctggagaccacagtcccacaggtgaacaactttgtgatctttgaaggcttctttgcccatcaacatcctccagcaaggaagctgccacccaagagagcagagggagacatcaagccatactcctctagtgaccgagaatttctgaaggtagctgtggagcctccttggcccctaaacagggcccctcgccgcgccacacctccagcccacccacccccccgctccagcagcctgggaaactcaccagaacgaggtcccctccgcccctttgtgccagagcaggagctgctgcgttccttgcgcctctgccccccacaccctaccgcccgccttctgttggctgctgaccctgggggcagcccagctcaacgtcgtcgcaccagggggactcccccaggtctggtagcccaaagctgctgctacagccgccatgggggggtgaattcctcatcccccaatacaggcaaccaagactccaagcagggagaacaggaaacaaagaataggtctgccagtgaggagcaggccttgtcacaggatgggtctggggagaagcccatgcacacagctcctccacaggccccggccccgccagcccagtcctggacagtgggtggggacatactcaacgccaggttcattcgaaacctgcaggaacgtcgcagcaccaggccttggtgaccgcagccccgtcaaacatcttcaaagtattatttctccctcactacaggaaagagccaaagcccaaccctcataatagatggatacattcattcattcattcattcagcaggcttatcagattcaagtcatttgtatcttttaaccagaccaataaaa

SEQ ID NO: 269452 - DNA, 1476 bp, Artificial Sequence
  derived and/or modified sequence
tggggcgggtccgaccgcgcacaatgggccatggagttcccgttcgatgtggacgcgctgttcccggagcggatcacggtgctggaccagcacctgaggcccccagcccgccgacccggaaccacaacgccggcccgtgttgatctacagcagcaaattatgaccattatagatgaactgggcaaggcttctgccaaggcccagaatctttccgctcctatcactagtgcatcaaggatgcagagtaaccgccatgttgtttatattctcaaagacagttcagcccgaccggctggaaaaggagccattattggtttcatcaaagttggatacaagaagctctttgtactggatgatcgtgaggctcataatgaggtagaaccactttgcatcctggacttttacatccatgagtctgtgcaacgccatggccatgggcgagaactcttccagtatatgttgcagaaggagcgagtggaaccgcaccaactggcaattgaccgaccctcacagaagctgctgaaattcctgaataagcactacaatctggagaccacagtcccacaggtgaacaactttgtgatctttgaaggcttctttgcccatcaacatcggccccctgctccctctctgagggcaactcgacactctcgtgctgctgcagtcgatcccacgcccgctgctccagcaaggaagctgccacccaagagagcagagggagacatcaagccatactcctctagtgaccgagaatttctgaaggtagctgtggagcctccttggcccctaaacagggcccctcgccgcgccacacctccagcccacccacccccccgctccagcagcctgggaaactcaccagaacgaggtcccctccgcccctttgtgccagagcaggagctgctgcgttccttgcgcctctgccccccacaccctaccgcccgccttctgttggctgctgaccctgggggcagcccagctcaacgtcgtcgcaccagggggactcccccaggtctggtagcccaaagctgctgctacagccgccatgggggggtgaattcctcatcccccaatacaggcaaccaagactccaagcagggagaacaggaaacaaagaataggtctgccagtgaggagcaggccttgtcacaggatgggtctggggagaagcccatgcacacagctcctccacaggccccggccccgccagcccagtcctggacagtgggtggggacatactcaacgccaggttcattcgaaacctgcaggaacgtcgcagcaccaggccttggtgaccgcagccccgtcaaacatcttcaaagtattatttctccctcactacaggaaagagccaaagcccaaccctcataatagatggatacattcattcattcattcattcagcaggcttatcagattcaagtcatttgtatcttttaaccagaccaataaaagtatttatttttatcacaaga

SEQ ID NO: 269453 - DNA, 1197 bp, Artificial Sequence
  derived and/or modified sequence
atggaatttccatttgacgttgacgcactcttcccggaacggatcaccgtgctggaccagcacctgaggccacccgcccgccgacccgggactactactcccgcgcgggtcgacctgcaacagcagattatgactatcattgacgaattaggaaaggcctccgccaaagcccagaacctctccgcaccaatcacatccgcaagccggatgcaaagcaatcgccacgttgtttacatcctgaaagattctagtgcccgccctgctggaaaaggcgcaatcatagggttcataaaggtgggctataaaaaactgtttgtgctggacgaccgagaagctcacaacgaagttgaacccctgtgcattctggacttctatattcatgagtcagtgcagcgacacgggcatgggcgcgagctctttcagtatatgctacagaaagagagagtggagccccaccagctggccatcgatcgaccctcgcaaaaactgctgaagttcctgaataagcactataatcttgagacaaccgttccccaggtgaataattttgttatattcgagggtttctttgcccaccagcaccctccagcccggaaattaccaccaaagcgcgctgaaggagatattaagccctatagctctagtgaccgggagtttctgaaggtcgccgtggagccaccctggcctttgaaccgagcccccaggagggccaccccgccagcccaccctccccctcgatcaagcagcttgggcaactctcctgagcgagggcccctgcgcccctttgtgccggagcaggagctgctgcgtagtctgcgactttgccctccccatcccaccgcccgccttctgctcgccgccgaccctggagggtcaccggcgcagagaagaagaacacggggaactccccctggcctggtggcacagtcctgctgctactcccggcacgggggggtgaacagctcttcaccgaacacaggcaatcaagattctaagcagggcgagcaggagactaagaatagaagcgcttctgaggagcaagcattgtctcaggacggttcaggggagaaacctatgcacaccgcccctcctcaggcacccgcccccccagcccagtcctggacagtgggaggcgacatccttaatgctcggtttatccggaatttacaagagcgcagatctaccagaccctggtag

SEQ ID NO: 269454 - DNA, 1266 bp, Artificial Sequence
  derived and/or modified sequence
atggagtttcctttcgatgtagatgccttgttccctgagcgcatcactgtgctcgaccaacacctaagaccccccgcgagacgtccagggacaacgacacctgcccgggttgacttacaacagcagataatgacaattatcgacgagctcggcaaggctagcgccaaagcacagaacctctccgcccctatcacctcagcttcacggatgcagtctaatcgccacgtcgtttacattcttaaggactcctcggcaagaccggctggcaagggggctattatcggatttattaaagtcggatacaagaagctgtttgttctggacgatcgggaggcacacaatgaggtcgaacccctctgcatcctcgacttctacattcatgaaagcgtacaacggcacggacatggacgggaactgtttcagtacatgctccagaaagagcgggtagaaccgcatcagttggctatcgaccggccgagccagaaactgctcaaattccttaacaaacactacaacctggaaaccactgtccctcaggtaaataattttgtaatctttgagggcttttttgctcaccagcaccggccgcccgccccttcactgcgcgctactcggcactcccgtgctgctgccgtcgaccctacaccagctgctcctgccagaaagctgcctcccaagcgagctgaaggcgatataaagccgtactcttcgtctgatagagaatttctgaaggttgccgttgaaccaccttggcctcttaatagggctcctagaagagcaaccccacccgcacaccctccgcctagatctagctccctggggaacagcccggaacggggtcctctcaggccgttcgtgcctgagcaggaactgctcaggtccctacgactgtgcccaccccaccctacagctaggctgctccttgcagcagatccaggaggatccccggcccagagaagaaggaccagaggtactccacccggcttggtggcccaatcctgttgctactctcgccatggaggagtcaattcatcttcacctaacaccggaaaccaggactccaagcagggggagcaggagaccaagaaccgtagtgctagcgaagaacaggcactgagccaggacggatcaggtgagaagcccatgcatacagcgcccccccaagctccggcgcctcctgcccagagctggaccgtaggtggcgacattttaaatgcaaggtttatccgtaatcttcaggaacggaggagcacccgcccctggtag

SEQ ID NO: 269455 - DNA, 1266 bp, Artificial Sequence
  derived and/or modified sequence
atggagtttccatttgacgtggatgctctgttccctgaaaggatcaccgtccttgaccagcacctgcgacccccggcccgacgtcctggaaccacgaccccagcccgtgtggacctccagcagcagatcatgaccataatcgacgaactcgggaaggccagcgccaaagcccaaaacttgagcgcacccattaccagcgcctcacgtatgcagagcaatcgccatgtcgtctatattctgaaagattcttcagccagacccgccggcaagggcgccattatagggtttattaaggtcgggtataagaaactcttcgttctggatgaccgtgaagcccacaatgaagtggaacccctgtgtattctggatttttatatccatgaatccgttcagaggcatgggcatggcagggagctttttcagtatatgcttcagaaagagcgcgtcgagcctcatcaactcgctatcgatagaccaagccaaaaactgctgaagttcctgaacaagcattacaacctggagaccactgtgcctcaggtgaataatttcgtgatctttgagggattttttgcacaccaacaccgacccccagccccgagtttgcgggcaaccaggcactctagagccgcagctgtcgatccaacacctgccgcacccgccaggaagcttccccctaagagggcagaaggggatattaagccatacagctcatctgacagagaattcctgaaagtcgccgtggaaccaccctggcccctaaacagggctcctagaagggcgacgccgcccgcacacccaccacctaggagttcctccctcgggaactcaccggagagaggccctctgaggcctttcgttcctgaacaggagctcttacggagtctcagattgtgtcccccgcaccccaccgcaagactgcttttagcagctgatcctggcggcagccccgcgcagaggagaaggaccagagggacaccacctggtctcgtcgcacaaagctgctgttacagccgccatgggggtgttaacagctctagtcccaatacaggcaaccaggatagtaaacagggcgaacaggagacaaagaacagatcagcctctgaagaacaagcattatcacaagatgggagtggggaaaagcctatgcacacagcccccccacaggcacctgctccacctgctcaatcgtggactgtgggtggtgatatcctgaatgcgaggtttatcaggaatctccaggagagacggtccacaaggccgtggtag

SEQ ID NO: 269456 - DNA, 1266 bp, Artificial Sequence
  derived and/or modified sequence
atggaatttcccttcgatgtagacgctctctttccagagaggatcaccgtgctagatcagcatcttcgtcctcctgctcgcagaccaggaaccaccaccccagccagagtcgatctgcaacagcagatcatgactattatcgacgaactgggaaaagcatctgcaaaagcacaaaacctgagcgccccaattacctccgcaagccgcatgcaatcaaacagacatgtagtctacatcttgaaggactctagtgctcggcctgccggcaaaggagctattataggatttatcaaagtcggctataagaaacttttcgtcctcgatgatagggaggcacacaatgaagttgagcctctatgtatcttagatttctatatccacgagtccgtgcaacgacatgggcacggaagagaactcttccagtatatgctgcagaaagaacgagtggaaccgcaccagctggcgatagatcgcccttcccagaagctcttgaaattcttgaataagcactataacctggaaaccacagtgccccaggtcaataacttcgtgatctttgaagggtttttcgcgcatcagcataggccccctgcccccagtctaagagccaccaggcattcccgggctgctgctgtggaccccactcctgccgcgccagccagaaagctgccacccaagcgagcggaaggcgacattaagccatacagttcctcagaccgagagttcctcaaggttgccgtggaaccgccctggcccctgaatcgggctccgcgcagggccactccgccagcccatcccccccctaggagctctagtctgggcaatagcccagaaaggggcccactgcggcccttcgtgccagagcaagagctccttaggagtctgagactgtgccctcctcaccccacggctcgactgctgcttgccgcggatccagggggatcaccagctcagcggcgaaggacccgtgggaccccgcctggactggtcgcccagagctgctgctactctcgccatgggggcgtgaattcttcttcacctaatacaggtaaccaggacagcaaacaaggggagcaagaaaccaagaatcgtagcgcctctgaagagcaggccctttcgcaggatgggtcaggtgagaaacctatgcatacggcgccacctcaggcacctgctccccccgcccagtcatggaccgttggtggggatatccttaatgctcgttttattcgaaatctgcaggaaagacgttcaacccgcccttggtag

SEQ ID NO: 269457 - DNA, 1266 bp, Artificial Sequence
  derived and/or modified sequence
atggagtttccatttgacgtcgatgctctgtttccagagcggataacagttctagaccagcatctccggcccccagccagacgccctggaacaaccaccccggctagggtcgatctgcaacagcagattatgacaatcattgatgagctagggaaggccagcgcaaaggcccagaacttatctgctcccatcacatctgcctcccgcatgcagagtaatcgccacgttgtgtatatcctgaaagacagtagcgctcgccccgcaggcaagggcgcaatcataggatttatcaaggttgggtacaagaagcttttcgtgttagatgatcgagaagctcacaatgaggttgaaccgctatgtattcttgacttctacattcacgaatccgtgcaacgacacggccatggtcgtgagctattccagtatatgctgcagaaagagagagtcgaaccccatcagctagctatcgacaggccttctcaaaaactcctcaaattcctgaacaagcactataatctagaaacaactgtgcctcaagtgaataacttcgtgatctttgaagggttcttcgcacatcagcaccgtccccctgcacccagtctccgcgccacacgtcatagtagagcagccgctgtggatcctacaccagcagctccggcccgcaagctgcctcccaaaagggctgagggggacattaagccgtatagctcgtccgatagagagttcttaaaagttgccgtagagcctccttggcctctgaatagggccccccgccgggctacacctccagcacaccctccacccaggtccagttcacttggcaattccccagaacggggcccccttcgtccatttgtccctgaacaggaactcctcagatccctgcggctgtgcccccctcatccaaccgccaggcttttactcgccgccgacccaggaggctcaccagctcaacggcgacgcacccgggggacgccaccaggtctggttgctcaaagctgctgttattctcggcatgggggagtcaacagctcatcacctaacacgggcaaccaggattcaaaacagggcgaacaggagacgaaaaacaggtccgcttcagaagaacaggctctatcccaggacggttctggggagaaacctatgcacaccgctcctccccaagcacccgccccaccagctcagtcctggacggtgggtggcgacatcttgaacgccaggttcataaggaatctgcaggaacggcgttcaactagaccctggtag

SEQ ID NO: 269458 - DNA, 1266 bp, Artificial Sequence
  derived and/or modified sequence
atggagttcccattcgacgtagacgctttgtttccagagcggattaccgtgctggaccaacatttgagacctccagctagaagacccggcactaccactcccgcccgagtagacctccagcaacaaattatgacgattattgacgagctgggaaaagcatccgccaaggcccaaaatctgagtgcccccattaccagtgcaagcagaatgcaatccaaccgacatgtggtatacattctgaaagatagctctgcccgacctgcaggaaagggagcaatcataggtttcatcaaagtggggtataaaaaactcttcgtgctggatgaccgggaagcacacaatgaagtcgaacccttatgtattctggacttctacatccatgagagtgttcagaggcacgggcacggccgggagctgtttcaatacatgctgcagaaggagcgagtggagccacaccagctcgccatcgaccggccctctcagaagctgctgaagtttttgaacaagcattacaatttagaaactactgtgccccaggttaataacttcgtgatttttgagggcttcttcgcccatcaacacagacctccagccccaagtctgagggccacgagacactcccgggcggcagcggtggatcccacaccagcagctcccgcaaggaagctgcctcccaaaagggccgaaggggatataaaaccctattccagtagtgacagggagtttctgaaggtggcagtggagcccccatggcccctcaacagagcccctcggagggctaccccgcccgcccaccctcctccccgcagttccagtcttgggaactcccctgagagaggcccgctacggcccttcgtgcctgaacaggaattgctgagatcactccgcctgtgccccccccatccgaccgccagacttctgctcgcagccgaccccggtggctccccagcccagcgcaggcggacacgcgggacccctccgggacttgtcgcccagtcctgctgttatagccgtcacggtggggtgaactccagctcacctaacaccggcaaccaggacagcaagcagggtgagcaagaaacaaaaaaccgtagtgcaagcgaggagcaggcactaagtcaggacggatctggcgagaaaccaatgcacactgcacctccacaggcaccagcaccacccgctcagtcctggacagtcgggggagacatcctgaatgccagatttatccggaatctgcaggaacgccgctcaactcgcccttggtag

SEQ ID NO: 269459 - DNA, 1266 bp, Artificial Sequence
  derived and/or modified sequence
atggagtttccttttgatgtcgacgccctcttcccagagagaatcacagtactggaccagcatttgcggcccccggctcgaaggcccggcactactacaccagcaagggtggatttgcagcagcagattatgaccattattgatgaactcggcaaagcatccgccaaagcccagaatcttagtgccccgataacctctgcctccaggatgcagtcgaaccggcacgttgtctacatcctaaaagatagttccgcaaggccggccggcaaaggagctattattggttttattaaggttgggtacaagaagctcttcgttctcgacgatagggaagctcacaacgaggtggagccactctgtatcctggatttttacatccacgagagcgtgcaacgccatggacacgggcgagagctttttcagtacatgttacagaaagagagagtcgaaccccatcagcttgctattgaccggccctcacagaaattgctaaagttcctgaacaagcattataatttagagactacagttcctcaggtgaacaactttgtgatctttgagggcttctttgcccaccagcacagaccgcccgcaccaagtctccgagccacccggcactcccgggctgctgctgtcgatcccacccccgctgctccagccaggaagctgccccctaaacgtgctgagggtgatatcaagccatactcctctagcgatcgagaattcctgaaggtggccgtggagccgccttggcccttaaaccgggcaccaaggagggccacaccccccgcccatccgccacctcgctcttcttccctgggcaactcgcccgagcggggccctctgcgtcccttcgttcctgagcaagagctgctgaggtctctgagactctgccccccccacccaacagcacgactgctcctggctgcagatccaggaggaagcccggcccagagaagacgtactagggggacacctcctggattggtggcgcagtcctgctgctacagtaggcatggcggggttaactctagctcacccaatactggcaatcaggattccaagcagggtgaacaggaaacaaagaacagatctgcctcggaagagcaggccctatctcaggatggatcaggtgagaagcctatgcacaccgcacctccccaggcccccgccccaccagctcagtcctggaccgtcggaggcgacatccttaacgccaggttcatccgtaatctgcaggaaaggcgcagcactcggccgtggtag

SEQ ID NO: 269460 - DNA, 1266 bp, Artificial Sequence
  derived and/or modified sequence
atggaatttcccttcgatgtagatgctctgtttcccgagaggattacagttctcgaccagcatctaagaccacccgctagacggccaggaactacaacaccagcgagggtcgacttgcagcagcaaatcatgacaattatagatgagctcggaaaggcctcagccaaagcccagaacctgagtgcacctatcacgtccgcttctcgaatgcaatctaacaggcatgtggtgtatatcctaaaagactcaagtgccaggcccgcaggcaagggagccataattggtttcatcaaggtcggctataaaaagttgtttgtgctggacgatcgcgaggcccataatgaggtcgagcccctgtgcatcctggatttttatatacacgaatcagtccaacgacacggtcatggacgtgagttgtttcagtacatgcttcaaaaagaacgcgtggaaccccatcagctggctatcgatcgaccaagtcagaagctactaaaatttctcaataagcattacaacctggagaccacagtccctcaggtgaataacttcgtcatttttgaggggtttttcgcacatcaacaccgtcccccagcccccagtctccgcgccaccaggcactccagggctgccgccgtggatcctacccccgccgctccagctcgcaagttgcctcctaagcgcgcggagggtgacattaaaccttactcttctagcgaccgagaatttctgaaggtggcagtggagccaccatggccgctgaacagagccccacgccgggctaccccacctgctcacccacctccgcggtcatcgagtctagggaactctcccgagcgcggccccctgcggcctttcgtccctgagcaggagctgctgcgtagcctcagattatgtcctcctcaccctacagctcggctcttgctcgcagcagatcccggaggctcaccggcacagcggcgtagaaccagaggcacgcctcccggactcgtagcgcaaagctgctgctactcaaggcacggcggcgtcaactcctcctctccaaataccggcaaccaagacagcaaacaaggcgagcaggaaaccaaaaatcgcagcgccagcgaggagcaagccctgtcccaggatggatctggcgagaagccaatgcacacagcccctccacaggcccctgcgccaccggcgcagagctggaccgtgggaggcgatatcttaaacgcccgcttcatccgaaacctgcaggagcgacggtcaacacgcccctggtag

SEQ ID NO: 269461 - DNA, 1197 bp, Artificial Sequence
  derived and/or modified sequence
atggaattcccctttgatgtcgacgcgctgttccccgaaaggattaccgtcctggaccagcatctgagacctcctgcccgccgaccaggcaccactactccggccagggtggatctccagcaacagattatgaccattatagacgagctcggaaaagccagtgcaaaagcccaaaatctgtcagcgccaatcacaagcgcctccaggatgcagagcaatagacatgtggtctacatcctaaaagactcctctgccaggccggccggaaaaggggcgatcattggcttcatcaaggtggggtataagaaactatttgtgctggacgaccgtgaggctcacaacgaagtcgaacctctgtgcatcttggacttttacatccacgagtccgtacagcggcacgggcatggtagggagctttttcaatatatgctgcagaaggagcgagtggagccccaccagctggcaatagatcgtccaagccagaagctgttgaaatttcttaataagcactataatctggagacaacagtaccccaggtgaacaacttcgtcatttttgaaggtttctttgcccaccagcatccaccggccaggaaacttccccccaaaagagcagaaggagatataaaaccttactcctccagtgatcgcgaattcctgaaggtagccgtggagcctccgtggccactgaatcgcgcacctcggcgggctaccccgccagcacaccctccgcctcgaagctcctctctgggcaattccccagaacgcggtccactgcggcctttcgtgcccgagcaagaacttctccgcagtttgaggctttgccctccacaccccacagctaggttgctgctcgccgctgatcccggaggcagccctgctcagaggcgcagaacaagaggaaccccccctggattagtggcccagagctgttgttatagccgtcacggaggagtgaatagttcctctcccaacaccgggaatcaggacagcaagcagggtgaacaggaaactaaaaatcgctccgcgtccgaagagcaagctttgtcccaggatggctcaggggagaaacctatgcacaccgcacccccacaggcccctgctccaccagctcagtcgtggacagtcggtggtgatatcctgaatgctaggtttatccggaacctgcaggaaaggaggtcaacacgaccttggtag

SEQ ID NO: 269462 - DNA, 1197 bp, Artificial Sequence
  derived and/or modified sequence
atggagttccctttcgacgtcgacgcccttttccccgagaggatcaccgtgctggaccagcatctcaggccgcctgctcggagacccggcacgactacgcccgctagagtggatctccaacaacaaatcatgacaatcatcgacgagctcggaaaggcctccgccaaagcacagaacctctccgcgcccattacaagcgcttcccggatgcaatcaaacagacatgtcgtatacatactcaaggattccagtgctcgccccgccggaaagggtgccattattgggttcatcaaagtgggatacaagaaactgttcgtgctggatgatcgcgaagctcacaacgaggttgaacccttgtgtattctggatttttatatccacgagagcgtccagcgacacggacacggacgagagctgttccagtacatgctccagaaggaacgagtggagcctcatcaactggctatcgatcggccatcacagaagttgctcaaatttctgaacaagcattacaatctggaaaccactgtgccacaggtgaacaatttcgtgatctttgaaggattttttgctcaccagcacccccctgcacgcaagctcccccctaaacgtgccgagggtgacattaagccctacagctccagcgaccgcgagtttctgaaagtggcagtcgagcccccttggcctctcaaccgagcccctcgccgtgctacacctcctgctcatccgccacccagatcttcctcgcttgggaactcaccggaaaggggccccctccggccattcgttcctgaacaggaattactgcggtctctgagattgtgtccgccacaccccaccgcacgcctcctccttgccgctgatccagggggcagcccggcgcagaggcgcagaacaagaggtacacctcccggtttggtggcacagtcctgttgttattctaggcacggtggggtgaattctagcagccccaataccgggaatcaagatagcaagcagggcgagcaggaaactaagaacaggagtgccagcgaggaacaagctctgagccaagatggctcaggcgaaaagcccatgcacacggctcctccccaggccccagctcccccagctcagtcgtggaccgttggaggcgatatactgaatgcaaggttcatcagaaatcttcaggagaggcgctccacccggccttggtag

SEQ ID NO: 269463 - DNA, 1197 bp, Artificial Sequence
  derived and/or modified sequence
atggagttcccctttgatgtagacgcattattcccggagcggattacagtgttagatcaacacttaagacctccagcgcgcagaccagggactacaaccccagcacgagtggacctgcagcagcaaatcatgacgataatcgacgaactgggcaaagcctcggccaaggcacagaatctgagcgcaccaatcaccagcgcctctcggatgcaatctaaccgacacgtagtctacattctgaaggattctagcgcacgccctgctggcaagggcgccatcatcgggttcataaaagtgggctataagaaactgtttgtgctggacgaccgggaggcacataacgaggtggagccactctgtatcctggatttctacattcatgagtctgttcagcgccatggccatgggcgcgagctgttccaatatatgctgcaaaaggagcgggtggaaccacatcagttggcaatcgatcgcccgtcgcagaagctgctgaaattccttaataagcattataatttagaaaccacagtgccccaggtcaacaatttcgtcattttcgagggattcttcgctcatcaacatcctcctgctcggaaactgcctcccaagagagccgaaggcgacataaaaccatactcctcttccgatcgggagttcttaaaggtggctgtcgaaccgccttggcccctgaatagagcccctaggagagccactcccccagcacacccaccaccgcgaagctcatccctcggtaactcccccgagaggggcccactgcgccctttcgtgcccgagcaggagctgctcaggtcactgaggctgtgtccaccccatcctactgccaggcttctgctggccgccgaccctgggggatccccggctcagagacgacgaacacgaggaactcctcccggcctggtcgcacaaagctgttgctacagcagacacgggggcgtcaattcatcttcccctaatacaggaaatcaggacagcaagcaaggtgagcaggagacaaagaaccggagcgcctcagaagaacaggcattgtcacaggacggatctggtgagaagccgatgcacactgcacctcctcaggcccccgcacctcccgcgcagtcttggaccgtgggaggggatatactgaatgcaaggtttatacgtaacctgcaagagaggcggagcactagaccatggtag

SEQ ID NO: 269464 - DNA, 1197 bp, Artificial Sequence
  derived and/or modified sequence
atggagttcccatttgatgttgacgctctcttccctgaacgcatcaccgtcctggaccagcatctccgtccccccgctcggcggccggggacaactactcctgctagggtggatttgcaacagcagataatgaccattatagacgagctcggcaaagcctctgccaaggcccagaatttaagcgctcccatcacctcggcatcacggatgcaatcgaataggcacgtcgtctatatcttgaaggacagctctgcgagaccagctggcaaaggtgctattattggattcatcaaggttggatataagaagttgttcgtgcttgatgatcgcgaggcacataacgaagtcgaacccctgtgcattctagacttctatatccatgaaagtgtgcaacggcatggccatggtagggagctttttcaatacatgctacagaaagagcgcgttgaacctcaccagcttgctatcgatcggccctcacaaaagctgcttaaattccttaataaacattataacctggagactaccgtgcctcaggttaataacttcgtgatctttgagggatttttcgcccatcaacacccaccagccaggaagctccctcccaaacgagccgaaggcgacatcaagccatattcctcaagtgatagggagtttttaaaggtagcagtggaacccccctggccactgaatcgcgccccccggagggccaccccaccagcacatccccctccaaggagcagcagcctcggcaacagccccgaaagaggacccttgaggcccttcgtgccagagcaggagctgctccgctctctgagattatgcccacctcacccaacagccagactactgcttgccgccgatcctggcggaagccctgcacagagaaggcgtaccagaggaaccccccccggactggtggcccagtcttgctgctattctaggcatgggggtgtgaacagttccagcccaaatactgggaatcaggatagcaaacagggcgagcaggaaacaaagaataggagcgccagcgaggagcaagctctgtcccaggatggtagcggtgaaaagcccatgcatactgctcccccccaggctcccgctccacctgctcagagctggacagtgggcggggatatcctcaacgcacgctttatcagaaatcttcaagagcggcgcagcacccgaccctggtag

SEQ ID NO: 269465 - DNA, 1197 bp, Artificial Sequence
  derived and/or modified sequence
atggagttcccgttcgatgtggatgcgcttttcccagaacgcataaccgtccttgaccagcatctgcgtcctcctgcccggagaccaggtaccacaacaccggccagggttgacctgcaacagcagatcatgacaatcatagacgagctggggaaagcctcggccaaggcacagaatctctctgctcctatcacatcagcatccaggatgcaaagtaatcggcacgttgtttacattcttaaggacagctcagctcgaccggctggcaaaggcgctatcatcgggtttataaaagttggctataaaaagttgtttgtgctcgatgacagagaggctcacaatgaagtcgagcccctgtgcattctggacttttatatacacgagtcggttcaacgacacggccatgggcgggaactgtttcagtatatgcttcagaaagaaagggtcgaacctcaccagctggcgatcgaccgcccctctcagaagctccttaaatttctcaacaaacactataaccttgaaacaacagtacctcaggtcaacaattttgttatattcgagggcttcttcgcccaccaacacccgcctgcccgcaaactgccaccaaaacgagccgagggggatattaagccatatagctcaagcgacagggaatttctgaaagtagctgtcgaaccaccctggccgctcaaccgcgctcctagaagagccacccccccggcccatccacccccgcggtcctcctccctcggcaattctcccgaacgaggacctctgcgccccttcgtccccgaacaagaacttctgagaagcctgcggctctgtcctccccaccctactgcgcgcctgctactggctgccgacccaggtggaagtcctgctcaacggagaaggactagaggtaccccacctggcttggtcgcacagagctgttgttacagcagacatggaggagttaacagcagcagtcctaatactgggaaccaggactctaaacagggtgagcaagagaccaaaaataggtctgcctctgaggagcaggctcttagtcaggacgggagtggagagaagcccatgcacactgcacctccacaggctccagccccccctgcccagtcctggactgtaggtggcgatatcctaaatgccaggttcatcaggaaccttcaagagagaagaagcacccgcccctggtag

SEQ ID NO: 269466 - DNA, 1197 bp, Artificial Sequence
  derived and/or modified sequence
atggaattcccgttcgacgtagatgcgctctttcccgagcgaatcaccgtgctcgatcagcacctgagaccccctgccaggagaccaggtaccaccacacctgctcgtgtggacctgcagcagcagattatgacaattatcgacgaactcggaaaagcgagtgcaaaagcccagaacttgtctgcccctattacaagcgcctcacgcatgcaaagcaaccgccacgtggtgtacattttgaaggattcctctgcacgacccgccggcaaaggagcgatcatagggttcataaaagtgggatacaagaagctgttcgtattagacgatagagaggcgcataatgaggtggagccactgtgtatacttgacttttatatccacgagtccgtccagaggcatggtcacgggagagaacttttccaatacatgctgcagaaggaacgagtcgaaccccaccagttggctatcgatagaccctcacaaaagttgttgaagttcctcaataaacattataatctggagactacagtccctcaggtgaacaacttcgtaatttttgaaggatttttcgctcaccagcatccccccgcgcgcaagctccctccgaagcgggccgagggtgatataaaaccttacagctcctcagacagggaatttttgaaagtagccgtagaaccgccgtggcctttaaatagggccccccggcgggccacacccccagcccacccacctccgaggagttcttcccttgggaattcacctgaacgcgggcccctccgaccattcgtgccggagcaggagctcctgagatccctgagactgtgccccccacatccgaccgcccggctcctgctcgcggcagacccgggggggtctccggcccaacgtaggaggacccgcggaacaccccccggtcttgtagcccagtcttgttgttattctcggcacgggggggtgaactctagttcacccaacaccggcaaccaggactccaaacagggcgaacaggaaaccaagaatcgcagcgcaagtgaggaacaagcgctgagccaggacggaagcggtgagaaacccatgcataccgccccccctcaggcgccggccccgccagcacagtcctggaccgtcggaggtgacatccttaacgccaggttcatccgcaatctgcaggagcgcaggagcacaaggccctggtag

SEQ ID NO: 269467 - DNA, 1197 bp, Artificial Sequence
  derived and/or modified sequence
atggagttcccctttgatgtggatgccctcttccctgagcgcatcaccgtgctggaccagcacctgcggcccccagcccggcggcccggcaccaccaccccagcccgggtggacctgcagcagcagatcatgaccatcattgatgagctgggcaaggccagcgccaaggcccagaacctgagcgcccccatcaccagcgccagcaggatgcagagcaacagacatgtggtgtacatcctgaaggacagcagcgcccggcctgctgggaagggggccatcatcggcttcatcaaggtgggctacaagaagctgtttgtgctggatgaccgggaggcccacaatgaggtggagcccctgtgcatcctggacttctacatccatgaatctgtgcagagacatggccacggccgggagctgttccagtacatgctgcagaaggagcgggtggagccccaccagctggccatcgaccggcccagccagaagctgctgaagttcctgaacaagcactacaacctggagaccaccgtgccccaggtgaacaactttgtgatctttgagggcttctttgcccaccagcaccccccagccaggaagctgccccccaagagagctgagggggacatcaagccctacagcagcagtgaccgggagttcctgaaggtggccgtggagcccccctggcccctgaacagagccccccggcgggccaccccaccagcccaccccccacccaggagcagcagcctgggcaacagccctgagcggggccccctgcggccctttgtgcctgagcaggagctgctgcggagcctgcggctgtgccccccccaccccacagcccggctgctgctggccgctgaccccggcggcagccctgcccagaggaggaggacccggggcaccccacctggcctggtggcccagagctgctgctacagccgccacggcggcgtgaacagcagcagccccaacacaggcaaccaggacagcaagcagggcgagcaggagaccaagaacagaagtgccagcgaggagcaggccctgagccaggacggcagcggggagaagcccatgcacacagccccaccccaggccccagcccccccagcccagagctggacagtgggcggggacatcctgaatgcccgcttcatccggaacctgcaggagcggcgcagcacccggccctggtag

SEQ ID NO: 269468 - DNA, 1266 bp, Artificial Sequence
  derived and/or modified sequence
atggagttcccctttgatgtggatgccctcttccctgagcgcatcaccgtgctggaccagcacctgcggcccccagcccggcggcccggcaccaccaccccagcccgggtggacctgcagcagcagatcatgaccatcattgatgagctgggcaaggccagcgccaaggcccagaacctgagcgcccccatcaccagcgccagcaggatgcagagcaacagacatgtggtgtacatcctgaaggacagcagcgcccggcctgctgggaagggggccatcatcggcttcatcaaggtgggctacaagaagctgtttgtgctggatgaccgggaggcccacaatgaggtggagcccctgtgcatcctggacttctacatccatgaatctgtgcagagacatggccacggccgggagctgttccagtacatgctgcagaaggagcgggtggagccccaccagctggccatcgaccggcccagccagaagctgctgaagttcctgaacaagcactacaacctggagaccaccgtgccccaggtgaacaactttgtgatctttgagggcttctttgcccaccagcaccggcccccagcccccagcctgcgggccaccaggcacagcagagctgctgctgtggaccccaccccagctgccccagccaggaagctgccccccaagagagctgagggggacatcaagccctacagcagcagtgaccgggagttcctgaaggtggccgtggagcccccctggcccctgaacagagccccccggcgggccaccccaccagcccaccccccacccaggagcagcagcctgggcaacagccctgagcggggccccctgcggccctttgtgcctgagcaggagctgctgcggagcctgcggctgtgccccccccaccccacagcccggctgctgctggccgctgaccccggcggcagccctgcccagaggaggaggacccggggcaccccacctggcctggtggcccagagctgctgctacagcagacatggaggagtgaacagcagcagccccaacacaggcaaccaggacagcaagcagggcgagcaggagaccaagaacagaagtgccagcgaggagcaggccctgagccaggacggcagcggggagaagcccatgcacacagccccaccccaggccccagcccccccagcccagagctggacagtgggcggggacatcctgaatgcccgcttcatccggaacctgcaggagaggaggagcacccggccctggtag

SEQ ID NO: 269469 - DNA, 1197 bp, Artificial Sequence
  derived and/or modified sequence
atggagttccccttcgacgtggacgccctgttccccgagcggatcaccgtactagatcagcacctccgaccccccgcgcgcagacctggaaccactactccagctagagtggatctgcaacagcagataatgaccatcattgacgaacttggcaaggcatctgcaaaggcacaaaatctgtcagcccccattacctctgcttctcgaatgcagtcaaaccgtcacgtggtgtatattttgaaggacagctccgctcgccccgcaggtaaaggcgcgatcatcggcttcattaaggtgggttacaaaaaactcttcgtgttagacgaccgagaggctcataacgaggttgagcccttgtgcatcctggacttctacattcatgagtctgtgcaaagacacggccatggacgtgagctgttccagtacatgctgcagaaagagcgggtggagcctcaccagctggctatcgaccgcccctcccagaagctcctcaagtttcttaataaacactataacttagaaaccactgtgccccaggtgaacaactttgtgatatttgaaggattcttcgctcatcagcatccccccgcgcgcaagttaccacctaagcgcgctgagggagatatcaagccctatagcagttccgatcgagaatttctgaaggtcgccgtggagcctccctggccgctgaatagagcgccaaggagagccactccgcccgctcaccccccacctaggagctctagcctgggaaattcacccgaacgtggtcccttgcggcctttcgtgcctgaacaggagttactgcggtcactgagattgtgcccaccccaccccaccgcgaggctcctactcgcagcagatcccggcggatcacccgcacagaggcgacgcacgcgaggcacaccccctggcctcgttgctcagagctgctgctacagtcgtcatggtggagttaattcttcctctccaaatacaggaaatcaggatagcaaacagggagagcaggaaaccaaaaacagatccgcctccgaggaacaagccctctcccaagacggatccggggagaagcccatgcacaccgcaccgccccaggctcctgctccgcccgcccaaagctggaccgtgggtggcgatatccttaatgccaggtttataagaaacctgcaggaaagacggtctacacgcccgtggtag

SEQ ID NO: 269470 - DNA, 1266 bp, Artificial Sequence
  derived and/or modified sequence
atggagttccccttcgacgtggacgccctgttccccgagcggatcactgtgttggatcagcacctgcgcccgccagcacgccgacctggaaccacaaccccagccagggtggatttgcagcaacagataatgaccataatcgacgaattgggaaaagcctccgccaaggctcagaacctgagcgcaccaatcactagcgcctcaaggatgcagtctaacaggcacgtcgtgtatatactaaaagactcttctgccagacctgcaggaaaaggtgcaataataggtttcataaaagtgggatacaagaaactgttcgtcttggacgatcgtgaggcccataacgaggtggagccgctgtgcatcctggatttctatattcacgagagtgtccagcgacatggccatgggagggaattgttccagtatatgctgcaaaaagagagggtagagccacatcagctcgccatcgatagaccctcccaaaagctgctgaaatttctcaacaaacactataacctggaaactaccgtcccgcaggtgaataacttcgttatttttgaaggctttttcgctcatcagcaccgacctcccgcaccgagcctgagggcaactcgtcattctagagctgctgccgtcgatccaacacctgcagcccccgctcggaagcttcctcccaagcgcgctgagggagatatcaagccatacagctcaagtgatcgcgagttccttaaggtagctgtggagcctccctggcccctgaaccgcgccccccgcagggccaccccacccgcacatcccccccccaggtccagctcattgggaaattcgcctgaacggggacctctgcgaccttttgttccagagcaggaacttctgcgcagcctccggctctgcccgccccaccctaccgccaggctcctcttggcggcagatccaggtggttcccctgcacagcgcaggcgaactcgtggcacccctcctggtcttgtcgcgcagtcctgttgttattcaagacatgggggcgttaactctagcagccccaataccgggaaccaggactcaaaacagggcgagcaggaaaccaagaaccggtctgcttctgaagagcaggcactgtcccaggacggctctggggaaaagccaatgcatactgctcctcctcaggcccctgcaccgccagctcagtcatggacagtaggtggtgacatcttgaatgctaggttcattagaaacttacaggagcgtaggtcaacacgaccgtggtag

SEQ ID NO: 269471 - DNA, 1266 bp, Artificial Sequence
  derived and/or modified sequence
atggagttccccttcgacgtggacgccctgttccccgagcggatcaccgtcttggatcagcacttgcggccaccagctaggcgcccggggacgactaccccagcacgggtcgatctgcaacagcaaatcatgaccattattgatgagttaggaaaggctagcgcaaaagctcaaaacctgtctgcaccgatcaccagcgcatcaagaatgcagagtaacagacatgtagtttacatcctaaaggactccagcgcccgtcccgccgggaagggggctataatcggatttatcaaggtcggatacaagaaactgtttgtgctggatgatagggaagcacacaacgaagtggagccactgtgtatcttagacttctacatccatgaatcagtgcagaggcacggacatggcagagaactcttccaatatatgttacaaaaagaacgagtggaaccgcaccaactggctattgaccgaccttcgcagaaacttttaaaattcctcaataaacactacaatctggagacaacagtccctcaggtgaacaacttcgtaatctttgaagggttttttgctcaccagcatcgtccccctgcacccagtctgcgagcaactcgccattctcgggctgccgccgtggatccaactcctgctgcccctgccagaaaactgcctccgaagcgagccgaaggggatattaagccatactccagcagtgaccgggaatttctgaaagtggccgtggaaccgccctggcccctcaatcgggcccccagacgggccacccctccagcccatccaccacctagatctagctcgcttggcaatagccctgagcgggggccacttcgtccattcgtgcctgagcaggagctgttacggtccctccgcttgtgtcccccacatccaacagcgcgcctgctcctggctgcggaccccggaggctcaccagctcagaggaggagaactcgaggcacacctcctggcctggtcgcacagtcgtgctgttatagcaggcacggcggtgtcaatagcagctctccgaacacaggtaaccaggactctaaacagggtgagcaggagacaaaaaatagatcagcctcagaggaacaggcactcagccaggatggctccggggaaaaaccaatgcatactgctccaccgcaggctccagctccaccagcccagagttggacagtcgggggagacatactgaatgctcgcttcattagaaaccttcaagaaagaagaagcaccaggccgtggtag

SEQ ID NO: 269472 - DNA, 1266 bp, Artificial Sequence
  derived and/or modified sequence
atggagttccccttcgacgtggacgccctgttccccgagcggatcaccgtgttggaccaacatttgagacccccagctaggagacccggaacaacaaccccagccagagtggatttacagcagcaaattatgactataatcgacgaattagggaaagcctcagccaaagctcagaacttgtccgcccccattacgagtgcatccagaatgcagtctaatagacatgttgtgtacattcttaaggattcctccgcccggcccgccggcaagggcgcaattatcggttttattaaagtaggatacaagaaactgttcgtgcttgacgatagagaagcccacaacgaagttgagccactgtgcattctcgacttttatattcacgagagcgtgcagcggcacgggcatgggcgggagctcttccagtacatgcttcagaaggaacgggttgaacctcaccagttagctattgatagaccaagccagaagctactgaaattcctgaacaagcactataatcttgagacgacagtaccccaggtaaacaactttgtgatattcgagggctttttcgcccaccagcaccggccaccagcaccatccctccgggccacacggcactctcgagcagccgcagtggaccctacccccgccgccccagctaggaaacttccgcctaaacgggccgaaggtgacatcaaaccctactcttcatctgatcgcgaatttttaaaagtcgccgttgagccgccatggcccttgaacagagccccaagacgggcgacacccccagcgcacccgccaccacgcagctcctccttgggaaactctcctgagcgaggaccactccgacctttcgtgcccgagcaagagctcctgaggtctctgcgactttgccctccccaccctaccgcacggctgcttcttgcagcagaccccggggggtctcccgcccagcggaggcgtacgagagggaccccacccggattagtcgctcagtcatgttgctacagcagacacggaggagtgaacagttcctcaccgaacaccggcaaccaggactctaagcaaggcgagcaggaaacaaagaatcggtctgcgagcgaagagcaggctttgtcccaggatgggagtggggaaaaaccaatgcacaccgcccccccacaggcgcctgccccgccagcccaatcttggactgtaggaggcgacatcctcaacgccaggttcatcaggaatcttcaggagagacgctccacaagaccttggtag

SEQ ID NO: 269473 - DNA, 1266 bp, Artificial Sequence
  derived and/or modified sequence
atggagttccccttcgacgtggacgccctgttccccgagcggatcaccgtgcttgaccagcacctgcgaccacccgccagaagacctgggaccaccacccccgccagggtggacttacagcaacagatcatgacaataatagacgagctgggtaaagctagcgcgaaagcccagaatctgtccgcaccaatcacgagtgcttctaggatgcagagcaacaggcacgtagtgtacatcctgaaggattcttcagcacgtccagccggcaaaggagccattatcggattcattaaagtcggatataagaaactgtttgtacttgacgaccgggaggcccacaacgaggttgagcctctgtgcatactcgacttttatatccacgagtctgtacagcgtcacggacacggaagagaactgttccagtacatgctccaaaaagaaagagttgagcctcaccaattggctatcgacagaccgagtcaaaagctcctgaagttcctgaataagcactataacctcgagactaccgtgccccaggtgaataacttcgttatttttgagggatttttcgcacaccaacatcgtcctccagctccttcactgcgggccacccggcacagtcgggctgctgccgtcgatcctactcccgctgcgccagctcgtaagctgccacccaagcgcgctgaaggagacatcaagccatattcgtccagtgatagagagttcctgaaagtagcggtggagcccccctggccactgaaccgggcccctaggagagcaaccccaccggctcatcccccaccccggagtagcagcctcggaaatagccccgaaagagggcccttaagaccattcgtgccggaacaggagttgctgcgcagtttgcgcctctgcccccctcaccctaccgctcgcctgcttcttgctgcagaccccggcgggtctcctgctcagaggcggcgcaccaggggtacgcccccaggtctcgttgcacagtcttgttgctattctagacacggcggggtgaacagttccagcccaaacactggcaaccaagatagtaagcaaggagaacaagagaccaaaaaccgaagcgccagtgaggaacaggctctgtcccaagacggatcaggagagaaacctatgcacacggcccctccccaagcgccggcccctcccgctcagagttggacagtggggggtgacatcctgaatgccaggttcatccgcaacctgcaggaacggaggtctaccagaccatggtag

SEQ ID NO: 269474 - DNA, 1266 bp, Artificial Sequence
  derived and/or modified sequence
atggagttccccttcgacgtggacgccctgttccccgagcggatcacggtgttggatcagcacctgcgcccgcctgcacgacgaccgggtactacaaccccggccagggttgacctgcagcagcagatcatgacaattattgatgaacttggaaaggcttctgccaaggcccagaatctgtccgccccaatcaccagtgcttccagaatgcagagtaaccgccatgttgtctatattcttaaggacagctctgcccgccctgcaggaaagggggccatcatcgggttcatcaaggtgggttacaagaagctgtttgtcctggacgatcgtgaggcccacaatgaagtagaacctttatgcatactcgacttctatatccatgagtcagttcaaagacatgggcacggtagggagttgttccagtacatgttacagaaggagcgggtggagcctcatcaattagcaatcgaccggccctctcagaaactgctgaaatttctgaataaacattacaatcttgagacaactgtaccacaggttaataatttcgtcatttttgaaggcttcttcgcacaccagcaccgtcctcccgccccttctctgcgggccaccagacattctagggctgctgcggtggatcctacgccagccgcacctgcacgaaagcttccaccgaagagggccgagggggatattaagccttactcgtccagtgacagggaattcctgaaggtggcggtggaaccgccgtggccattgaatagggcccctcgccgagccacaccaccggctcacccccctccgaggagctcaagtctggggaatagccccgaacgcggccccttgcgacctttcgtccctgaacaggaactgctaaggagtttaaggctctgccctccacatcctacggctcggttgttgctcgctgctgatcctggggggagccctgcgcagcgacgccggacacgaggcaccccaccgggactggttgcgcagagttgttgctacagtaggcacggaggagtaaacagctcttctccaaacacagggaaccaagactctaaacagggcgagcaggaaactaaaaataggagcgcttctgaggaacaggcgttgagccaggacggatccggggagaagcctatgcatacagctccgccgcaggctccagccccgcccgcacagagctggaccgtgggcggggatatcctgaacgcccggtttataagaaatctccaggaacgaagatccacacgtccatggtag

SEQ ID NO: 269475 - DNA, 1266 bp, Artificial Sequence
  derived and/or modified sequence
atggagttccccttcgacgtggacgccctgttccccgagcggatcacggtccttgaccagcatctccgtcccccagcacggcgacctgggacaacaacacccgctcgtgtggacttacaacaacagattatgacgatcatcgatgagttgggtaaagccagcgccaaagcacagaacctgagtgccccgattactagtgcctccagaatgcagagtaacaggcatgtcgtttatatcttaaaagattcatcagcccgaccggccggcaagggcgccatcatcggcttcatcaaagtagggtacaaaaagctgtttgtgctcgacgacagagaagcccataacgaggtggaaccactgtgtatactggatttttacattcatgaaagcgttcagaggcacggccacgggcgcgagctgtttcagtatatgcttcaaaaggagcgcgtagaacctcatcaattggcgattgatcggccatctcagaaactcctaaagtttcttaacaaacactataatcttgaaactacagttcctcaggtgaacaatttcgtgatctttgaaggcttcttcgcgcaccagcacaggccgcctgccccatccctcagggcaacccgtcattctagggccgcagccgtggatcctacacctgccgcccccgcccggaagctgcccccaaagcgggctgagggggatataaaaccctattcttcttctgatcgcgaatttttaaaagtcgcggtggaaccaccctggcctctgaaccgcgctccgagacgcgccacccccccagcccatccaccccctcgctcttccagcctgggtaacagccccgaacgcgggcccctgcgaccatttgtgcctgagcaggagctgctccgatcattaaggttatgtccaccacatcccacggcacgactcctgttagccgctgatcccggaggaagccccgcgcagcgtagacggaccagggggacccctcccggtctcgtcgcccaaagctgttgctactcaagacacggaggcgtgaactctagttcgccgaataccgggaatcaggacagcaaacagggcgaacaggagaccaagaaccgttcagcatctgaggagcaggccctgtcccaggacggcagtggcgaaaaacccatgcataccgcaccccctcaagcacctgcccctccggctcagagctggacagttggaggggatattctgaacgccaggttcatcaggaatttgcaggaacggagatctacacgaccttggtag

SEQ ID NO: 269476 - DNA, 1266 bp, Artificial Sequence
  derived and/or modified sequence
atggagttccccttcgacgtggacgccctgttccccgagcggatcacagtgctggaccagcacctacgcccaccagccaggcggccaggcaccacgacccccgcgcgggtcgatctgcagcagcagatcatgacgatcattgacgaactggggaaggcatccgcaaaggcccagaacttgtctgcacccataacctctgcttcaagaatgcagtctaataggcacgtcgtctatattctgaaggacagtagtgctcgacccgccggcaagggggcaattataggatttattaaggtcggctataaaaagctgttcgttctggacgacagagaggcacacaacgaagtcgagcccctgtgcatcctggacttctacatacatgaatctgttcagcggcacggacacggacgtgaactatttcagtacatgctgcaaaaagagcgggtggaaccccaccagctggcaatcgatcgacccagtcaaaagctgctcaagttcctgaataagcattacaatttagaaactacagtgccccaggtgaataattttgtcatcttcgaggggtttttcgcccatcagcatcgaccgcccgctccctcgctacgagccaccagacactcccgagctgccgcagtcgaccctactccagccgcccccgcacgaaaactgcctcccaaaagggcagagggtgatattaagccatattccagctccgacagggaatttctcaaagtcgcagtggaacctccctggcccttaaatcgggcccctaggcgggcgacccccccagcccatccacccccgagatccagctcactcggcaactcacctgaaagagggccactccggccttttgtccctgagcaagagttgttgagatccctgcgcctgtgccccccacacccgaccgcaagactgctgctggcggctgaccccgggggcagtcccgcccagcggcgtcggactcgcggaactccccctggattagtggctcaatcctgctgttactcacgacacggcggcgtgaactcttcttcgcctaacactggtaaccaagactccaagcagggggagcaggagaccaaaaaccgttccgctagcgaggagcaggctctttcacaagacggttctggcgagaagcccatgcacactgctccacctcaagcccctgctcccccggctcaatcgtggaccgtaggaggagacattctgaatgcgcgattcatcaggaacctgcaagaaagacggtctacgcgtccttggtag

SEQ ID NO: 269477 - DNA, 1197 bp, Artificial Sequence
  derived and/or modified sequence
atggagttccccttcgacgtggacgccctgttccccgagcggatcactgtcttggaccagcatctgaggccacccgctcgaaggcctgggaccaccactcctgcaagggtggacctgcagcagcagattatgacaatcattgacgagctggggaaggcatccgccaaagcccagaatctttccgcacctattaccagcgcttcaagaatgcaatccaaccgacacgtggtgtatatactgaaggattcctcggctcgccccgccggcaaaggcgccattattggctttataaaagtgggctataagaagctctttgtgctggacgatcgggaagctcataatgaggtcgagccactttgcatactagacttctatatccatgaaagcgttcagaggcacgggcacggccgggagttgtttcagtatatgttgcagaaagaacgggttgagccccaccagcttgcgatcgatcgtccgagccagaagttgctcaaatttttgaacaaacactataatttggaaacaacagtcccccaagtcaataatttcgtcatctttgagggtttttttgcccaccagcatcctcccgcgagaaaactaccccccaaaagggcagagggcgacatcaagccctactcaagctctgaccgggagttcctgaaggtggcagtcgaacccccatggccgctcaatcgtgcacccaggcgagctaccccacccgcccaccctccgccaaggagttccagtctcggaaattcccccgagcggggacctctacgtcctttcgtgcctgaacaagaactgcttcggtctctgagactctgccccccgcatccaactgctcggcttcttctggccgcggaccccgggggatctccagcccagaggaggcggacgcgcgggacgcccccggggttggttgctcagtcatgttgttacagtagacacggcggagtcaacagcagttctcctaatactgggaatcaggacagcaaacagggagagcaggagactaagaaccggtccgccagcgaggagcaggctctgtcacaggatggctcaggggagaaacctatgcatacagccccgccacaggcgcctgcccctccagcacagtcctggacggttggcggtgacattctcaacgcccggttcatcaggaacttgcaggagcggcgctcaaccaggccctggtag

SEQ ID NO: 269478 - DNA, 1197 bp, Artificial Sequence
  derived and/or modified sequence
atggagttccccttcgacgtggacgccctgttccccgagcggatcacggtgcttgatcagcacttacgcccccccgcccggagacctggtactacgactcccgctcgcgttgacctgcagcaacaaataatgacgattattgacgagttggggaaggccagtgcgaaagcgcagaatctttcagccccaattactagcgcttctaggatgcagtccaaccggcacgtggtgtatatccttaaagatagcagtgcaaggcctgctggcaagggggcaatcatcggatttatcaaggtggggtataaaaaactttttgtactggacgaccgggaagcccacaacgaagtggaacctttgtgcattctagatttttatatacacgagtctgttcagagacatggacatggaagggaactctttcaatacatgctccagaaagagagagtagagccccaccaactggctatcgacaggcctagtcagaaattgctgaagtttctcaacaaacactataatctggagacaactgtccctcaagtaaataatttcgttatcttcgagggcttcttcgcccaccagcacccccccgcccggaagctccctcctaagagagcggagggcgacataaagccatattccagtagtgaccgggagttcttgaaagtcgctgtggagccgccatggcccttgaatcgtgctccccgccgtgcaacacctccagcacacccacccccacgaagttcatccctggggaactcaccagagcggggccccctgagaccattcgtgccagaacaggaattacttcggtctctccggctgtgtcccccacacccaacagcacgactgctccttgcagccgacccaggtggatctcctgctcaacgaagaaggactcgaggcactcccccgggactggtagcccagtcttgttgttactcacgtcacgggggagtgaactcctcatctccaaataccggcaatcaggacagcaaacaaggggaacaggagacaaagaacagatcagctagtgaagagcaggcgctgtcccaggatgggtctggggaaaagcccatgcataccgcccctccgcaagctccagccccgcctgctcagtcctggaccgtgggcggcgacatactgaatgcaaggttcattcggaatttacaggagaggaggtccaccagaccttggtag

SEQ ID NO: 269479 - DNA, 1197 bp, Artificial Sequence
  derived and/or modified sequence
atggagttccccttcgacgtggacgccctgttccccgagcggatcacagtgcttgatcaacacctacgcccacctgcgagacgccccgggacaactacaccggcacgtgtcgatctgcagcaacagatcatgaccataattgacgagctgggaaaagcctccgccaaagctcagaacctttctgcacctattactagcgcctcgaggatgcagtcaaataggcacgtggtctatatcctcaaagatagctctgccaggcctgccgggaagggggcgatcataggcttcatcaaagtcggatataaaaagctttttgtgctggatgatcgagaggcccataatgaggtggaacctttgtgtatcctggatttctacattcatgagtccgtacagcgtcacggccatggccgggaattgttccagtatatgttgcagaaagaaagagtggaacctcatcaacttgccattgatcggccaagccagaaactccttaagtttcttaataaacactataacctggaaacaaccgtcccccaggtcaataacttcgtgatttttgagggctttttcgcccatcagcatccgccggcccgcaaattaccacctaaaagagcagagggcgatatcaaaccctattcttcctcagaccgggagtttctgaaagtggccgttgagcccccatggcctcttaatcgcgccccaaggagagcaacccctcccgcacacccaccccccagatcttcctccttggggaattctccagaacgagggcccctgcggcctttcgtcccagagcaggagctgctccggagcttacggctctgtccacctcatcccacggcgagactccttctcgccgcggatccaggggggtcaccggcgcagcgaaggaggaccagaggaaccccacctgggcttgtcgcacagagctgttgctatagcaggcacggcggtgtgaactcatcatcccccaataccggtaaccaggacagcaagcagggagaacaggagaccaaaaacaggtcagcttccgaggagcaggcactttcccaggatggatccggcgagaaaccaatgcatacagcccctccgcaggcacccgcacccccagcccagtcttggacagtcggtggggacattctcaacgccaggttcatcagaaatcttcaggagagaaggagtaccaggccgtggtag

SEQ ID NO: 269480 - DNA, 1197 bp, Artificial Sequence
  derived and/or modified sequence
atggagttccccttcgacgtggacgccctgttccccgagcggatcactgtgctcgatcagcatcttcggccacctgcccggagacccgggacaaccacccctgcacgagttgacctccaacagcagattatgactatcatcgatgaactcggaaaagcctctgcaaaagcacagaacttatctgcacctataacgagcgcatctcgtatgcagtcaaatagacacgtcgtgtacatactgaaggactctagcgccagacctgcagggaagggggcaatcatcggctttattaaggtagggtataagaaattgttcgttcttgatgaccgcgaagctcacaacgaagtggagcccctatgcatcctggatttctacatccatgagtccgttcagagacatggccatggccgtgagctatttcagtatatgcttcaaaaagagagggtggagcctcaccagctggccatcgaccgtcctagccagaaactgctgaagtttctcaataaacattacaatctcgagacgacggtgccacaggtgaacaactttgtgatttttgagggatttttcgcgcaccagcatccacccgcgagaaaactacctcctaaacgcgcggagggagacattaagccatactcctcttccgaccgcgagtttcttaaggtcgccgtcgaaccaccctggcccctgaaccgcgcccctagaagggccactccaccagcacatcccccaccacgctcttcttcgctgggcaattcccccgaacgtgggccactgcgccccttcgtgcccgagcaggagctgctgagaagcttgcggctttgccctccccatcccactgcccgcttgctgttggccgccgaccccggtgggagcccggctcagagaaggcgaactagaggtacgccacccggtttggtcgcccaaagctgttgttattcgcggcatggcggcgtaaatagtagctccccaaacactggtaatcaggactcaaagcagggggagcaggaaactaaaaataggagcgcgtccgaggaacaggcgctcagccaggacgggtctggcgaaaaacccatgcatacagcccccccccaggcccctgcgcctcctgcccagagctggactgttgggggagacatcttgaacgcgcggttcatacgaaacttgcaagagcgccgatccacaaggccctggtag

SEQ ID NO: 269481 - DNA, 1197 bp, Artificial Sequence
  derived and/or modified sequence
atggagttccccttcgacgtggacgccctgttccccgagcggatcactgttctggaccagcatctcagaccccctgctcgaaggcccggaacaaccacccccgccagggtggacctgcagcagcagatcatgaccattatagatgagcttgggaaagcatctgcgaaggcccagaacttgtctgcccctattacttcagcaagccggatgcagtctaaccgccacgtcgtgtacatccttaaagatagctctgccagacccgccggcaagggagccattattggcttcatcaaggtggggtacaaaaagctattcgtgttggacgatagggaagcgcataatgaggtggaacccctgtgcatcctggacttttatattcatgagagcgtacaaagacacgggcatggcagggagctgtttcagtacatgttgcagaaagagcgagtcgaacctcaccagctggctattgaccgtccctctcagaaattgttgaagttcctgaataagcattacaatctggagacaactgttccacaggtgaacaattttgtgattttcgaaggcttcttcgctcaccagcaccctcctgcgcgaaaattaccacccaaaagagcagaaggggatatcaaaccttattcatcctcggacagagagtttctgaaggtagcagtcgaaccaccttggccgcttaaccgagctccccggcgcgccaccccgcccgcccaccccccaccccggagctcatccctcgggaatagcccagagcgtggcccacttagacctttcgtgccagagcaggagctcttgagaagtctgaggctgtgccccccccaccctacagcccgtttgctgctcgccgctgatcctggcggatctcctgcccaaaggaggaggaccagaggtacacccccaggtctagtcgcacaaagttgctgttactcccgccatgggggtgtgaactcctccagtcccaacaccggcaaccaggatagtaagcaaggagagcaggagaccaaaaaccgttccgcctcagaagagcaagcactgtcccaggacgggtctggcgaaaagcccatgcacaccgcgcccccacaggctcccgcacctcctgcccagagttggaccgtaggcggcgacatattaaacgctcgtttcatccgaaacctccaggaaaggcgttccacccgaccctggtag

SEQ ID NO: 269482 - DNA, 1197 bp, Artificial Sequence
  derived and/or modified sequence
atggagttccccttcgacgtggacgccctgttccccgagcggatcacagttctggaccagcatttgcgtcccccagccagaagaccagggactacaacgcctgcccgggtcgatctgcagcagcagatcatgaccatcattgacgaactgggcaaggcgtccgccaaagctcaaaatcttagcgccccgataaccagtgcttcaaggatgcagagcaacaggcatgtcgtgtacattctaaaagactcctcagcaagacccgcaggcaaaggcgctattatcggttttattaaggtcggctataaaaaattgttcgtgcttgatgatcgcgaggctcacaacgaggtggaacccctgtgcattctggatttttatatacatgaatccgtccagagacacgggcatggcagagagctctttcagtacatgttgcaaaaggagagagtcgagccccatcagttagccattgatcgtccatcccagaaactgctgaaatttctgaataaacactacaacttggagacaactgtgcctcaggtcaataattttgtaatttttgaaggattcttcgcccaccaacaccctccagctaggaaacttccaccaaagcgggccgaaggagacataaagccttacagctcttccgaccgcgagttcctgaaggtggccgttgagccaccttggccgcttaaccgggctcctagaagggcaacgccaccagctcacccccccccacgaagtagcagcctgggcaattctcccgagcgcgggcccctcagaccgttcgtcccggaacaggaactgctcagaagcctccggctatgccccccgcatccaaccgccaggcttctcctcgccgctgatcccggaggttcacctgctcaacgacgacggactcgcggtaccccacccggccttgtggcccagagctgctgctactcccgccatggaggcgtcaactcttccagccccaacaccggcaatcaagacagcaagcagggcgaacaggagacgaaaaatcgctcagccagcgaggagcaggctctgtcccaggacgggagcggtgagaagcccatgcacacggcccccccacaggcccccgccccgcctgctcagagttggacggtgggaggtgatatactgaatgctaggttcattagaaatctccaggaacgccgcagtacgcgaccatggtag

SEQ ID NO: 269483 - DNA, 1197 bp, Artificial Sequence
  derived and/or modified sequence
atggaattccccttcgatgttgacgccttgttcccagaaaggatcacagtgctcgatcagcacttgaggcctccagctcgccgtccaggaaccaccactcccgcacgcgtcgacctgcagcaacagatcatgaccatcatcgatgagctgggaaaggcaagcgcaaaggctcagaatctgagcgctccaatcacctcggcgtcccgcatgcaaagcaatcgacatgtggtatacatcctcaaagacagcagcgcgagacctgctggcaaaggtgcgattattgggtttattaaagtgggatataaaaaactgttcgtcctggacgatagagaagcacacaacgaggtggaacccctatgcattttagacttttatatacatgagtcagtgcagcggcatggccatggccgagaattgtttcagtacatgttgcaaaaagaacgcgttgaacctcatcaactggccatcgatcgcccttcgcagaagctgttgaagtttttgaataaacactataacctggagactactgttccccaagtgaacaactttgtgatctttgaagggttcttcgcgcaccaacaccccccagcgaggaaactaccccctaaaagggccgagggagatataaaaccctatagttcatcagacagagaatttctgaaagtcgccgttgagcctccatggcccttgaatcgagcaccacggcgtgctacacctccggcacatccacccccaaggtctagtagtctgggaaatagcccagagagaggacccctgagacctttcgttcctgagcaagaattgttgcgcagtctccgcctttgtcctccacatcctaccgccaggctgctgctggctgcagatccaggtggttctccagcccaaagaaggagaacaagagggaccccaccagggcttgtggcccagagttgctgctactcccggcatggaggggtcaattcttcctcccccaacaccggtaaccaggatagcaagcagggcgagcaagagaccaaaaataggtctgcctctgaagaacaagcactgtcccaagacgggtcaggcgaaaagcctatgcacacagctccaccacaagcccctgcccctccggctcaatcgtggacagttgggggagacatcctcaacgccagattcattaggaacctccaagaacggcgtagcacgcgcccttggtag

SEQ ID NO: 269484 - DNA, 1266 bp, Artificial Sequence
  derived and/or modified sequence
atggaatttccctttgatgtggatgctctgttcccagagagaattactgtgctggatcagcatctgcggccacccgctcgcaggccgggtacgacaacccccgcaagggtggaccttcagcagcagatcatgaccattattgacgagcttggtaaggcctctgccaaggctcaaaacttatcagctccgattacatctgccagccgaatgcagagcaacagacacgtggtgtacatcttgaaagactcaagcgccaggcccgctggaaaaggcgctattattggctttattaaagtgggctataaaaagctgtttgttctggatgatcgtgaggcccataatgaagtcgagcctttatgcatcttggacttttatatccacgagtccgtgcagcgccatgggcacgggcgtgagctttttcagtatatgttgcagaaagagcgggtagagcctcaccaactggcgatcgacaggccatcccagaaactgttaaagttcctcaataaacactacaacctggaaacaaccgtccctcaggtgaacaattttgtgatcttcgaaggctttttcgctcatcagcatcggcctccggcaccgagcctcagagccacgagacactctcgagcagctgccgtcgatcctacccctgccgcacctgctcggaaactgccccctaagcgagccgagggcgacatcaagccttacagctcctccgatcgcgaatttctgaaggtggcggttgagcccccttggccattgaacagagctccaaggcgcgctaccccacccgcacatcctccccctaggtcttcttcactcggtaattcccccgaaaggggacccttaaggccatttgtgccagagcaggaactactgcgctcgctgaggctgtgcccaccacatcccaccgcaaggctgctcctcgctgctgacccagggggatcccccgcacagcggagaaggactcgaggaacccctccgggtttggtggcacagtcctgttgttactctcgtcacgggggagttaacagcagtagccccaacactgggaatcaagatagtaaacagggcgagcaggaaaccaagaatcgatctgcttcagaggagcaggccctgtcccaggatggttcaggagagaaacccatgcacaccgcgccaccccaagcccctgcccctcccgctcagagctggactgttggcggagatatcctgaatgctcgattcatacgcaacctgcaggaaagacgaagcacaagaccatggtag

SEQ ID NO: 269485 - DNA, 1266 bp, Artificial Sequence
  derived and/or modified sequence
atggaattcccatttgatgtggacgctttgttccctgagagaatcaccgtgttggatcaacatctgaggccgcctgccagacgtccgggaaccacaacgccagccagagtggacctacagcagcagatcatgaccattattgatgaacttggcaaggcttcggccaaggcccaaaatctctcagcgcctatcacttcagcaagccggatgcaatctaacaggcacgtagtatacattttaaaagacagttccgcgcgaccagctgggaagggagcaatcatcgggtttattaaagttggatacaagaaactttttgtcttggacgaccgggaggcccataacgaggtggaaccattgtgtatactggatttttatatccacgagtctgtccagaggcatgggcatggcagagagctgttccagtacatgctgcagaaggaaagggttgagccacatcagttggctattgacagaccaagtcaaaagctgctcaaatttctcaataaacactataacttagagacaactgttccacaggtaaacaattttgtgatcttcgaggggtttttcgctcaccagcatcgccctccagcaccttcgctccgtgcgacacgccattctagggccgctgccgtagacccaacccctgcagcgcctgcacggaaactgcctccaaaacgggctgaaggagatattaagccttatagtagttccgatcgtgagtttttgaaagtagcagtcgagccaccctggccgcttaatagggcccctagaagggcaaccccgcctgcccaccctcccccacggagtagctcactcggtaatagccccgaaaggggccctctccggcctttcgtacccgagcaggaactattaaggtctctaagattatgcccgcctcaccccacagcccgactgctactggccgctgatcctggcggaagcccagcccagcggagacgcacaagaggcaccccgccagggctggtagcccagtcctgttgctatagcaggcatggcggagtgaattccagcagccccaacactggcaatcaggacagtaaacaaggcgaacaagagacaaaaaacaggtctgcctctgaagagcaggccctgtctcaggacggttctggggaaaagcccatgcacacggctccacctcaggccccagcccctccagctcagagctggaccgtgggcggtgacatcctaaacgccaggtttatccgcaacctgcaggagcggaggagtacgagaccatggtag

SEQ ID NO: 269486 - DNA, 1266 bp, Artificial Sequence
  derived and/or modified sequence
atggagtttccgtttgatgtcgacgcccttttccctgagagaattaccgtgctggatcagcaccttcgacctccggctagacggccagggactacaacacccgcacgagttgatttgcagcagcagatcatgacgatcatagatgaactcggaaaagcatccgccaaagcacagaaccttagcgcacccatcacctctgcatccaggatgcagagcaatcgccatgtggtgtacattcttaaggacagctctgccagacccgctggtaaaggggcaatcatcggattcattaaggttggatacaaaaaattgtttgtgctcgacgatcgggaggcacacaacgaagtggaacctctgtgtatcttggacttctacattcatgaaagtgtgcaaaggcatggacatgggagggaactcttccaatatatgcttcagaaggagagggtggagccacatcaactggccattgatcggccttcccagaaactgttgaaatttcttaataagcactataatctggagacaacagtcccgcaggtaaacaacttcgtgatatttgaagggtttttcgcccatcaacataggcctcccgcaccttccctaagagccacaagacactcacgcgctgctgcggttgacccaactcccgcagcgccagcaaggaagctgccgccaaagcgcgcagagggcgatatcaaaccttatagctcatcagatcgtgagtttcttaaagtggcggtggagcctccttggcctctgaaccgtgcccctcgccgagcaacacctcctgctcatccacccccaagaagcagttctcttgggaatagtccagagagagggccactccgaccttttgtccccgagcaagaactgttgaggagcctacgattgtgtcccccacatcccaccgcacgtctgctcctagccgctgacccgggtgggtcccccgctcagcgccgtagaactcgcggaacccctcctggtctggtcgctcagtcctgctgttactctcggcacgggggagtgaattctagtagtcccaacaccggcaaccaagacagtaaacaaggagagcaggagacaaagaacagaagtgcatccgaggagcaagccctgagtcaggatggaagtggtgagaaaccaatgcacactgcacccccacaggccccagcacctcctgcccagagctggaccgtggggggagacatcttgaatgcgaggttcatcaggaatctgcaagagaggcggtcaacaagaccttggtag

SEQ ID NO: 269487 - DNA, 1266 bp, Artificial Sequence
  derived and/or modified sequence
atggagttccctttcgacgtcgatgccttgttccccgagcgtattacagtcctggatcagcatctccggccacctgccaggcgtccagggactaccacaccagccagggtggacctgcagcaacagataatgaccatcatcgatgagctcggtaaagcctccgctaaggcgcagaatcttagtgctccaatcacaagtgcctcacgaatgcaaagcaaccgacacgtagtctacatcctcaaagactcgtcggccagaccagctggaaagggtgccatcattggtttcatcaaggtcggttacaaaaaactgttcgtcctggacgacagggaagcccataacgaagtggaaccgctctgtatcctggatttctacatccacgagtcagtgcagcgccacggccacggacgggagctgttccagtacatgctgcagaaggaaagggtggagccccaccagctcgccattgatcgccctagtcagaaactgctgaagtttctgaacaaacactataacctagaaacaaccgtgcctcaggttaataatttcgttatcttcgaaggattctttgcacaccaacaccgccctccagccccatctctcagggcaaccagacacagccgggctgccgctgtcgaccccacacccgctgctcccgcaagaaaacttcctcccaaacgggcagaaggcgatattaagccatatagttctagtgacagagagtttctgaaagtggctgtggaacccccatggccgctcaaccgcgctccaaggcgggctacccctccagcccatcctccacctcgctcttcttcgctgggcaacagtccagagaggggccctcttcgtccttttgtgcccgaacaggaactattgcgaagcctcaggctctgtcctccacatcctacagctcgactcctgctagccgctgatcctggcggatccccagcacagcggaggcgtacccgcggaactccacctggcctagtagcgcagagttgttgctattccaggcatggaggagtaaattcttcttctcctaataccggaaaccaggattcaaaacaaggcgagcaggagacaaagaataggagtgccagcgaggagcaggctctgagccaagacggctctggagaaaaaccaatgcatactgcccctccccaagctccagcccctcccgcacaaagctggaccgtaggcggagatatattaaatgctagattcatccgtaacctgcaggagcgcaggagcacaaggccctggtag

SEQ ID NO: 269488 - DNA, 1266 bp, Artificial Sequence
  derived and/or modified sequence
atggaattcccatttgacgttgatgcgctgtttcccgaacgaattaccgtgttagaccaacacctccgcccacccgctaggcggccaggaactaccactcctgccagagtcgacttgcaacagcagattatgacgattatcgatgaactgggtaaggcaagcgctaaagcccagaacctgtctgcccctattacgtccgcgtctcgcatgcaaagcaaccgacatgtagtctatattttaaaagattcctccgcacgtcccgcaggaaagggagccatcatcggttttatcaaggtgggttacaagaaactgttcgtactggacgacagggaggcccataatgaggtggaacccctgtgcattctcgacttctacatacacgaatccgtccagagacacggccacggccgagaactctttcaatatatgctgcagaaagaacgcgtggagcctcatcagttagctattgataggcccagccagaaactactcaagtttcttaacaagcattacaacctggaaaccacggtacctcaggtgaataattttgtgatctttgaaggcttttttgctcaccagcaccgccctcctgctccaagtctgagagccacccgtcattcaagagccgctgcggtggatcctacccccgcagccccagctcgaaaactgccgcctaaacgagcagagggggatatcaaaccatattcttcgtctgaccgggagtttctgaaggtggctgtggagccaccatggcctctaaaccgagcaccgaggcgagcgacgcccccagcccaccctccaccccgatctagctcattgggaaactctcccgaacgcggtcccctacggcctttcgttcctgaacaggagctcctcagaagcctaagactctgcccgccacatccgactgcacggctacttctcgccgctgacccaggaggtagccctgctcagcggagacggacacgcggaactcctcccggtcttgtggctcagtcttgttgttattcacggcacggaggggtgaatagtagctcccccaatactgggaatcaggattcaaagcagggcgaacaggagactaaaaaccgcagcgcctctgaggaacaagcactgtcccaagatgggtctggcgagaagccaatgcacacagcacccccacaggctcctgcccctccagctcagtcttggactgtggggggtgacatcctgaacgcccgttttattcgcaacttgcaagagaggagatccacaagaccctggtag

SEQ ID NO: 269489 - DNA, 1266 bp, Artificial Sequence
  derived and/or modified sequence
atggaatttccgttcgacgttgatgctcttttcccagagagaattaccgtcctcgaccagcacctgagaccccctgctagacgccctggaactacaactccagccagagtggacctccaacagcagatcatgacaatcattgacgaactcggcaaagcttcagcaaaagctcagaacctcagcgctccaataacatccgcgagtcgcatgcagtccaatcgccacgttgtgtatattttaaaggactcttccgcaaggcccgctggtaagggcgcaatcataggttttattaaagtcgggtataagaagctgtttgtgctggatgatagggaagcacacaatgaggtcgaaccgttgtgcatcttggacttttatatccacgaaagtgttcagcgccacgggcacgggagggaactgtttcagtatatgctgcagaaggaacgagtagagccccaccaactcgcaattgatcgcccttcccaaaagctcctgaagtttctgaataagcattacaatctggagaccaccgttccccaggtgaataacttcgtcatatttgagggattttttgctcaccagcataggcccccagcacccagccttcgtgcgacccgtcactcaagagctgcagctgtggatcctacacccgcagctcctgccagaaagcttccccctaagcgcgctgaaggcgatatcaagccttattcctcctcagatcgggagttcctgaaagttgcagtcgaacctccttggcccttgaatagagcaccgaggagagcaaccccccctgcccatccacctccccgttcctcaagtttgggcaacagtcctgagcgcggtcccctccggccatttgtccccgagcaagaacttctgcgaagtctgcgcctctgccctcctcatcccacagctaggctgcttctcgctgccgatccagggggaagcccagcgcagcgtcggagaacaagaggcacgccaccaggcctcgttgcccagtcctgctgttattcaaggcatggtggagtaaattcatcgtcccctaatacagggaaccaggacagtaaacagggggagcaggaaaccaagaataggagcgcgtcagaagaacaggctctgtcgcaggacggctcgggcgaaaaacctatgcatacggctcccccacaagcacctgccccaccagcacagtcttggaccgtgggcggagatatcctgaatgccagattcatccgaaacctccaggagcgccgatccactcggccttggtag

SEQ ID NO: 269490 - DNA, 1266 bp, Artificial Sequence
  derived and/or modified sequence
atggaattcccatttgacgtagatgccctgtttcctgagaggatcacagtcctcgatcagcacctcagacctcctgctcgtcggccaggcacaaccactcccgcacgggtcgacttgcagcagcagatcatgacaattattgacgaattgggaaaggcgagcgctaaagcacagaacctcagcgctcctatcaccagtgcgagcaggatgcagagcaatcgacacgtggtgtatattctaaaggattcttccgcccgacctgccggaaaaggcgctattattggttttatcaaagtcggctataagaagctcttcgtgcttgacgatcgtgaagcccacaatgaggtggaacctctgtgcatcctggatttttatatacatgaaagcgtgcagagacacgggcatggaagggagctgttccagtacatgttgcagaaggaaagggtggaacctcaccagctggctatagatagaccgtcccagaagctgctgaaattcttgaacaaacattacaatttagaaaccaccgtgccgcaggtgaataattttgtgattttcgagggcttcttcgctcaccagcataggccaccagcaccctcattgcgcgcaactcggcattccagggccgctgctgtggatcccacaccagctgccccagcccgtaagttaccaccaaagagggcagagggcgatatcaagccttacagttcatccgaccgagagttccttaaagtggcagtcgagcccccatggccattaaatcgtgctccacgacgggctacgccaccggctcatccacctccaaggtcctcctccctcggtaattcaccagaacgcggacctctacggcctttcgttccagaacaggaattgctccgatcactaaggctgtgcccacctcaccctacagcacgactcctgctggcagcagacccaggtggtagtcctgcgcaacggagaagaactcgcggaaccccaccaggacttgtcgcccagtcctgttgctatagccgtcacgggggagtgaactcgagctccccaaataccgggaaccaggattccaagcagggcgaacaggaaactaaaaaccgcagtgcaagtgaggagcaggccctttcccaggacgggagcggcgagaaacccatgcacactgcccctcctcaggccccagctccaccggcacagtcgtggaccgtcggcggagacattttaaacgctagatttattcgtaaccttcaggaacggaggtcgacgcggccttggtag

SEQ ID NO: 269491 - DNA, 1197 bp, Artificial Sequence
  derived and/or modified sequence
atggaatttccgttcgatgttgacgctctctttcccgaaaggatcactgttttggaccagcatttgcgacctcccgcacgcaggccgggaaccaccacacccgctcgcgtcgatctccagcagcagataatgacgatcatcgacgagcttggaaaagccagcgccaaggctcagaatctgtctgctcctattacttccgcatctaggatgcagagtaaccggcatgtcgtgtatatcttgaaagacagttcagccagaccagcagggaagggtgctataatcggctttataaaagtggggtataaaaagctcttcgtattggatgatcgggaggcccataatgaagtcgaacccctgtgtatcctggacttctatatccacgagagcgttcagagacacggccacggtcgggaactgttccagtacatgctccagaaggagcgagtggagccccatcaactcgccattgacaggccttctcaaaaattgttgaagttccttaacaagcattacaaccttgagaccaccgtgcctcaggtcaacaattttgtcattttcgaaggcttctttgctcatcagcatcctcctgcaagaaaactgccacctaagcgagctgaaggggatattaagccatatagctcatccgatcgagaatttctcaaggtcgcagtggaaccaccctggcccctgaaccgggcacccaggcgggcaacaccgcctgcacaccctccccctaggtcttcttccctcgggaattcgccagaacgcggacctctccggccttttgttcctgagcaggagctccttagaagcctgaggctttgtccccctcatcccactgccaggttacttctggcagcagacccagggggttccccagctcaaagaagacggacccgaggaactcctcccggattagtggcccaatcctgttgttattcaagacacggaggcgttaacagtagctctcccaacactggcaaccaggatagcaagcagggagaacaggaaacaaagaatcgaagcgcctccgaggaacaggcattgtcacaggacggctccggggagaaacccatgcacacagcccctccgcaagcgccagcccctcccgcacagtcatggactgtcggcggagacatacttaatgcgaggttcatcagaaatctgcaggaaagacgcagcacccgaccctggtag

SEQ ID NO: 269492 - DNA, 1197 bp, Artificial Sequence
  derived and/or modified sequence
atggagtttccctttgatgtggacgctctttttcctgaaagaatcaccgtattagaccaacatctgagacctccggcacgtaggccaggaactactactccagcgcgtgttgatctgcagcaacagattatgacgatcatcgacgaactgggtaaggcctccgctaaagctcagaatttatccgcgccaatcaccagtgccagcagaatgcagagcaatagacacgtcgtgtatatcctgaaagattcctcagccagacccgcaggcaaaggagccattatcggcttcataaaggtcggctataaaaaactgttcgtcctggacgatagagaggctcacaatgaggtggagccgctgtgtattctggacttctacattcacgaaagtgtgcagaggcacggccatgggcgagaactcttccagtacatgctgcagaaagagagggtggaaccccaccaactggccatcgacaggccttctcagaaactcttgaagttccttaacaaacattacaacctcgagacaaccgtccctcaggttaataacttcgtcatttttgagggtttttttgcccatcaacacccacccgcacggaaactgccgccaaagagagctgagggagatatcaaaccctactctagctccgatcgtgaattcctgaaggtcgcggtcgagccgccttggcccctgaacagagcacctcgcagagcgacaccccctgcgcacccccctccacgctcttcgtctttaggcaatagccccgaaaggggtccactgagaccattcgtgccagagcaggagctgctcaggtctctgcggctatgccctccacatccaacagccaggttgcttctggctgccgatcccggtggcagtccagctcaaaggaggcgtactcgaggtacacctccaggtctggtcgcccagagctgctgttactcaagacacgggggagtcaactcgagctctcctaataccgggaaccaggactccaagcaaggggagcaggaaactaaaaatcgctccgcctcagaggagcaagcactgagtcaggacggctccggggagaagcccatgcacaccgccccacctcaagctccagcccctcccgcacagtcctggaccgtgggtggagacatcctgaatgcacgattcatcaggaaccttcaagagagaagaagtacccggccatggtag

SEQ ID NO: 269493 - DNA, 1197 bp, Artificial Sequence
  derived and/or modified sequence
atggagtttcccttcgacgtggacgccctgttcccggaaagaattactgtgctggatcagcacctgcgcccacctgctcggaggccaggtactactacccccgctcgggtcgatctgcagcagcagattatgaccataattgacgagttgggtaaagcttccgccaaggcccaaaatttatcagctcctattacaagcgctagccgcatgcaatccaaccgccacgtcgtgtatatcctcaaggatagcagcgcaagacctgccggaaagggcgcaatcattggctttattaaggtgggctacaagaaattatttgtcctggacgatagagaagctcataatgaggtagagcctctttgtattttggacttttatattcacgagagcgtgcaaaggcatggccatggccgagagctcttccagtacatgctccagaaagaaagggtggagccgcaccagttggccatcgaccggccaagccagaagttattgaaattcctgaacaagcactataacctggagactaccgtgcctcaggtgaataatttcgtgatattcgaaggattttttgcgcatcagcatccaccggctcgtaaactgccacccaaaagggctgaaggggacatcaaaccgtactcatcgagtgaccgggaattcctgaaagtcgccgtggagcctccctggcctctaaatcgagcccctaggagggccacaccccctgcacacccgccacccagatcttcctccctgggtaattcaccagagaggggcccattacggcctttcgtcccagaacaagaactcctgagaagccttaggttatgccccccacatcccacagctaggttgctcctcgccgctgacccaggcggatctcctgcccaacggcgaaggacacgagggacgccacccggactggtagcacaatcttgctgctattcacggcatggcggagtgaactcatcgtcacccaacactgggaaccaggattctaagcagggagagcaggaaactaagaataggtctgcctctgaagagcaagcactctcgcaagacggtagcggagagaaaccaatgcataccgccccacctcaggcgccagctccaccggctcagtcctggactgttggaggcgacatcttgaatgcaagatttatcaggaaccttcaggagagaaggtctaccaggccatggtag

SEQ ID NO: 269494 - DNA, 1197 bp, Artificial Sequence
  derived and/or modified sequence
atggagttcccctttgacgtagacgccctcttccccgaacggatcacagtactggaccagcacctgagaccccctgcccgtcgaccaggcaccactaccccggctcgcgtcgacctgcagcagcagattatgacgatcattgatgaactgggtaaagccagtgcaaaggcccagaatcttagcgcccctatcacgtccgcaagtaggatgcagagcaatcggcatgtggtgtatattttgaaagactctagcgccaggccagcaggaaagggtgctatcattggttttatcaaagtgggatacaagaaattgtttgtcctcgatgatcgtgaggcacacaatgaggtagagccgctgtgtatactggatttctatattcacgaaagcgttcaacgccatgggcatggcagagagttgttccagtacatgctccagaaggagcgtgtggagccccatcagcttgctatcgatcggccatctcagaagctgttaaagtttctgaataaacattacaatctggagactacagtgccacaggtgaataacttcgtgattttcgaaggctttttcgcacatcagcacccgcctgcacgtaagctacctcctaagagggccgaaggagacatcaagccctattcttcatccgacagagagttcctgaaagtagccgttgagcccccatggcctctcaacagggctcccaggagagcaaccccacccgctcatccaccacctcggtcctctagcctcggaaactcccccgagagggggccactgcggccattcgtacccgagcaggaactacttcggagtctgcggctttgcccccctcaccctactgcacgcctgctcctggcagccgatcccggaggaagcccggctcagaggcgaaggacaagaggcacaccccctggattagtcgctcagagctgttgctactcacgccacgggggtgtcaactcctcctcgcccaacacaggcaatcaggactctaagcaaggggagcaggaaactaaaaacaggtcggccagcgaagaacaggctttgagccaggacgggagcggtgagaagccaatgcacacggcaccccctcaggccccagcgcctccagctcagtcctggacggtgggaggggacatcttgaatgcacgtttcatcaggaacctccaggagcgcagatcgacccgcccatggtag

SEQ ID NO: 269495 - DNA, 1197 bp, Artificial Sequence
  derived and/or modified sequence
atggaatttcccttcgatgtcgacgcgttattccccgagcgaatcacagttctggaccagcatctgagaccaccagcacgaagacccggaactacaactcctgcacgagttgatctgcagcagcaaatcatgacaatcatagatgagctgggtaaagcgtcggccaaagcccagaacctgtcagctcctatcacgtccgccagtagaatgcagtccaaccgtcacgtggtatacatattgaaggacagctccgctcgtccagccggaaaaggggctattattggatttatcaaggtcgggtataaaaaactgttcgtgctggacgatcgagaggcacacaatgaggtcgaacccctttgcattctggacttctacattcacgagagcgtgcagcgtcatggacacggtagagaactattccaatacatgctccagaaggagagggtggagccccaccagctcgccattgacagaccctcacaaaaactgttgaaattccttaacaagcactacaacttggagaccactgtgccacaggtgaacaatttcgttattttcgagggcttcttcgctcaccagcaccctcccgctcgaaaactgccacccaagagggccgagggtgacattaagccatacagttcatctgatcgagaatttctgaaagtcgcagttgagcccccatggcctctgaatagggctcctcgaagagctacccctcctgcccatccgccacccagatccagctcgctggggaactcccctgagcgcggacctttgcgaccttttgtccctgaacaggagttgttgcgatcccttcgtctttgcccaccccaccctacagcacgcctgctcctcgctgctgaccccggaggaagtcccgcacagcggcgtagaactcgcggtacgccgcctgggctggtcgcccaaagttgttgctactccagacacgggggtgtgaactctagctcacctaacacaggcaatcaggatagcaagcaaggcgaacaggagactaagaatcgctccgccagcgaagagcaggcgcttagccaagatggttctggtgagaagcctatgcacacggcgccaccccaggcacccgcaccccctgctcagagctggaccgtcggaggagatatcctgaacgcccgttttatacgcaatttgcaagaacggagaagcacccggccttggtag

SEQ ID NO: 269496 - DNA, 1197 bp, Artificial Sequence
  derived and/or modified sequence
atggaatttccctttgacgtggacgcactgttccccgaacggatcacagtgctggaccaacatttaaggcccccagccaggcgaccaggcaccaccacccccgcaagagtggacctccagcaacagatcatgacaattatagatgagctcggcaaggcgagtgccaaggcgcagaatctgagcgccccaattacaagcgcttcacggatgcagagcaacaggcatgtggtctacatcctgaaagactcatctgcgagacccgctggaaaaggagccatcatcggttttatcaaagtcggttataagaagctttttgtgctggatgatcgcgaggcccacaatgaggttgagccactgtgcatcctagatttttatattcatgaaagtgtccagcggcatgggcacggccgtgagctgttccagtatatgctgcaaaaggaacgagtcgagccgcaccagctggccatcgatcgtccctcgcagaagctactgaagttcctgaacaagcactacaacctggaaaccactgttcctcaagtcaataattttgtgatctttgaaggatttttcgcccaccagcatcctcccgcacgcaagttgcctcctaagagggccgaaggggatataaagccttacagcagctctgatcgcgagttccttaaagtagctgtggaaccgccttggccactcaatagggctccacgacgcgctacacctcctgctcatccccctccccgttccagtagcctaggcaacagcccagaacggggtcctctgaggccatttgttcctgaacaagagctgttgaggtctctgcgactctgtccaccccaccctacagctagacttctcctggctgctgacccaggtggcagtccagcacagcgtaggagaacacggggtacacccccaggactggtcgcccagtcatgctgttacagccggcatggaggcgtgaactcgtcatcccctaacacaggcaaccaggactcaaagcagggcgagcaggagacaaagaacaggtcagctagtgaggagcaagcactgagccaggacggaagcggagagaagcccatgcacactgccccaccgcaagcccctgcccctcctgctcagagttggaccgtcgggggtgatattctcaatgcccgatttattagaaatctgcaagagcggaggtcaactaggccctggtag

SEQ ID NO: 269497 - DNA, 1794 bp, Artificial Sequence
  derived and/or modified sequence
agtttcaagcactttgtgagtatggggtgaatcggcgtcggccttccactgtggggttaaatctcatcccgcggctctcctcctgtcggtcctgcagttcttttgtccccgggtagaggtttcaggtgttgaccaggggcaagaactgctctgttgcaagatggcactattgacaccagccccagggtcacaaagtagccaatttcagctaatgaaggctctgctcaagcatgaatctgtgggatcccagcctttacaagatagagttctccaggtccccgtgcttgcccatggaggatgctgcagagaagataaagtggtagcttctaggcttactccagagtcccaggggttgttgaaagtggaagatgtggccctgaccctcacccctgaatggacacagcaggattcatctcaggggaatctctgtagagatgaaaagcaggagaaccatggcagcctggtctccctgggtgatgaaaaacagactaagagcagggacttgcctccagctgaggagcttccagaaaaggagcatgggaagatatcgtgccacctgagagaagacattgcccagattcctacatgtgcagaagctggtgaacaggagggcaggctacaaagaaagcagaaaaatgccacaggagggaggcggcacatctgccatgaatgtggaaagagttttgctcaaagctcaggcctgagtaaacacaggagaatccacactggtgagaaaccctacgaatgtgaagagtgtggcaaagccttcattgggagctctgcccttgtcattcatcagagagtccacactggtgagaagccatatgagtgtgaagaatgtggtaaggccttcagtcatagctcagaccttatcaagcatcagagaacccacactggggagaagccctatgagtgtgatgactgtgggaagaccttcagccagagctgcagcctccttgaacatcacagaatccacactggggagaagccgtatcagtgcagtatgtgtggcaaagcctttaggcgaagttcacatctcctgagacatcagaggatccatactggggataaaaatgttcaggaacctgagcagggagaggcctggaaaagtaggatggaaagccagttggaaaatgttgaaactcccatgtcttataaatgtaatgagtgtgaaagaagtttcactcagaatacaggcctcattgaacatcaaaaaatccacactggtgagaaaccctatcagtgtaatgcgtgtggaaaaggcttcacccgaatttcataccttgttcaacatcagagaagccatgtagggaaaaacatcctatcacagtgacccatgccatacatgccagagttggtgctcatttgtcactgatctgaagccactccccctggagtctcaactatagaaattgtgggctgggctttatttaccactacacattatcaggtgttagaaaatgtagactgggttagacaaattatcttctaagttctagaaggggtttgtaatcaaaacatatttgataggaggctacgggagagttgtctagaagaggtaagacctgaaactgtttgttctctcccactagaattaaatggatgtttagactggctacttgccctaaaccagcacttggtgatgtctactgggtggatggttgtgatttgggggctgcttctctgaccattctttttgactgtaatgaatcctccacagttggtcagattcataaagtcttatatccccctctgtgccttttctgcaggtgctaataaatgtttattgaatgt

SEQ ID NO: 269498 - DNA, 2067 bp, Artificial Sequence
  derived and/or modified sequence
atgctgcccaccgaggtgccccagagccaccccggccccagcgcccttctcctactccaactcctcctgccaccgacctctgcattttttccaaatatttggtcactgttagccgcccccggaagcattacacaccaggacctgactgaggaggctgctctgaacgtaacattacagcttttccttgagcagccacccccggggcgcccccccctgagactcgaggatttcctgggacgcaccctgctggccgatgaccttttcgccgcctatttcgggccaggttccagtcgaaggtttagggcagccctcggcgaagttagccgcgcgaacgccgcccaggacttcctacctacgtccagaaatgatcccgatctgcattttgacgccgagagactcgggcagggccgtgctcgcctggtgggcgctctccgcgagacagtcgttgccgctcgcgccctggaccatacccttgcccgccagaggcttggagctgcccttcacgctctccaggacttctacagccacagtaactgggtggagttgggcgagcagcagccgcatccccaccttttgtggcctcgccaggaactgcagaacctggcccaggtagcggaccctacatgctccgactgtgaggaactgtcctgcccccggaattggctaggattcaccttgctgacgagtggctactttggcacacacccaccaaaaccgcccggcaagtgctcgcacggagggcacttcgaccgatctagcagccaaccacctcggggcggcatcaacaaggacagcactagtccgggttttagtccacatcacatgcttcacctccaggctgccaagctggcactactggcctctatccaggcattcagtctactccggagtagattaggggatagagatttctctcgcttgttagacataacccctgcatccagcctgtccttcgtgctcgatacaaccggcagtatgggggaggagattaatgcagcgaaaatccaggcgcggcacctcgtggagcagcgacgtgggagccctatggagcctgttcattacgttctggttccctttcatgacccaggtttcggccccgtgttcacaactagcgatcctgactctttctggcagcagcttaatgagatccacgcactcggagggggggatgagccagagatgtgcctgagcgctctgcaactcgccctgctccacacacccccactgtcggatatatttgtcttcacggatgcttctcctaaagatgctttcctgacaaaccaggtcgaatccctgacacaagaaaggcgatgcagagtcacattcttggtcaccgaagataccagtagggtgcaaggccgggctcggagggaaattctgtcccccctgcggtttgagccctacaaggctgtggctctcgcttcggggggtgaggtgatctttacaaaggatcagcatatacgcgatgtcgccgcaattgtgggcgaatcgatggcagccctcgtcacactgccactggacccgccagtcgtggtaccagggcaacctctggttttcagtgttgatggattgcttcagaagattacagtcagaatccacggcgacatctcaagcttctggataaagaaccctgctggagtcagccaaggtcaggaggagggcggcggaccattgggacacacacgacgctttgggcagttctggatggtcaccatggacgatcctccccagacggggacgtgggagatccaggtcaccgccgaggacacccccggggtccgggtgcaggcacaaactagcctagacttccttttccatttcggtatccctatggaagacgggcctcacccggggctgtatcccctgacacaaccagttgccgggttacagacgcaactgttggtggaaagccaatcttggggctccagtgccgcctttctcccacgacatccttctagagggccccgcggctgcagaaccaggccgggagccctaggagcgcgcgggacatcaggtgcgagaagtccgcggtcactggcagtggcccatgcggcagtgcacccatag

SEQ ID NO: 269499 - DNA, 2067 bp, Artificial Sequence
  derived and/or modified sequence
atgctgcccaccgaggtgccccagagccaccccggccccagcgccctgctgctgctgcagctgctcctaccaccaacaagcgctttctttccaaacatttggtcacttctcgcggccccaggctcaatcactcaccaggacctgacagaggaggcagcactgaatgtgactctacagctgtttttggagcagcctccaccgggaagaccacctcttcgactggaggatttccttgggaggactctcttagcagatgacctatttgcagcctatttcggccccggatccagtaggcggttccgagcagctctaggcgaggtgagccgagcaaacgccgcccaagacttcctccctactagccgtaatgatcccgatttgcacttcgatgcagagaggctcggacaaggcagagcacggctcgtgggggccctgcgggaaactgttgtggcagcccgggcgttagaccatactctcgcccggcagagactgggggccgcgcttcacgccctgcaagacttctactcacattctaattgggttgaactgggagagcagcaacctcaccctcacctcctgtggcccaggcaagaacttcagaaccttgcacaggtcgcagatcctacttgtagcgactgcgaggaattaagttgccctaggaactggctgggttttacactgctaaccagcgggtacttcggcacacacccacccaagccgcccggaaagtgctcacacgggggccacttcgaccgatcatctagccagcctcccagaggaggcatcaataaagactcaacatctccgggctttagcccccaccacatgcttcacttgcaagcagctaagctggcgctactggccagcatccaggccttttccctcctaagaagcagactgggcgacagagatttctcacgcctcctcgacataacgcccgctagttctctgagcttcgtcctcgacactactggcagcatgggtgaagagatcaacgctgccaagatccaggccagacatctcgtggagcagagaagaggctctcctatggagcctgtgcattacgtgcttgtacctttccacgaccctggctttggaccagtctttacgactagcgaccccgacagcttctggcagcaactgaacgaaatccacgctctcggtggcggcgacgagccagaaatgtgtctctctgctcttcagctggccctgcttcatactccgcctctaagtgacattttcgtcttcactgacgcctccccaaaggacgcattcctcaccaatcaggtggaatccctcacccaagagaggcggtgtcgtgtcacatttctggtgactgaggatactagccgcgtgcagggaagggcccgccgcgagattctctcccccttgcgatttgagccttataaggccgtagctctggcgagtggcggagaagtgatcttcaccaaggatcagcacattcgcgatgtagccgctatagtgggcgagtctatggctgctctggtcacccttccactggatccaccagtcgttgtaccaggacaacccctggtgttctccgtggatggactcctgcagaaaatcactgtacggatccacggcgatatctccagtttttggattaagaatcctgctggcgtgtcgcagggtcaggaggaaggcgggggcccactgggccacacgagacgtttcgggcagttctggatggtcactatggatgacccgcctcaaaccgggacgtgggagattcaggttacagcggaagacaccccaggagtgcgcgtgcaggcccagacgtccctggatttcctcttccactttggaatcccgatggaggatgggccccaccctggtctgtaccctctgacccagcctgttgcgggtcttcagacccagttgctggtggagtctcagtcttggggctcaagtgctgcatttttgcctcgacacccaagtcgcggcccacgggggtgccggactcgtccaggcgcgttgggagcccgtggtactagtggcgcaagaagccctaggtcactggctgttgcccatgctgccgtgcatccttag

SEQ ID NO: 269500 - DNA, 2067 bp, Artificial Sequence
  derived and/or modified sequence
atgctgcccaccgaggtgccccagagccaccccggccccagcgccctgctcctgctgcagctgctgttgccacccacctccgctttcttccccaacatttggtcattactcgcagctccgggttcaatcacgcatcaggatctgacggaagaagcagctttaaacgtgacactacagctgtttctcgagcagcctccccccggacgcccaccactgcgcctggaagatttcctgggacggactctgctcgctgacgatcttttcgctgcatacttcggcccagggtcaagccgtagatttagggcagctctgggggaggtctcccgggcaaatgcagcacaggatttcctccccacaagtcgaaacgaccctgacctacattttgatgccgaacgcctgggccaaggcagagcccgtctggtgggagctctgcgagaaacagtagttgccgccagggcactcgaccatacactcgcacgccagcgattaggggcggctctgcacgcgctgcaagatttctacagccatagcaactgggtcgaactgggcgaacagcagccacatccccacttactttggccaaggcaggagcttcagaacctggcgcaggtggctgacccaacgtgctccgactgcgaggaactctcttgccctcggaattggctgggattcactctgctgactagtggatattttggcacgcacccgcctaaacctcctggtaagtgttcacacggcggccacttcgaccgatcatcaagccagccgcccagaggaggtattaataaggatagtacctctcctggcttctcccctcatcacatgttgcacctccaggccgcaaaacttgcgctgctggcttccatacaagccttcagtctgctgagatcaaggttaggcgatagggacttttcccggctgctggatatcactccagcttcatccctgagtttcgttctggacacaacaggcagtatgggcgaggaaatcaacgctgccaagatacaggctcggcacctcgttgagcagagacgaggatcgcccatggaacccgtgcactatgtccttgtgcctttccacgaccccggcttcgggccagtttttacgacgtctgatcctgacagtttctggcagcagcttaatgaaatccatgcactcggcggtggcgacgagcctgagatgtgcctttcagccctgcagctggccctgctgcatactccgcctctcagcgacatattcgtctttaccgacgcttctccgaaagacgcctttttgaccaatcaggttgagtcactgacccaggaaagacggtgtcgggtcacatttctggttactgaagataccagtcgagtgcaggggagggcccgccgcgaaatccttagtccactgagattcgaaccttataaggctgtggctttagcgtcaggaggagaagtgatcttcaccaaagaccagcatattcgcgatgtcgcggctattgttggcgagtcaatggcggccttagtgaccctgccgttagatccccccgtagtggtgccaggccagccgctcgtgttctcggtggatggcctactgcagaaaatcacagtaaggatccatggagatatctcctctttttggatcaagaaccctgcaggagttagccaagggcaagaggaggggggtggcccactgggacatacacggcgattcggacagttctggatggtgacaatggatgatcccccgcagacagggacctgggaaatccaggtgacagctgaagacacccctggggtgcgtgttcaggctcagacctccttggactttttgttccacttcgggatcccaatggaggacggaccccacccaggactgtatcccctcactcagcccgttgccgggttgcagacccagctgcttgtggagagtcagagttggggatcttccgcagccttcctcccccgacacccgtctcggggccctagagggtgtaggacgcgccctggtgcccttggagccaggggaacttccggggctaggtcacctaggtctctagctgttgcacacgccgcagtgcacccctag

SEQ ID NO: 269501 - DNA, 2067 bp, Artificial Sequence
  derived and/or modified sequence
atgctgcccaccgaggtgccccagagccaccccggccccagcgccttgctgctccttcagctgctgctcccgcctacatcagcatttttccctaatatttggtctctactcgcagctcccgggtctatcacccaccaggatctgacggaagaggccgctctaaacgttactttacagctgttcctggaacaaccacctcctggaagaccacctctgagactagaggatttccttgggcggactttactagcagatgacctcttcgccgcatacttcggaccagggtccagccgcagattcagagcggctctgggtgaagtgtctagagcgaatgccgcgcaggactttttgcctacctcaaggaacgatcccgacctgcatttcgacgctgagaggctgggccagggccgggcacgtcttgtcggggctttgcgcgaaaccgtggtggctgcaagggcgttagaccacaccttggcccgccagcggctcggcgcagctttgcatgccttacaagacttctacagccactctaactgggtggagttgggtgagcaacaacctcacccacacctcctgtggcctcgccaggagcttcagaacctggcccaggtggccgaccctacctgcagtgactgtgaagagctctcttgtccaagaaactggttgggattcacactgttgacctccggatacttcggaacccaccctccaaagcctcccggaaaatgctctcacgggggccacttcgataggtcatccagccagccaccccgtggtgggataaacaaggatagcacatctcctggattcagtccccatcacatgttgcacctccaggcggccaagctggccttgcttgcttcaattcaggctttttctctcctcaggtcgcgactcggtgacagagacttttctcggctgctggatatcactcccgcaagttctctttccttcgttttggacactacaggttccatgggcgaggagatcaacgcagccaaaattcaggctcggcacctcgtcgagcagaggcgaggctcgcccatggagcccgtgcactatgtgcttgtaccttttcatgatcccgggttcggcccggtcttcaccacctctgatcctgattccttctggcaacagttgaacgaaatccacgccctggggggcggagatgaacccgagatgtgtctcagtgcactccagttggctctccttcacacccctccgctgagtgatatatttgtgtttacggatgcaagtccgaaagacgcattccttactaatcaggtcgaaagcctgacccaggaacggcggtgcagagtgaccttcttagtgactgaggacaccagtagagtgcagggacgggccagacgggagatcctgagcccactccggtttgagccatacaaagccgtagctctggcaagcggcggcgaagttatttttactaaggaccaacacatccgggacgtggccgcgattgtgggcgagtccatggccgctctcgtaactcttccactagatccccctgtggtggtgcctggacagcctcttgtgttcagtgtagacggactcttacagaagatcacagtgcgtattcacggtgacatttccagcttttggattaaaaacccagctggcgtctcccagggccaggaggagggcgggggaccgctgggccacacccgacggttcggccagttctggatggtcaccatggacgacccacctcagactggaacctgggagatccaagtcacagccgaggacaccccaggcgttcgcgttcaggcccagacaagcctggacttcttattccacttcgggattcccatggaggacggcccacatcccggcttgtacccactgacccagcccgtggctggattacagacacaactcttagtagagtcccagagctgggggtcgagcgccgcttttctgcctcggcatccctctagaggacctcgtggatgtcggacaagacctggagccttaggtgctcgcggcacatcaggcgcacgtagccctaggagtttggcagttgctcatgccgcagtacatccgtag

SEQ ID NO: 269502 - DNA, 2067 bp, Artificial Sequence
  derived and/or modified sequence
atgctgccaactgaggtgccacagtcccatcccggaccgagcgccctgctgcttttacagctgctgttaccgcctactagcgctttcttcccaaacatctggtcactgttggctgcacctggctctattacacaccaagatctgacagaggaggccgcattgaatgtcaccctgcaactgttcttagaacagccccctccaggcagaccccctttgaggctggaagatttcctggggaggaccctcctcgctgacgacctatttgccgcttatttcgggcctggatcaagccggagatttagagctgctctcggagaagtgtccagggctaacgcagcccaggattttctacccacgtcccgcaacgatccagacttgcacttcgacgccgagaggttgggccagggcagagcaaggctcgtcggcgctttgcgagagaccgtcgttgctgcccgagcactggatcatacacttgccaggcaacgccttggagcggctcttcacgccctgcaagacttctatagccacagcaactgggtggagctcggcgagcaacagccccatccacacttactgtggccccgacaagagctgcagaacctagcgcaggttgcggaccccacttgtagcgattgtgaggagctgtcctgccccaggaactggctggggttcaccctcctcaccagcggatacttcggcactcaccctcctaagccaccgggaaagtgctctcacgggggtcactttgacaggagttcgagccaacccccaagaggtggcattaataaagacagcacgtctcccggattctccccccatcacatgttgcacttacaggccgctaagctcgctcttctggcttcaatccaggccttctctctgctgaggagcaggctgggagatagagattttagccgcctcctcgacatcacacccgcatcaagcctgtccttcgtgttggacaccaccgggagcatgggtgaagagatcaatgcagcaaagattcaggccagacatctagtggagcagaggcggggaagtccaatggagcctgtacattacgtgctggtaccgtttcacgatcctggttttggaccagtgtttactacctctgaccctgattctttttggcagcagctgaacgaaattcacgcccttgggggaggagacgaaccagaaatgtgtttatcagcccttcagcttgcactgttgcacaccccacctcttagtgatatctttgtatttaccgatgcctcccctaaggatgccttcctgacaaatcaggtagagtccctgacgcaggagcggaggtgtcgagtgacttttctagttacagaagacacaagccgcgtacaaggccgagcacggcgagaaattctaagtcccctcaggttcgaaccatataaagccgtagctctggcttctggcggagaagtcatatttacaaaagaccaacacattcgagacgtagctgccatcgtgggcgaatccatggccgcacttgttaccctgcccctggaccccccagttgtggtccctggccaaccactggttttttcagtcgacggactcctgcagaaaatcaccgtcagaattcatggagatatttcgagtttctggatcaagaatcctgctggtgtgtctcaggggcaagaggagggaggtgggccactgggccatactcggaggttcggccaattctggatggttaccatggatgaccccccacaaactggtacttgggagattcaggtaactgcagaagacacacccggagtccgggtccaagcccagacatcactcgactttctatttcacttcggtatcccaatggaggatgggccacaccccggactgtatcctcttacccagcccgttgccggactgcaaacccaattgttagtggaaagccagtcatggggttcctctgctgcttttttgccacgccacccctcacgcggacctcgcggatgtcgcacaagacctggtgcactgggtgctaggggaaccagtggtgctcgttcccccagatcactggccgttgctcacgccgctgttcatccgtag

SEQ ID NO: 269503 - DNA, 2067 bp, Artificial Sequence
  derived and/or modified sequence
atgttaccgaccgaggtgccgcagtcacacccaggacccagcgctcttctcctacttcagctcctcctcccgcctacaagcgccttctttccaaatatttggtctcttcttgcagccccaggttccatcacacatcaagacctgaccgaggaggctgccttgaacgtaacattgcagcttttcctggagcaaccccctcctggtcggccacctctccgcctggaggattttctggggagaaccttactcgctgacgacctattcgccgcttattttggcccagggtcctccaggcgatttcgcgcagccctcggtgaggtctctagagccaatgccgcacaggactttcttccaacatcaaggaacgatcccgacctgcattttgacgcagagcggctgggccaggggagggcaagacttgtgggcgctttgcgagaaacagtcgtagccgcaagagccctggaccataccctcgctcgccagcggttgggcgctgcccttcatgccttacaggacttctactcacactctaattgggttgagctgggcgagcagcagccacatcctcacctgctgtggcctagacaggaactccaaaacttagcacaggtagcagacccaacatgctccgactgcgaggagctctcttgcccacggaactggctgggcttcactctcttgacatcaggctatttcgggacccaccctcccaaaccaccgggaaaatgttcccacgggggacactttgatagatccagttcccaaccgcctcggggtggcatcaacaaggactccacttcaccagggttctccccacatcacatgttgcatctgcaggccgctaaacttgcactcctcgcttccattcaggcttttagcctcctgcggtcacgccttggtgatagagacttctctaggctcttagacatcaccccagccagctcactgagcttcgtgctggacacaaccggttcgatgggggaggagatcaatgccgcaaagatccaagctagacatctagtcgaacagagacggggatccccaatggagcctgtgcactatgtcctggtcccttttcacgaccccggattcggccctgtgtttaccacgagtgaccctgattctttctggcagcagctaaatgaaatacatgcattaggcggaggtgacgaacccgaaatgtgtctctctgccctgcagctggcgctgcttcatacaccccctctgtcagatatttttgtcttcaccgatgcgtcccctaaagacgcgtttctgacaaatcaggttgaaagcctgacacaggagcgtcgatgccgagtgacctttcttgtgacagaagacacctctcgggttcaaggcagggccaggagagaaattctgtctcctctgcgtttcgaaccatacaaggccgtggccctcgcctctggcggtgaggtgatctttactaaggatcaacacattagagacgtcgccgcaatagtcggtgagagtatggctgccctggtgacattaccactcgacccacccgtggtagtgcctggacagcctctcgtattttcagtggatggtctgctgcagaaaatcacagtgaggatccacggggatatctcttcattctggattaagaatcctgctggggtgtctcaggggcaggaggagggaggaggtcctcttggccacacaaggaggtttggacagttctggatggtgacaatggacgacccacctcagaccggtacctgggaaatccaggtgaccgccgaagatactcctggagtgagggttcaggctcaaacttcactggactttttgtttcattttggcatccctatggaagacggaccccaccccggtctctatcccctgacgcagcctgttgccggattgcagacccagcttcttgtggagtctcagagctgggggtcatctgctgccttcctgccgcgtcaccctagccggggacccagggggtgtcgcactaggccaggcgctttaggtgcacgcggtacctcaggtgcaaggtctccccgtagccttgcagtggcccacgctgctgtccacccctag

SEQ ID NO: 269504 - DNA, 2067 bp, Artificial Sequence
  derived and/or modified sequence
atgctgccaacagaggtgccacagtctcatcccggtccttccgccctccttttactccagttgctgttgcctccgacaagtgcgttcttccccaacatctggagcttgttggctgctccgggatctatcacacatcaggatctcaccgaggaagcagctctgaacgtaacgcttcaactctttctggaacagccacctccaggtcgaccacctctccgcctcgaggatttcctcggacgaacgcttctggccgatgatctttttgccgcttactttgggccaggttccagtcgcaggttccgcgctgccctgggagaggtatcacgcgcaaacgctgctcaggacttcctaccaactagcaggaacgaccctgatcttcacttcgacgcggagagactaggacaggggcgtgccagactggtgggagcactcagggagaccgttgtcgccgcacgagccctggaccataccttggccagacagagacttggcgctgcccttcacgctttgcaggacttttactcacattccaactgggtggaactcggagaacagcagccccatccacatctgctgtggcccagacaggagctgcagaatctggcacaggttgccgaccctacgtgctccgattgtgaggagctatcttgtccgcgaaactggctgggctttacactcctcacatccggctacttcgggacccaccctcctaagcccccaggcaagtgcagccacgggggtcatttcgatcgctcaagttctcagccccctaggggcggaattaataaagacagcacctcgcctggcttcagcccgcaccacatgctgcacttgcaggcagctaagctggccctccttgcctctattcaggcttttagcttgctgcgatcgagactcggagaccgcgacttcagccgtctcctggatatcacccctgcaagcagtttgagctttgtcctggacaccaccgggagtatgggcgaagaaattaacgctgccaagattcaagccaggcacctggtggaacaacggcgaggcagcccgatggaaccagtccactatgtgctggtacctttccacgacccaggctttggccctgtgtttactacaagtgatcccgattctttctggcagcaattgaacgagattcatgctctgggcggaggggatgagcctgagatgtgtctaagcgccctgcagctcgcactgctgcatacgcctcctttaagcgatattttcgttttcactgatgccagtccaaaggacgcgtttctgacaaatcaggtggagtcactcacccaggagcgaaggtgtcgcgtaacgtttctcgtgacagaggatacctcccgtgtgcagggtcgcgcaagaagagagatcctgagccctcttaggtttgagccctataaagcagtggccttggcaagcggaggagaggtgatttttactaaggatcagcacattagggacgttgcagcaattgttggggaaagtatggcagctctggtgacgcttccattggaccctccagtcgttgtcccgggacagccactcgtgttctctgtggacggactgctgcagaagattactgtgagaatacatggcgatatcagtagcttttggatcaagaaccccgctggtgtttctcagggccaagaagaaggaggcggtccactcggccacacccggcgatttggtcagttctggatggtgaccatggatgatccccctcaaactggaacctgggagatccaggtgacagccgaagacacccctggggtccgcgtacaggcacagaccagcctagactttctttttcattttgggataccgatggaggatggcccacacccaggcctctaccccctgacccagccggtggctggacttcagactcaactgttagtcgagtctcagagctggggctcttctgcagcattcctcccaagacacccctctaggggaccccgagggtgtcgcactcggccaggtgctctgggtgccagagggaccagtggagccagaagcccgaggagcctcgctgtggcccacgccgcagtccacccttag

SEQ ID NO: 269505 - DNA, 2067 bp, Artificial Sequence
  derived and/or modified sequence
atgctgcccacagaagtgccccagtcgcatcccggaccttctgctctcctgctcttgcaattgctgctgccacccacctccgccttttttccgaacatctggtctctgttggccgcaccgggttcgatcacgcatcaggacctgaccgaggaagccgctctaaatgttacgctgcaactctttctggaacagccaccacccggaagacccccactcaggcttgaggactttctgggtcggacacttctcgcagatgacttatttgcggcatatttcggaccaggctcctcccgcaggtttagagctgcccttggtgaagtaagtcgcgcaaacgctgctcaggatttcctccccacatccaggaatgatcccgatctacacttcgatgctgaaaggctcggtcaaggccgagcacgtctggtcggcgcactgcgtgaaaccgtggtagctgctagggcactcgaccacacattagctagacagaggctgggggcagctttgcatgctctacaggatttttatagccactccaactgggtggaactgggcgagcaacagccacaccctcatctactttggccaaggcaggaattgcaaaatctggcgcaggtcgccgatcccacatgtagtgactgcgaagaactctcttgtcctcgtaattggctggggtttactctcctgaccagcgggtactttggcacgcatccccctaaacctcctgggaaatgctctcacgggggtcattttgaccggagctcaagtcagcctccaaggggaggtatcaataaagacagcacttcccccggattcagcccgcatcacatgctgcatctgcaggcggcaaagttagccctgcttgctagtatccaggcattttcccttctacgatcccgactaggcgacagagatttttcaagacttttagacatcacccctgcgtcctctcttagtttcgtgttggatacaactggatccatgggcgaggagatcaacgctgctaaaattcaggctcgccatttagtcgaacagcgaagaggatcacctatggagccggtgcattacgtgttggtaccattccacgacccgggattcggaccagttttcactacgagtgacccggatagcttttggcagcagctgaatgagattcatgcacttggcggaggcgacgaaccagagatgtgtctctctgcattgcagctggctctgctgcacactccgcctttatccgatatcttcgtgttcaccgacgcctcaccgaaggacgcgttcctgacaaaccaagttgaatctctgactcaagagagaagatgccgcgtgacgttcttggtgacagaggacacaagcagggtgcaggggagagctcgtcgggaaatccttagtccactgcgttttgaaccctacaaagccgttgccttggcctccgggggagaagtgatattcactaaagaccagcatattagagatgtcgccgcaatcgttggcgagtcgatggccgctctggtgacattgcctcttgatccaccagtggtggttcctggacaacctctggttttttcagttgacggattactgcagaagattaccgtcagaatccatggcgatatctcttcgttctggataaagaatcctgctggtgtgagccagggccaggaagagggagggggaccactgggccacactagaaggtttggacagttttggatggtgaccatggatgatccgcctcagaccggaacatgggaaatccaggttaccgctgaagatacaccgggagtacgagtgcaggcgcagacctccctcgacttcctctttcactttggcatccctatggaggatggtccgcacccaggattgtacccgcttactcagcccgtggcgggactgcagacccagctgttggtagaatctcagagctggggctcgtctgcagctttccttccaagacatcccagccgtggccctagaggatgcaggacaagacctggcgctctgggcgctcgcggtacttccggcgcaaggagtccgaggtcactagcagtggcccacgctgcggtgcacccttag

SEQ ID NO: 269506 - DNA, 2067 bp, Artificial Sequence
  derived and/or modified sequence
atgttacctacagaagtcccccagagccatcctggacccagtgcattgttattgctgcaactgctcctgccccctactagcgcatttttccccaatatttggtccctcctcgctgcgccaggcagcataacacaccaggacctaacagaggaagcagcactgaacgtcacattgcagttgttcctcgagcagcccccacccggtaggcctcctctcagactggaggacttcctcggacgaacccttttggcagacgatttgttcgccgcatattttgggccaggcagcagtcgacgcttccgtgccgcactgggcgaagtgtcccgggctaatgcagcccaggattttctgcctacatcgagaaacgaccccgatctccacttcgatgccgaaaggcttgggcaaggacgcgcacggctcgtgggagctctccgtgaaacggtagtggccgcacgagctctcgatcacacgctagcgaggcagcgactcggtgctgccttacatgctttgcaagacttttatagtcatagcaactgggtagagttaggagagcaacagccacacccacatctcttgtggccccgacaggagttacagaacctcgcccaagtcgcagacccaacttgttctgactgcgaggagctgtcctgtcccaggaactggctggggttcaccctcttaacaagcggctattttggcacgcaccctcccaagccgccagggaaatgtagtcatgggggacacttcgaccgctccagttctcaacctccacgcggtggcattaataaggactccacatctcccggtttttctcctcatcacatgttgcacttacaggcggcaaaacttgcactcctcgctagtatacaggcattctcattactgagaagccggctcggagacagggacttttcacgtctgctcgacatcacccctgcgtctagtttgagcttcgtgctggacacaactgggtctatgggcgaggagatcaatgcagccaagatccaggcacggcacttagtggagcagcgcaggggatctccaatggagcccgtacattacgtcctggtcccattccatgacccagggttcgggccagttttcactacctcggatcccgactccttctggcagcagctgaacgagatccatgcactgggcggaggggatgagcctgagatgtgtctatcagctttgcaactggctctccttcataccccacctctgagcgacattttcgtgttcacagacgcttctcccaaggatgcgtttctgaccaaccaagttgaaagccttacccaggagaggcggtgtcgggtgaccttcctcgttaccgaagacacctcgcgcgtccagggcagggcgagaagggaaatcttgagccccctgcgcttcgagccttataaggctgtggccctagccagcggaggcgaagttatattcaccaaggaccagcacatccgagacgtggcagctatcgtcggagaatccatggctgcactggtcaccttgccattggacccaccagtagtggtgccaggtcagcccttggtcttttctgtagacgggctcttacagaaaatcacagtgagaatccacggggatattagttccttctggataaagaatccagccggagtcagtcagggccaagaggaaggcggaggacctctcgggcacacacgcagatttggacagttttggatggtgaccatggacgatcctccccaaaccgggacgtgggagattcaagtcacggctgaagacacaccaggcgtccgagtgcaagctcagacctccttggactttctgtttcacttcggtatcccaatggaggatggaccgcatccaggcttgtatccactcacacagccagtcgctggcctgcagacccaactgctggttgagagccaatcgtggggttctagtgccgcattcctgccccgacacccctcccggggtccaaggggatgccgcacccggccaggggcacttggagcgagaggaacttctggagcccgaagtccgcgttccctggccgtggcccacgcggctgtacacccctag

SEQ ID NO: 269507 - DNA, 2067 bp, Artificial Sequence
  derived and/or modified sequence
atgctgcctactgaagttccacaaagccatccaggccccagtgctttactgctcctacagctgctccttcctccaaccagcgcctttttccctaacatttggtccctacttgccgcccccgggtcaatcacacaccaggacctgactgaggaggccgccctgaacgtcaccctgcaactttttctggagcaacccccaccaggccggccgcctctgcggttggaggatttcctgggacgtaccctcctggctgatgatctgtttgccgcgtacttcgggccaggatcatcccgccggttccgggccgcccttggcgaggtgtccagagctaatgcagcgcaggactttctgcccacctctcgcaatgatcctgacctccacttcgatgctgagcggctggggcaggggagagctcgactcgttggcgcactgcgtgagactgtcgtggccgctcgtgccctagatcacactttggcaaggcaaaggctgggcgccgccctgcacgcactccaagacttctattcgcactctaattgggtagagttaggcgaacagcagcctcacccccacctcctctggccccgccaagagctccagaacctggcacaggtggctgaccctacctgctctgactgtgaggagttgtcatgtccccgaaattggctcggattcaccttgcttaccagtggctacttcggcacccatccaccaaagccacccggcaaatgctctcacggcggccactttgatcgatcttccagtcaaccccctaggggcggtatcaacaaagattctacttcaccggggttctctccacaccacatgctgcacctccaggccgccaaattagcactattagctagtatccaggctttctctctgctcagatctagattgggcgaccgtgactttagccggctgctcgatatcacccctgcaagctcactgagttttgtcttggatacgactggatcgatgggagaagaaataaacgcagctaagatccaagcccgacacctggttgagcagcgccgcggctcaccgatggagcccgtgcattacgtgcttgtacctttccatgatcctggttttggcccagtctttacaacctcagacccagattcattctggcagcagctcaatgagattcatgcccttggcggcggagacgaacctgaaatgtgtctttctgccctacagctggcgctcctgcacaccccacccttgagtgacattttcgtgtttactgatgcgtcccccaaagatgctttcctgactaaccaggtagaaagtctcacacaggagagacggtgtcgagtaacgttcctggttacagaggatacatccagggtgcagggccgagctcggagggaaatcttgtcacctttgcgttttgaaccttacaaagctgtggcgttagccagcgggggagaagtaatctttaccaaggatcagcacatacgggacgtggcagcgatcgtaggagaaagcatggcagctcttgtgacattaccgcttgatcccccagtagtcgtgccgggccagccattggtgttttctgtggatggcctgctgcaaaaaatcactgttagaatccatggcgacatcagctccttctggatcaagaaccccgccggagtgagtcaagggcaagaagagggaggagggcccttaggccacacccggaggtttgggcaattttggatggtaacgatggatgacccaccacagaccggaacatgggagatccaggtcacagcagaggacactcccggtgtgcgggttcaggcacaaacctctctggacttcctgttccatttcggtattcctatggaagatggcccacacccagggttatacccccttactcagcccgtggccggcttacagactcagctactggtcgagagtcagtcatgggggtcttcagccgcttttctgccacggcacccctcccgcggtccccgaggatgcagaacaagaccaggcgccctgggcgcacgcgggacaagcggcgcccggtctcctcgaagcctggccgtagcgcatgccgccgttcacccttag

SEQ ID NO: 269508 - DNA, 2067 bp, Artificial Sequence
  derived and/or modified sequence
atgctcccaactgaagtgccccagtcccatcctgggccttctgccttattgcttctacagctcttactaccccctacctctgccttctttcccaacatctggagcttactggcagccccaggaagcattacacaccaggaccttaccgaggaggccgccctgaacgttacactgcagctttttctcgagcaacccccccccgggaggcccccacttcgcttggaagatttccttggtaggacacttctcgcagacgacctgttcgcagcgtatttcggcccaggaagttcacgtcgatttcgagccgccctgggcgaagtttcacgggcaaatgcagctcaggatttcctaccaacttcaaggaacgatccggatctccacttcgacgctgagagactcggacaaggcagagcccggttggtgggggccctccgcgagaccgtcgtggccgctcgggcccttgatcatacacttgcccgacagcgcctgggggccgctcttcatgccctccaggatttctattcccactctaactgggtagagctcggtgaacaacagcctcaccctcatctactgtggccccgccaggagcttcagaatctcgctcaggtggccgacccgacctgcagtgactgcgaagaactgagctgtcccagaaattggctggggttcaccctgctgacctcaggatatttcggcacccaccccccaaagcctccaggaaaatgctctcacggtgggcacttcgatcgatccagttctcagccacctagaggaggaattaataaggactctactagtcctgggttcagtcctcaccacatgctccatcttcaggccgctaaactggccctcttggcctccatccaagcattctccctgctgagatcgcggctgggggaccgcgacttcagtagactactggatattacccccgcgtcaagtcttagtttcgtattagacacaactggctccatgggcgaagaaatcaacgccgccaaaatccaggctagacacttagtagagcagaggcgtgggtctcctatggaacctgtgcactatgtcttagtcccattccacgaccccggctttggtcctgtgttcacaacaagcgacccagattccttttggcagcagcttaatgagattcacgcactcggtggaggcgatgagcccgagatgtgcttgtccgccttgcagttggcactcctacacacacccccattgagtgacatctttgtgtttaccgacgccagcccaaaagacgcgttcttaaccaaccaggtcgagtctctgacccaggaacgaagatgcagagttacattcttagtgaccgaagacacctctcgtgtgcagggaagagcgcggcgagagatactgtcccctttacgtttcgagccgtataaagcagtggcgctagccagcggaggcgaagtcatttttaccaaagatcagcacatcagagatgtggcagccattgtaggcgaaagcatggcggccctcgtaacattgcctcttgacccacccgtcgttgtccctggacaaccgctggtgtttagcgttgatggattactgcagaagattactgtgcgaattcacggcgatatctccagtttctggatcaaaaatcctgctggagtgagccaggggcaggaagaaggaggcggtcccctgggccacacccgccgctttggacaattctggatggttaccatggatgacccaccccagacgggcacctgggaaattcaggtcactgctgaggacaccccgggcgtacgggtccaagctcaaacgtccctcgattttttgtttcacttcgggatccccatggaggacggcccacacccaggactttaccccttgactcagccagtagctggactgcagacacagctgctggtggaatctcagtcttgggggtcgagcgcggcctttctgcctaggcatccttctcgcggtccgcgagggtgtagaaccagaccgggagcgctaggtgctcgcgggacgtccggcgctaggagtccacgctcgcttgccgtcgcacacgccgcggtgcatccatag

SEQ ID NO: 269509 - DNA, 2067 bp, Artificial Sequence
  derived and/or modified sequence
atgctccccaccgaagttccacagtctcatcccgggccttccgccctcttgctgctccagctgttactgccacctacatccgccttctttcctaacatctggtctcttcttgcagcacctggatctatcacacatcaggacctgacagaagaagcagcactgaatgttacactgcagctgtttttggaacagccgcccccgggccggcctccacttaggctggaagattttctgggacgcaccctgctggctgatgatcttttcgcagcctactttgggcccggcagcagccgacgattccgggcagcactgggcgaagtgagtagagctaacgctgcacaggactttctacccacgtcgcgtaacgatcccgatctccatttcgatgctgagcgcctgggacagggtagagcgcgcttagttggagccctgagagaaacagtagtggccgcccgcgcactggaccatacgttggcccggcagaggctcggagccgcattgcacgccctccaggacttctactctcatagtaattgggtcgagcttggagagcagcagcctcatccacacttgctttggccccggcaggagctgcagaatcttgcccaggtcgccgatccaacatgttccgattgtgaggaattgtcctgccctagaaattggttgggattcacgctgctgactagcggatactttggcacacacccgcccaagcctcctggcaaatgtagtcacggcggtcatttcgatagaagctcctcccaacccccaaggggcggaattaacaaagactcaacaagcccaggattcagcccacatcacatgctgcacctccaggccgctaaactagccctactagcatccatccaggctttctctctgttaagatctagacttggtgatagggacttctctcgcctcctagacattacgccagcgtcatcgctgtcctttgtcctcgacactacagggtccatgggggaggagatcaacgcggctaaaatccaggcgaggcaccttgtggaacagcgacgtggatcacctatggagcctgtccattatgtgctcgtaccctttcacgatccaggtttcggtcctgtctttacaacatctgatcccgattcattctggcagcagctcaacgaaattcacgccctgggaggaggcgacgagcccgagatgtgtttgagcgccctccaactcgcattgcttcatacaccacccctcagtgacattttcgtgttcacagacgctagcccaaaagacgcattcctgaccaaccaggttgagtctctgacgcaagagcggagatgtagagtgaccttcctcgtaaccgaggatacttcccgtgtacagggtcgcgcaagaagagagatcttatcaccgctgcgattcgaaccctataaggcggttgccctggcttccggcggcgaggtcattttcaccaaagaccagcacatcagagatgttgcagcaattgtgggagagagcatggcggccctggtcacactgcctctggatcctccagttgttgtccccggtcagcccctggtcttttcggttgatggattgctccagaagattactgttagaatacatggagacatttcctccttctggatcaagaatccagcaggcgtatctcagggacaggaggagggtggcgggcctttgggtcatacacgtaggttcggccaattctggatggtgaccatggatgaccctcctcagaccggtacgtgggaaattcaggtcaccgcagaggacactcctggggtccgcgtccaggcccagacatccctagactttctctttcactttggtattccaatggaggacggcccacaccctggactttacccactaacccagccagtggcagggctgcagacacagctgctcgtagaatctcagagctgggggagttctgctgcatttctgccccgtcacccaagtaggggccctaggggttgccggacccgtcctggagccctgggtgccaggggcacctcgggcgcacgctcgcctcggagccttgcagtggctcacgccgcagtgcatccgtag

SEQ ID NO: 269510 - DNA, 2067 bp, Artificial Sequence
  derived and/or modified sequence
atgctcccaacagaggtgccccagagccatcctggtcccagcgcgctcctgctgctgcagctacttctgcctccgacatccgctttcttcccaaacatatggagtctgctagccgcgcctggcagcataactcaccaggacttgacagaggaagcagctctgaatgtgaccctgcagttattccttgaacagccaccccctggaaggccgccactcagactcgaggattttctgggaagaactctactggcggacgatcttttcgccgcatacttcggtccaggctcatcaagaagattccgggcagccttgggcgaggtctcaagggctaacgcagcccaggactttctgccaactagccgtaacgatcctgacttgcacttcgacgccgaacgactgggccaaggacgagcccgcctcgtcggcgcgcttagagagaccgttgtagccgcacgtgctctggaccacacccttgccagacagcggttgggcgccgccctgcatgcacttcaagatttctatagccatagcaactgggtggaacttggagagcagcaaccacacccacatctcctttggccacgacaagagctacagaacctcgcccaggtagcagacccgacctgttcggactgcgaagaactgagctgtcctcgaaattggctgggattcactctgcttacaagtggctattttggcactcatccacccaaaccccccgggaaatgtagccacggcgggcacttcgatcgttctagcagtcagccaccaagagggggaattaacaaggactccacatctcccggattcagtcctcaccatatgcttcacctgcaagcagctaagttagctctgctggcttctatccaggccttctctcttctgcgctccaggctgggcgatcgggattttagccgactcctggacatcactccagcttcctccctgtcttttgttctagacacgacaggttcaatgggagaggaaatcaatgctgccaaaatccaagcaaggcatctagtcgagcagagacgggggtctccaatggaacccgtccactatgtactcgtaccattccacgaccctggtttcggtccagtgtttactacctccgaccctgacagcttttggcagcagttgaacgagattcacgctctcggcggcggcgatgagcccgagatgtgtctgtccgccctgcaactcgccctgctgcacacgcccccgctgtccgatatttttgtgttcaccgatgccagccctaaggatgcatttctaactaatcaggtagagagcctcacacaagagcgccgctgccgagttacattcctggttaccgaagatacctctagggttcaagggcgcgcccgaagagagattctgtctcctctgagatttgagccatacaaggccgtggctctggcctcgggcggggaggtcatttttactaaagatcagcacattcgtgatgtggcggctatagttggcgaatctatggcagctctggtaactttgcccctggatcccccagtcgtagtgccaggacagccccttgtgttcagcgttgacggacttcttcagaagattacggtcaggatccacggggatatcagctctttctggataaaaaatcctgcaggcgtctcccaagggcaggaagagggcgggggcccattaggccacaccaggcggtttggtcagttctggatggtaacgatggacgaccccccccagacgggcacatgggaaatacaggtcacagccgaggacaccccaggcgtgcgcgtgcaagcccagacgagccttgacttccttttccatttcggtatcccaatggaagacgggccacaccccgggctctaccccttgactcaaccagtagccggtcttcaaactcaactgctcgtggaaagccagtcctggggcagtagcgctgcctttctgcccaggcaccccagccgtggcccccgggggtgtcggacacgccctggggcactgggtgcacgcggaacgagtggagcccgttctccaaggtcccttgctgtggcacatgccgccgtgcacccctag

SEQ ID NO: 269511 - DNA, 2067 bp, Artificial Sequence
  derived and/or modified sequence
atgttacctaccgaggtgcctcagtcccacccaggaccctctgctttattacttctgcagctgctgctgccacctacttctgcattctttcctaacatttggtccctgctggcagcaccaggatctattacacaccaagacctcactgaagaggccgccctgaacgtcactcttcaactcttcctagaacagcccccacccggccgaccccctctgcgcttggaggactttctcggtcgtaccttgttggccgacgatttgtttgccgcttacttcgggcctggctcctctcgaagattccgcgctgccctgggagaggtgtctcgcgcaaacgccgcccaggacttcttgcccactagcaggaatgacccagacctgcactttgacgctgagagactcgggcaagggcgcgcccggctagtcggcgccctacgggaaacagtcgtggccgctagagctctggaccacaccttagcccggcagcgccttggggctgccttgcacgctcttcaggatttttatagccacagtaattgggttgagttgggggaacaacagcctcacccacatcttctatggcctagacaggaactgcagaaccttgcccaggtggccgaccccacctgtagtgattgtgaggaactgagttgcccgagaaattggctgggatttaccctgctcacctctgggtattttggaacacacccacccaagccgcctggaaagtgctctcatgggggacacttcgacaggagctctagccaaccccccagaggtggcataaacaaggactctacctccccagggttcagcccacaccacatgttacacttgcaggccgctaagttggccttactcgcctctattcaggccttctctcttcttcgttctagacttggcgacagggatttttcaagactcctcgacattactcccgcttcatctctctcctttgtgctagataccacgggcagcatgggagaggagattaacgccgccaaaatccaggccaggcacctcgtggagcagcgcagaggttcccccatggaacccgtgcactacgttctcgttccatttcacgaccctggatttggaccagtgttcactacctctgatccggacagcttctggcagcaactcaacgaaattcacgcactgggtggaggggatgaaccagagatgtgcctgtcggccctccagctggcgttgcttcacaccccaccactctccgacattttcgtgttcacggatgccagccctaaggacgcctttttgacaaatcaagttgaatccttaacacaggaacgacgatgcagagtcacgttcttggtgaccgaagatacaagccgggtacaaggcagggccaggagggagattctgagcccattgcgcttcgaaccatacaaggcggtcgcccttgccagcgggggcgaagtgatctttactaaggaccagcacatacgagacgtagcagccattgtcggggaatcaatggccgctctggtcactctgccactagatccgcccgtcgtggtccccgggcaacctctggtgttctccgttgatggcctgctgcagaagattactgtgagaattcatggagacatctcatccttctggatcaagaatccagccggcgtatcccaggggcaggaggaaggaggcggcccgctcgggcatactcgccggtttggccagttttggatggtcaccatggatgatcccccacaaactggtacctgggaaattcaagttaccgctgaagatacaccgggagtcagggtacaggcacagacatctctcgattttctgttccattttggtatccctatggaagacggaccacatcctggattgtacccactgactcaacctgtggcaggtctgcagacacagctgctggtagagagccagagctggggcagctcagccgcctttctcccaagacacccttctcggggaccccgaggctgcagaacccgccccggtgcactcggcgcccgtggcacctccggagctaggtcaccacggagcttggcagtcgcacacgccgccgtccacccgtag

SEQ ID NO: 269512 - DNA, 2305 bp, Artificial Sequence
  derived and/or modified sequence
ctcactcacctccgcactgcagccaagggaggcccgccctggcgtgggctgctgcctgtggctttgggcaggcaggagcgaaagggccaggggttgcctgtcctcccccaccctgttgaggccttcctccccctctgctgagcctcggttaattataactctgacctaagtgccctgtgacgtcaagcccgggccagccctgcccaggagacccagcaaccaggtccatgtctcagccatgctccccacggaggtcccccaatcccacccgggcccctcagcgttgcttctgctgcagctgttgctgccccccacatctgccttcttccccaacatctggagcctgctggctgcccctggctccatcacccaccaagacctaactgaggaggcagcgctcaacgtcaccctgcagctcttcctggagcagccacccccaggccgcccccctcttcgtcttgaggacttcctgggtcgaacactccttgctgatgacctctttgccgcctactttggacctggttcttctcggcggttccgagcagccttaggtgaggtgtctcgtgccaatgcagcccaggacttcctgccaacttccaggaatgaccccgacctgcactttgatgctgagcgactgggtcagggacgcgcgcgcctggtaggggctctgcgggagaccgtggtggcagccagggcccttgaccacaccctggctcgccagcgcctcggggctgcacttcatgccctgcaggatttctacagtcatagcaactgggtggagctgggcgagcagcagccacaccctcacctcctctggccaaggcaggagctccagaacctggcacaagtggccgatcctacctgctccgattgcgaggagttgagctgccccaggaattggctgggcttcacactcctcacctctggctactttggaactcatcccccgaaacctccagggaaatgtagccacgggggccattttgaccggagcagctcccagccaccgaggggaggcatcaacaaggacagcacatccccaggcttctcccctcaccacatgctgcacctccaggctgcaaaactggcccttctagcctccatccaggccttcagccttctgcgaagccgcctgggagacagggatttctccaggctgctggacatcaccccagcctccagcctgagctttgtcctggacaccacgggcagcatgggtgaggagatcaacgctgccaaaatccaggctcgccaccttgtggagcagcggagaggcagccccatggagcctgtccactatgtcctggtgccttttcatgacccagggttcggccctgtctttacaaccagtgaccctgacagcttctggcaacagcttaatgagatccatgccttggggggtggagacgagcctgagatgtgcctgtcagccctgcagctggccctgctgcacacacctccactctcagatatctttgtcttcacggatgcctcccccaaggatgcctttctcaccaaccaggtggaatccctgactcaggagcggcgctgccgggtaacattcctggtgactgaagatacatcaagggttcagggtcgagctcggcgtgagatcttgtcccctctgcgttttgagccatacaaagcagtggccctggcctcaggaggagaggtgatcttcaccaaagaccagcacattcgagacgtggcagccattgttggggagagcatggctgccctggtgactcttcccctggaccctcctgttgtggtgcctgggcagccacttgtgttcagcgtggatgggctgctccagaagatcacagtccggatccacggagacatcagcagcttctggatcaagaaccctgcaggggtctcccagggccaggaggaaggcgggggtcctctaggtcacactcgccgctttgggcagttctggatggtgaccatggatgaccctccacagacaggaacctgggagatccaggtcacagctgaggacacccctggggtgagagtgcaagcccagacctccctggacttcctcttccactttgggatccccatggaggatggaccccaccctggcctctaccccctgactcagccagttgcaggtcttcagacccagctgctggtagaaagccaatcctggggatcctcagccgcatttctcccacgtcatccttcgaggggtcccagagggtgccgaactaggccaggtgcccttggagcccgtgggacctccggagcgaggtctcctcgcagcctcgctgtcgcccacgctgctgtccacccctag

SEQ ID NO: 269513 - DNA, 2067 bp, Artificial Sequence
  derived and/or modified sequence
atgttgccaactgaagtaccccagagccaccctggtccatccgccctcctgttgttgcagttgctgcttccccctaccagtgccttcttccccaacatttggtcactgcttgctgctccaggatcaatcactcatcaggatttgaccgaggaagccgccctcaacgtaacactgcaactctttctggaacagcccccccccggccggccacctttacggttagaggactttttaggacggactctcttagccgatgatctgttcgccgcgtacttcggtcccggatctagtcgtcgtttccgggctgccctaggtgaagtcagtcgcgccaacgcagcacaggactttcttcccactagccgtaacgaccctgatttgcattttgacgctgaacgcctcggacaggggcgcgcaagactcgtgggcgcacttcgagagacagtcgtggcagcacgagcactggatcacactctcgcccgccaacgcctgggagccgctctccatgcactgcaggacttctactctcacagcaactgggtagaactcggcgagcaacagccacaccctcacctgttatggcctagacaagaactccagaatctggcacaggtggctgaccctacctgctctgactgtgaggagttgtcatgtccccgaaattggctcggattcaccttgcttaccagtggctacttcggcacccatccaccaaagccacccggcaaatgctctcacggcggccactttgatcgatcttccagtcaaccccctaggggcggtatcaacaaagattctacttcaccggggttctctccacaccacatgctgcacctccaggccgccaaattagcactattagctagtatccaggctttctctctgctcagatctagattgggcgatcgcgatttctcccgactcctcgacatcacaccagcttctagtttatcattcgtgctagacaccacgggctccatgggtgaagaaattaacgcagctaagatccaggcaagacatttggtggagcagagacgcggctcgccaatggaaccagtgcactacgtacttgtaccttttcacgaccctggcttcggaccggtttttaccacttctgatcctgactccttttggcaacagctcaacgagatccacgcgctgggcggcggagatgagccagagatgtgtcttagtgctctgcagctggcattactgcacacaccacctctttcagacatattcgtcttcaccgatgcctctccaaaagacgccttcttgaccaaccaggtcgaatccctgacccaggaacgtagatgcagagtcacctttttggtaacggaagatacctcccgtgttcaggggagagccaggagggaaatactgagtccactaaggtttgagccctacaaagccgtcgcacttgcttccggcggtgaagtgatatttactaaagaccagcatatccgcgacgtcgcagcaatcgtgggagagtccatggcagccttagttacattgcctctcgacccacccgtagtcgttccaggccagcctttagttttttctgtggacgggctgctgcagaagataacagtgagaatacatggcgatatttcatctttctggatcaaaaatcctgcgggtgtcagccaaggacaagaggagggtggaggcccgttaggccacaccagaaggtttggacagttttggatggtgacgatggatgatcctccacagactgggacttgggaaattcaggtcactgccgaggacactcctggtgtgcgggttcaggcccagacatccctcgacttccttttccatttcgggatccccatggaggacggtcctcaccctggtttataccctctcactcagcctgtcgcaggtctgcagactcagttgttggttgaatcccagtcttggggcagcagcgcggcctttctacccagacacccatcccgcggcccaagaggatgcaggacacgtccaggagcactcggagctcgtggcacatctggagctcggtcgccccggtctctggctgtggctcacgccgccgtacatccctag

SEQ ID NO: 269514 - DNA, 2067 bp, Artificial Sequence
  derived and/or modified sequence
atgcttcccaccgaagtcccgcagtcccatcccggtccctctgcattgctgttattgcaacttctccttccacctacttccgccttcttcccaaacatttggagcctattggcagccccaggatccatcacacaccaggacctcaccgaggaggccgctctcaatgttacccttcaactgttcctcgaacaaccgccacctggccgcccccctttgcggttggaagatttcctcggacggacactcctggcggacgaccttttcgcagcttactttggaccaggctcaagccgacggttcagagccgctctaggagaagtgagtcgagctaatgcagcccaggatttcctgcctacttctaggaatgacccagatctacattttgatgccgaacgcttaggccagggcagagccagacttgtcggcgccttgcgtgaaacggtggtggccgcccgcgcactcgaccatacccttgcacggcaacgactaggagccgcacttcacgccctgcaggacttctacagtcactctaactgggtagaactgggcgagcagcagcctcacccacacttgctgtggcccaggcaggaactacagaatctggcacaggtcgcagacccaacctgctccgattgcgaggaattaagttgcccgcgcaactggttagggttcacattgctgacatccggatacttcggcacccatcccccaaaacctcccgggaaatgtagccacggcggccatttcgaccgttcatcatcccaacctccccgcggcggcatcaataaggactcaacttcaccaggattttccccacatcatatgttacacttgcaagccgccaaattagcactgctcgctagcatccaggccttctccctgctgagatcacggctcggggatcgggatttttcaagactactggatattacacccgcaagttctctgtcattcgtactggacaccactggctctatgggggaggaaatcaacgcagcgaaaatacaggcgcgccacttggttgagcagagaaggggctcacctatggagcccgtacattacgttttagtgccttttcatgaccctggattcggcccagtcttcacaacaagcgacccggactctttttggcagcaattgaacgaaatacatgctctcggaggtggggacgagcccgaaatgtgtctgtccgcacttcagctggcccttctccatactccacctctatccgacatctttgttttcaccgacgcctctcccaaagatgcttttctgacgaatcaggtcgagagtctaacccaagaaagacggtgcagggtcacttttttggtgaccgaagatacatctcgcgtgcaaggtcgggccaggcgagaaatcctgtctccccttagatttgaaccctacaaagccgtggcattggcaagcgggggcgaagttatttttaccaaggatcaacacattcgggacgttgctgcgattgtcggtgagtcaatggcagccctggtgaccctcccattagatcctccagtggttgtacccgggcagcctcttgtttttagcgtcgatggcttgcttcagaaaatcacggtgagaatacatggagatatttcaagcttttggatcaaaaacccagcaggcgtttctcaaggccaggaggaggggggaggtcctctaggtcacacacgtcgttttggccagttttggatggtaactatggacgacccaccgcagaccggcacgtgggaaattcaggtaacagcagaagacacccctggagtgagggtgcaggctcagacttccctggacttcctgtttcactttggtatacctatggaggatggtccccaccctgggttgtacccccttacgcagccagtggccggcctccagacccagctcctggtagagtctcagtcttggggatcttccgcagcgtttttacctcggcaccctagtaggggaccccgcggatgtcgcacgaggcccggcgccttgggtgcaagaggaacatcaggggctagatcaccccggtccctagccgtcgctcatgcagccgtgcacccttag

SEQ ID NO: 269515 - DNA, 2067 bp, Artificial Sequence
  derived and/or modified sequence
atgttaccaacagaagtgccacagagccaccccggtcccagcgctctcttactattacaattactcctcccccctacatccgcattcttccctaacatttggagtctccttgccgccccagggtctattactcaccaggatcttaccgaagaagcagctctgaatgtgaccctgcagctctttctggagcaacctcctcccggcagacccccacttcgattggaggacttcttaggccggaccctcctggcagacgacctcttcgcagcttatttcggacccggtagttccagacgctttcgggcagcactgggcgaagtgagtagagctaacgctgcacaggactttctacccacgtcgcgtaacgatcccgatctccatttcgatgctgagcgcctgggacagggtagagcgcgcttagttggagccctgagagaaacagtagtggccgcccgcgcactggaccatacgttggcccggcagaggctcggagccgcattgcacgccctccaggacttctactctcatagtaattgggtcgagcttggagagcagcagcctcatccacacttgctttggccccggcaggagctgcagaatctggcacaggtggccgatcccacatgttccgattgtgaagagctttcttgccctaggaattggttgggctttacacttttaactagcggatattttggaacacaccctcccaaacccccaggcaagtgctcccatggtgggcactttgaccgctcttcatcacaacccccccgcgggggcatcaataaagacagtacaagccctggtttcagcccacatcacatgctgcatctgcaggctgcaaagctggcgctgctggcttccatccaagctttttcactgctcaggtcccgactcggcgacagagatttttcacggctgctagatatcacccctgcctcatctctgagtttcgttttggacaccaccggctcaatgggcgaagaaattaatgctgccaaaatccaggcaagacatctcgtggaacaacggagaggctcacccatggaacctgtccactacgtgctggtacccttccacgatccaggattcggacctgtgttcactacctccgaccccgacagcttttggcaacaactgaatgaaatccacgcactgggagggggggatgaacccgaaatgtgtctctctgcacttcaactggctctgttgcatacaccacctttgtccgatatcttcgtttttacagatgcaagcccaaaagacgccttcttgacaaaccaggtcgagtctctaactcaggaacgaagatgcagagtcactttcctggttacggaagatactagtagggttcaaggtcgagctcgtcgggaaatcttgagtccactgcgctttgagccttataaagccgtggccctggccagtgggggagaagtaatcttcaccaaagatcagcacatcagagacgttgcggccatcgttggagagtccatggcagctcttgttactctccctttagatcctcctgtggtggttccagggcagccgctggtttttagtgtggacgggctgttacagaagatcactgtcagaattcatggtgatatatcttcgttttggatcaagaaccccgcaggtgtgagccaaggtcaggaagaaggcggagggccattaggccatacaagacgctttggtcaattttggatggttacgatggatgaccctcctcagacaggtacctgggaaatacaagttacagcagaggatacacctggcgtgagagttcaggcccaaacatccctcgatttcttgtttcacttcggtattccaatggaggacggtcctcatcccggtttgtacccattgactcagcctgtggccggcttgcaaacacagcttcttgttgagagccagtcgtggggatcaagcgcagcttttctgcccagacatccaagtaggggcccacgtgggtgccgaactagacccggagcattaggcgcacgtggtacaagcggagcccggtcacctcggagtctcgcagtggcgcacgccgccgtgcacccctag

SEQ ID NO: 269516 - DNA, 2067 bp, Artificial Sequence
  derived and/or modified sequence
atgctgcctaccgaagtccctcagagccatcctgggccgagcgctctactcctcctccagctgcttctcccccctacctctgcttttttcccaaatatctggtcattattggccgcccccggctccataacgcatcaggatctcacagaggaggccgctctcaacgtcaccctgcaactctttctcgaacagcctcccccaggccgaccccctttgaggctggaggatttccttggaagaaccctcttagccgatgatctgttcgcagcatattttggacccggatcttctcggaggtttcgcgctgccctgggtgaggtctcaagagcgaatgctgcgcaagattttctaccgaccagcaggaacgacccggatttacacttcgacgctgaaagattgggacagggacgggcacggttggtgggagctcttagagaaacagtcgttgcagctcgcgccctagaccatacgcttgcacgccagcggcttggagctgcacttcacgctctgcaagatttctattctcattctaattgggtggagctgggcgaacagcagcctcatccccatctgttatggcctaggcaagaacttcagaatctcgctcaggttgcagatcctacttgttctgactgtgaggaattgagttgcccacgaaactggcttggattcacactgttgaccagcggttacttcggcacccacccccccaaaccccctggaaaatgctcacacggcggacatttcgatagaagcagtagccagccacctcgtggagggattaacaaggattctacctcccctggttttagtccccaccacatgttgcacctccaggccgctaagctcgcactactggcatctattcaggcgttttctctgctgcgttcaagacttggggatcgtgacttcagtcgactgctggacatcacacccgcttcatctctgagcttcgtattggatacgaccggatcaatgggtgaagagatcaatgccgccaagatacaggccagacacctagttgaacagcgcagagggtctccaatggagccggttcattatgtgctcgtccccttccacgaccccgggttcggtcctgtttttactacttcagatcccgactctttttggcagcaattaaacgaaatacacgccctcggggggggcgatgaacctgagatgtgcctgtcggccctgcaactcgcacttttacacacaccacccctttcggatattttcgtgtttaccgacgcctcacccaaagacgcttttctcacaaatcaggtggagtcacttactcaggaacgcaggtgcagggtaacatttttggtgaccgaggacacttcccgagtgcaaggacgagccagacgcgaaatactctccccactaagatttgaaccatacaaggcagtggccctggctagcggaggagaggttatcttcactaaggatcaacacatcagagatgtggccgccattgtgggggaaagcatggctgcgcttgtgaccctgccactggacccaccagttgttgtcccagggcaaccactggttttttcagtcgatggactgcttcaaaagattaccgtcagaatccacggggacatcagttccttctggattaagaatcccgccggagtaagtcaaggacaagaggaaggcggaggacccttgggtcatacacgaagattcggacagttttggatggttacgatggatgaccccccccaaaccggtacttgggaaattcaagtgactgccgaggacacaccgggcgttagggtacaggcccagacctccctcgacttcctgttccactttgggatcccaatggaggacggacctcaccctggcctgtaccctcttactcagcccgtcgctggacttcaaacccaactgctggtcgaatcccaatcttggggctcttctgcagccttcctgccgagacatccttcaagagggccacggggttgtcgtaccagacccggtgccctaggtgctcgcggtacctccggcgccagatctcctagaagcctcgccgtcgcacatgcggctgtccacccctag

SEQ ID NO: 269517 - DNA, 2067 bp, Artificial Sequence
  derived and/or modified sequence
atgctcccaaccgaggtgcctcagagccaccccggaccgtctgccctgctcttgctccagctgctcctgccccccacatccgccttctttcctaacatctggagtctgctggccgcccccggttccattacacaccaagatcttactgaagaggctgccctgaatgtgaccctgcagctcttcttggaacagcctccacctggaagaccccctttgcgcctggaagactttttaggtcgtacactgctagctgacgatcttttcgccgcttactttggcccgggctcatctcgccgcttccgagcagccctgggagaggtctctagggcaaacgccgcacaggactttctccccaccagccgcaatgaccccgacctgcactttgatgccgaaagattaggacaaggacgcgcccggctagttggcgctttacgagagactgtggtagcggcaagagccctggaccacacgttggcacgccaaaggctcggagccgcgttacatgcgcttcaggatttttactcccactctaattgggtggagctcggagaacaacagccacatcctcacttactctggcctcgccaggaattacagaacctggcccaagtggccgatccaacatgctcagactgcgaggagcttagctgccctaggaactggctcggcttcaccctgttaacgtccggttacttcggcacacacccccctaaaccacctggcaagtgttcccacggtgggcacttcgacaggtcttcttcccaaccgcctagaggaggcatcaataaagatagtaccagcccaggattctcccctcaccacatgctccacttgcaagccgccaagttagcccttctcgcttctatacaagccttttctcttttgagatcgcgcctaggtgatcgagacttctcgagactcctggatatcacccctgcttcttcattgtcatttgtgctagacacaaccggctcaatgggcgaagagattaatgccgctaagattcaggcaagacacctggtagaacaacgacgcggatcccctatggaaccagtgcattatgttctcgtaccctttcacgatcctggcttcggtccagtgttcacaacatctgaccccgactccttttggcagcaactgaacgaaatccacgcgctaggaggaggagatgaacccgaaatgtgtttgtctgcactacagctggcactgctgcacacccctccactgagcgatatttttgtattcaccgacgcgtccccaaaagacgcgtttctaacaaatcaagtagagagtttgacgcaagagaggcgctgtagggttacattcttagtgaccgaagacacctccagggtgcaagggcgcgcaagacgagaaatattgtcccccctaaggttcgaaccatataaggccgtagctttggcatcgggcggcgaggttatatttactaaagatcagcacatccgagatgtcgcagctatcgtgggcgagtcaatggcagcccttgtaactctgcctttagacccccctgttgtcgtgccaggtcagcctctagtgttctctgttgacggccttttgcagaagattacagttcgcatccatggcgacatttcgagcttttggattaagaatccagccggagtttcacaaggacaggaagaaggtggcggtccacttggccacactcgccgtttcggacagttctggatggtgaccatggatgatcctccgcagacgggcacatgggagattcaggtgacggccgaagatacacctggcgttcgggttcaggcccagacctcgctggactttctttttcatttcggaatccccatggaggatggcccacaccccggtctttaccccctcactcagcccgtggcgggtctgcagacccaactgcttgtcgaatcacagtcttggggctcctccgcagctttccttccccgccacccaagcagaggcccaagaggctgtcgaacacgacccggagccttgggagctagaggaacgagtggagctcggagtccccgatcattggcggtagcccacgcagcagttcacccctag

SEQ ID NO: 269518 - DNA, 2067 bp, Artificial Sequence
  derived and/or modified sequence
atgctgcccaccgaggtgccccagagccaccccggccccagcgccctgctgctgctgcagctgctgctgccccccaccagcgccttcttccccaacatctggagcctgctggccgcccccggcagcatcacccaccaggacctgaccgaggaggccgccctgaacgtgaccctgcagctgttcctggagcagcccccccccggcagaccccccctgagactggaggacttcctgggcagaaccctgctggccgacgacctgttcgccgcctacttcggccccggcagcagcagaagattcagagccgccctgggcgaggtgagcagagccaacgccgcccaggacttcctgcccaccagcagaaacgaccccgacctgcacttcgacgccgagagactgggccagggcagagccagactggtgggcgccctgagagagaccgtggtggccgccagagccctggaccacaccctggccagacagagactgggcgccgccctgcacgccctgcaggacttctacagccacagcaactgggtggagctgggcgagcagcagccccacccccacctgctgtggcccagacaggagctgcagaacctggcccaggtggccgaccccacctgcagcgactgcgaggagctgagctgccccagaaactggctgggcttcaccctgctgaccagcggctacttcggcacccacccccccaagccccccggcaagtgcagccacggcggccacttcgacagaagcagcagccagccccccagaggcggcatcaacaaggacagcaccagccccggcttcagcccccaccacatgctgcacctgcaggccgccaagctggccctgctggccagcatccaggccttcagcctgctgagaagcagactgggcgacagagacttcagcagactgctggacatcacccccgccagcagcctgagcttcgtgctggacaccaccggcagcatgggcgaggagatcaacgccgccaagatccaggccagacacctggtggagcagagaagaggcagccccatggagcccgtgcactacgtgctggtgcccttccacgaccccggcttcggccccgtgttcaccaccagcgaccccgacagcttctggcagcagctgaacgagatccacgccctgggcggcggcgacgagcccgagatgtgcctgagcgccctgcagctggccctgctgcacaccccccccctgagcgacatcttcgtgttcaccgacgccagccccaaggacgccttcctgaccaaccaggtggagagcctgacccaggagagaagatgcagagtgaccttcctggtgaccgaggacaccagcagagtgcagggcagagccagaagagagatcctgagccccctgagattcgagccctacaaggccgtggccctggccagcggcggcgaggtgatcttcaccaaggaccagcacatcagagacgtggccgccatcgtgggcgagagcatggccgccctggtgaccctgcccctggacccccccgtggtggtgcccggccagcccctggtgttcagcgtggacggcctgctgcagaagatcaccgtgagaatccacggcgacatcagcagcttctggatcaagaaccccgccggcgtgagccagggccaggaggagggcggcggccccctgggccacaccagaagattcggccagttctggatggtgaccatggacgaccccccccagaccggcacctgggagatccaggtgaccgccgaggacacccccggcgtgagagtgcaggcccagaccagcctggacttcctgttccacttcggcatccccatggaggacggcccccaccccggcctgtaccccctgacccagcccgtggccggcctgcagacccagctgctggtggagagccagagctggggcagcagcgccgccttcctgcccagacaccccagcagaggccccagaggctgcagaaccagacccggcgccctgggcgccagaggcaccagcggcgccagaagccccagaagcctggccgtggcccacgccgccgtgcacccctag

SEQ ID NO: 269519 - DNA, 2067 bp, Artificial Sequence
  derived and/or modified sequence
atgttgcctacagaggttccccagtctcaccctggcccatccgcattgctcctactgcaattgttattacctccaacctccgcatttttccccaacatctggagtctgttggcagctccaggaagcattacgcaccaggatctgactgaagaagctgcactgaacgtaactcttcagctgttcctggaacagcccccccccggtaggccccccttgagactagaagacttcctggggaggacactactcgcagacgacctatttgccgcatactttggacctgggagtagccgccgcttcagggctgcgctgggtgaggttagtcgagcaaacgcagcccaggacttcctacccacgtcccgaaacgatccggacctgcactttgatgccgaaagattaggccaaggaagagccagactagtcggggcattacgggagactgtcgtggccgcacgggcgctggaccatactctagcgaggcagcggctcggtgccgctttgcacgccttacaggacttttattctcattccaattgggtggagctaggtgagcagcagcctcacccgcacctcttgtggccacggcaggagttacagaacttggcccaggtggcagacccaacctgcagcgattgtgaggaactttcctgtccgcgaaattggttaggctttaccctgttgacttcgggttattttgggactcaccccccaaaacccccaggaaagtgctcacatggcggacactttgatcgctcctcgtctcagccccctcgaggagggatcaacaaggattctacctcccccggattctctccgcaccatatgcttcatttgcaagcggccaagcttgccctactggcctctatccaggcgttcagtctcctgcggtctagactcggagacagagatttttcgcggctgctggatataaccccagcttccagcctttccttcgtcctggataccaccggttctatgggggaagagatcaatgccgccaagatccaggcacgccacttggtcgagcagaggcgtggctccccgatggagcccgtacactatgtgctggtcccatttcacgacccgggttttggaccagtatttactacttcagatcctgacagcttttggcagcagctgaacgagattcacgccctaggcggcggcgatgaaccggagatgtgccttagcgcgctccaactggcgctcctccataccccccccctgtccgacatttttgtgtttaccgacgcgagtcctaaggacgcttttctgacaaaccaggttgagtctctaactcaagagcgccgatgtagagtgacctttctggtgactgaggatacatctcgggtgcagggaagggcaaggagagagatactgagccccttaaggttcgagccgtacaaagccgtggccctggcctcaggcggcgaagtgattttcacaaaggaccagcacattagggacgtcgcagccatagtcggcgagtctatggccgccctagtcacccttcccctggatccccctgtggttgttccaggtcaaccactggttttcagcgtggacggattgctgcagaagataacagtgagaatacatggcgatatttccagcttctggattaagaaccctgccggggtgagccaaggccaggaagaaggagggggacctctggggcacacacgtcgctttggacagttctggatggttactatggacgacccgccgcagacaggtacctgggagattcaggtgacagctgaagacacccccggagtccgagtgcaggcccagactagtctggatttcctcttccactttggcattcccatggaggatggaccacacccgggtctgtaccccttgacccagccagtcgcaggcctgcaaacacagttgttggtcgaatctcagtcatggggcagcagcgcggcgtttctgcccagacatccgtcacgcggaccaagggggtgccgcacacggccaggcgctctaggcgcccgcggcacttcaggtgctaggagcccacgatccctcgccgtggcccatgccgcagtacacccttag

SEQ ID NO: 269520 - DNA, 2067 bp, Artificial Sequence
  derived and/or modified sequence
atgctcccgaccgaggtgcctcagtcacatcctggcccctcagctctgctccttctccagctcctgcttccaccaacatcagcgttcttccccaatatatggagcctgctggcagccccgggaagcattactcatcaggatctgacagaagaagctgcactcaatgtgacactccagttgtttctagaacaaccccctccggggagacccccgctccggcttgaggatttcctagggaggacacttttggcagatgatttgttcgctgcctacttcggtcctgggtcttcaagacgcttccgggccgccctcggagaagttagccgggcaaacgctgctcaggactttttaccgaccagtcgtaacgaccctgacttgcattttgatgccgaaagactcggtcaggggagagcacgtctggtgggtgccttgcgggaaacggtggtagcggcccgtgcattagaccacaccctcgcgcggcagcggctgggggctgccctccacgcccttcaggatttctacagccattctaactgggtggaactgggggaacagcagccccaccctcacctcctctggccgcgccaagaattgcagaacctggcccaggtggctgacccaacatgctctgactgtgaggaactttcctgccctagaaattggctaggcttcaccttgctcacatctggctacttcggtactcacccccccaaacctccaggcaagtgtagccacggggggcactttgatcgttcatccagccagcccccgcgaggcggaattaacaaagattccacctcccctggctttagcccacaccatatgctccaccttcaggcagcaaagctcgcgctcctggcttcaatccaagctttctcactccttcgcagcagattgggcgaccgagatttttcacggcttctggacatcaccccagcctcctcattgtctttcgtgttggacaccacaggatccatgggggaggaaataaatgcagctaaaatccaggcgaggcaccttgtggaacaaaggcgcggttcccccatggaaccagtgcactacgttttagtgccttttcatgaccctgggttcggaccagtgttcactacaagcgacccagacagtttctggcaacagctgaatgaaatacatgcattggggggaggtgacgagccggagatgtgtctgtctgctctgcaattggccttgctgcatacaccgcctctatcagatatattcgtgtttaccgacgccagtcccaaggacgcctttcttactaaccaggttgagtcactgacacaggagcgaaggtgtcgggtcaccttcctcgtgaccgaagacacttcccgtgtccagggtcgcgcaagaagagaaattctgagcccactgagattcgaaccctacaaggcagtggctcttgcttctggcggtgaggtgatcttcacaaaagaccagcacattcgagacgttgccgctattgtgggcgagtcaatggccgccctggttactctccctctggatccacccgtggtggtgcccggtcaaccactggtcttttcagtggacgggctgctccagaagataactgtgcgcattcatggggatatttccagtttttggatcaagaatccagcaggtgtctcacagggacaggaagaagggggaggccccctcggacacacaagaaggttcgggcagttctggatggtgactatggacgacccgccccagacggggacgtgggaaatacaggtgacagcggaggacacgccaggagtcagagtccaggcacaaacaagcctcgactttctgtttcatttcggcatccctatggaggacggacctcatcctgggttataccctctcacccagcccgtggctggactgcaaacccagctgctggtcgaaagccaatcctggggatcatctgctgctttcttgccaagacacccctcccgtggtccaagagggtgtagaacacgaccgggcgccctgggagcacggggaacctctggggctaggtctccacgctcattggccgtggctcacgccgctgtgcacccatag

SEQ ID NO: 269521 - DNA, 2067 bp, Artificial Sequence
  derived and/or modified sequence
atgctgcccaccgaagtgccgcagtctcaccccggtcccagcgccctgctgctgctgcagttgctgctcccacccacctcagctttctttcccaatatctggtcccttcttgctgctcccggaagcataactcaccaggacctgactgaagaagcagccctcaacgttacactgcagttgttcctggagcagccaccccctgggaggccccccctgagactcgaggatttcctcggccggactctgctcgctgatgacctgttcgcagcatactttgggcctgggtcaagcagacgtttcagggcagcactgggggaagtcagtcgtgcgaacgcagctcaggacttcctgcctacaagcagaaacgatccggacctccattttgatgctgagcgtctagggcaaggccgggccagacttgtgggggccctgcgcgaaacggttgtggcggcaagggccctcgaccacacactcgcccgccaacggttgggagcagcgctccatgctcttcaggatttttatagtcactcgaattgggtggaacttggcgaacagcagcctcacccacatctgctatggcctcgccaagaacttcaaaacctcgcccaggtggcggacccgacatgctccgactgcgaggaactctcttgccccagaaactggcttggttttacgctactcacatctgggtatttcggaacacacccgccgaaacctccaggaaagtgttctcacggagggcacttcgaccgtagttcctctcaaccacctcgtggcggcatcaacaaggatagcacctctccaggattcagcccacaccatatgctgcatttacaggctgcaaagttagctcttctagcctcgatccaggccttctctctactacgcagcaggctgggggaccgggatttctccagactgttggacatcacccccgcctcaagcctgagtttcgtgctggacaccaccggtagcatgggtgaggaaatcaacgcagcgaagatccaggcccgtcacctcgtggagcagaggcgtggaagccccatggagcctgtccactacgtgctggtacccttccacgatccgggcttcgggcccgtatttaccacttctgaccccgacagcttctggcagcagcttaatgaaattcatgcactgggcggcggggatgagccggaaatgtgcctttctgcgctgcagcttgccctgctgcataccccccccttgtcagacatctttgtgttcacagatgcttctccaaaggatgcattcctgacgaaccaagtggagagtctgacgcaggaaagaaggtgcagggttacctttctggtcacggaggatacctcacgcgtgcagggaagagcccgaagggagatactgagtcctcttagatttgagccctacaaggccgttgcactggcctcaggcggtgaggtgatctttacgaaagatcagcatatccgggatgtggcagccatcgttggtgaaagtatggcggccttggttaccctcccccttgatcctcccgtggttgtgcctggtcagcccctcgtctttagcgtggatggattgttacagaaaataaccgtcagaatacatggcgacatttcctccttctggattaagaacccagccggagtctctcagggacaggaggagggcgggggccccctgggtcatacacgtcgcttcggtcagttctggatggtgacaatggatgaccctccacagactgggacctgggagatccaggtgacggctgaggatactcctggggtgcgcgtgcaggctcagacctcgcttgacttcctgtttcactttggcatccctatggaggacggtccacacccaggcctatatcctctgacacaaccggttgcgggtttacaaacgcaactacttgtggaatctcagtcctggggcagctctgctgcctttctgcctcggcatccatcccgagggcctcgtggttgtagaacaaggccgggtgcactgggtgccagaggaacatccggggccaggtctcccaggtccctagctgtggcccacgcggctgtccatccatag

SEQ ID NO: 269522 - DNA, 2067 bp, Artificial Sequence
  derived and/or modified sequence
atgctcccaactgaggttccgcagtctcaccccggcccctccgccctcctactgcttcagctgctgctcccccccaccagcgccttctttcccaatatttggagtctgctggctgctccaggaagtatcactcatcaagacctcacggaggaagccgctctcaacgtgacactccagctcttcctagaacaacctcctccagggcggcctccacttagattggaggactttctgggcaggacccttctggcggatgacctgtttgcggcctatttcggcccaggcagttcccgacgctttagagccgcactgggagaggtgtctcgagctaacgccgcacaagacttcctcccaactagcagaaacgacccggatctgcacttcgacgccgaacgattagggcagggcagggctcggctggtgggcgctctgcgggagaccgtggtggctgctagagcactggaccacacgctggctcggcaacggctgggagccgcactccatgccctccaagacttctattcacattccaattgggtggagctcggggagcagcaaccacacccccatctcttatggccccgtcaggagctgcagaatctggctcaggtggctgacccaacatgctctgactgcgaggaacttagctgcccccgcaactggctggggttcactctgctcacttctgggtacttcggcacccaccctcctaagcctcctggaaagtgttcccacggaggccacttcgataggtcatcaagtcagccacctagggggggaatcaataaggacagcacgagccctggattctctccccatcatatgctgcatctgcaggctgctaaactggcccttctcgcatctattcaggcgttcagcctccttcggtcgcgcctgggagatagggattttagccgcctgttagatatcacaccggccagctccctgtccttcgtgctcgatacaactgggtccatgggcgaagagattaatgccgcaaagatccaggccagacacctcgtcgaacagaggcgaggatctccaatggagcctgtgcattacgttctggtcccttttcatgaccctggctttggtcctgttttcactacaagtgatccagactccttctggcagcaactaaacgagatccatgctctgggcggtggagacgaaccagagatgtgcctgtcggctctacagctggccctcctgcacaccccaccactgagcgacatcttcgtctttacagacgcaagccccaaggacgctttcctgaccaaccaggtggaatcattgactcaggagcgccgttgtcgcgtgacattcctggtgactgaagacacgagtcgcgtgcaaggtagggcccggagggaaattctgagtccactgcgcttcgagccgtacaaggcggtggcccttgcctcagggggcgaagtcatattcacaaaggaccagcacatccgcgacgtagcagcgattgtgggcgaatctatggctgctcttgtgaccctcccgctagatccccctgtagtggtgcccggacagcccctggtgttctccgttgatggcctgctgcaaaagattaccgtccggatccacggcgatattagttccttctggattaagaacccggccggagtgagccagggacaggaggaaggtggcggtccactgggacacactaggagatttggacaattctggatggtgaccatggacgacccccctcagactggcacatgggagattcaggtcacggcagaggatacccccggtgtgcgtgtgcaggcccagactagcctggattttctctttcactttgggattcctatggaagatggcccacacccaggactatacccattgactcagcctgttgcaggattgcagacacagctgctagttgaatctcaaagctggggcagttcagcagcctttctcccccgccatccgtccagaggtcccagaggctgtcggacaaggcctggtgcgttgggcgcccggggaacttcaggggcccggtcaccaagaagcctggccgttgcccacgcggccgtccacccttag

SEQ ID NO: 269523 - DNA, 2067 bp, Artificial Sequence
  derived and/or modified sequence
atgcttcctactgaggtccctcaatctcacccagggccctctgcacttcttctcctccagttgctgctgccacccacttctgcctttttccctaacatctggagcctgctcgctgcgcccggttctattactcatcaggaccttaccgaggaagcagccttgaatgtcactctccaactgttcctcgagcagcctcctccaggtcgccctcctctgcgactcgaggactttctgggccggaccctcctggcggatgacctgtttgctgcatacttcggaccagggtcgagtcgaagattccgggccgccctcggagaagtctcaagggccaatgctgcccaggacttcttgcccacctcaaggaacgatccggacttgcattttgacgctgaacgactaggccagggtcgcgcccggctggtgggcgctctcagggagacagtcgtagccgctagggcgttagatcacactctggccagacagcgtctgggcgctgctctccatgctttgcaagacttctactcccactctaattgggtcgagctaggcgagcaacaaccgcatcctcatttactatggccccggcaggagcttcagaacctcgcacaggtggccgaccctacgtgttctgattgcgaggagctaagctgcccccgcaattggttagggttcacactcctcaccagcggctacttcggaacccacccccctaagccccccgggaagtgttcacacggaggacatttcgatagatcctcctcccagccgcctagaggcggaattaataaggacagtacaagtcccggattcagcccccatcacatgctccatctgcaggctgccaagcttgccctgctggcttccatccaggccttctctcttttgcgaagtcgcctgggtgaccgcgatttctcccgtctgttggacattacacccgcaagttctctgtctttcgtgctggacactactggttcaatgggggaggagattaatgccgcaaagatccaggcaagacatctcgtggagcaaagacgggggtcgcccatggagccagtacactatgtgctagtcccgttccacgatccaggctttgggcccgtcttcactacgtctgacccggatagtttttggcaacaattaaacgaaattcatgctttaggcggcggcgacgagcccgaaatgtgtctctcagctctgcagttggcgttactccatactccacctctgtcagatattttcgtttttactgatgccagtcctaaagacgccttcctgacaaatcaggtcgaaagtctgacacaggaaagaaggtgccgggttacgttccttgtgaccgaggatacctcacgggtgcaaggccgggctaggcgcgaaatactttctcccctgaggttcgagccctataaggccgtggccctggcatcaggcggtgaggttatctttaccaaagaccaacacatcagagatgtcgcagcgatagtaggtgagtcaatggccgcactcgtgaccctaccattagatccacccgtagtggtcccaggacaacctctagtgttcagtgtggacggcctgctgcagaagatcacggtacgaatccatggagacatttctagcttctggatcaagaatcctgctggcgtgagtcaaggccaggaagagggaggcggacccctggggcatactcggagatttggacaattttggatggttacaatggacgatcctccccagacagggacctgggaaatccaggttacggccgaggacaccccaggagtccgagtgcaggcccaaacctccctggacttcttattccactttggaattccaatggaagacgggccgcacccgggcttgtaccccctcacccaacctgtggctggactgcaaacgcagcttctcgttgagtcccaatcttggggcagtagcgctgctttcctacctcgacacccttcaaggggccctcgcggctgtcgcaccaggcctggagccttgggagcgcggggcaccagcggtgcgagatcaccaagaagcttggccgtggcacatgctgcagtacacccatag

SEQ ID NO: 269524 - DNA, 2067 bp, Artificial Sequence
  derived and/or modified sequence
atgctgcccacagaggtgccccagagccaccctggccccagcgccctgctgctgctgcagctgctgctgccccccaccagcgccttcttccccaacatctggagcctgctggccgcccctggcagcatcacccaccaggacctgacagaggaggccgccctgaatgtgaccctgcagctgttcctggagcagcccccacctggccggccccccctgcggctggaggacttcctgggccgcaccctgctggctgatgacctgtttgctgcctacttcggccctggcagcagccgccgcttccgggccgccctgggggaggtgtcccgggccaatgctgcccaggacttcctgcccaccagcagaaatgaccctgacctgcactttgatgctgagcggctgggccagggccgggcccggctggtgggcgccctgcgggagaccgtggtggccgcccgggccctggaccacaccctggcccggcagaggctgggcgccgccctgcacgccctgcaggacttctacagccacagcaactgggtggagctgggggagcagcagccccacccccacctgctgtggccccggcaggagctgcagaacctggcccaggtggccgaccccacctgcagcgactgtgaggagctgagctgccccaggaactggctgggcttcaccctgctgaccagcggctacttcggcacccacccccccaagcccccaggcaagtgcagccatggaggccactttgacaggagcagcagccagcccccccggggcggcatcaacaaggacagcaccagccctggcttcagcccccaccacatgctgcacctgcaggccgccaagctggccctgctggccagcatccaggccttcagcctgctgcggagccggctgggggaccgggacttcagccggctgctggacatcaccccagccagcagcctgagctttgtgctggacaccaccggctccatgggagaggagatcaatgctgccaagatccaggcccggcacctggtggagcagaggcggggcagccccatggagcctgtgcactacgtgctggtgcccttccatgaccccggcttcggccctgtgttcaccaccagtgaccctgacagcttctggcagcagctgaatgagatccacgccctgggcggcggagatgagcctgagatgtgcctgagcgccctgcagctggccctgctgcacaccccacccctgagtgacatctttgtgttcacagatgccagccccaaggatgccttcctgaccaaccaggtggagagcctgacccaggagcggcgctgccgggtgaccttcctggtgacagaggacaccagccgggtgcagggccgggcccggcgggagatcctgagccccctgcgctttgagccctacaaggctgtggccctggccagcggcggggaggtgatcttcaccaaggaccagcacatcagagatgtggccgccatcgtgggggagagcatggccgccctggtgaccctgcccctggacccccctgtggtggtgcccggccagcccctggtgttttctgtggatggcctgctgcagaagatcaccgtgcgcatccatggagacatcagcagcttctggatcaagaacccagctggggtgtcccagggccaggaggagggcggcggccccctgggccacacccggcgcttcggccagttctggatggtgaccatggatgatcctccccagacaggcacctgggagatccaggtgacagctgaggacaccccaggagtgcgggtgcaggcccagaccagcctggacttcctgttccacttcggcatccccatggaggatggcccccaccctggcctgtaccccctgacccagcctgtggccggcctgcagacccagctgctggtggagagccagagctggggcagcagcgctgccttcctgcccaggcaccccagccggggcccccggggctgcaggaccaggcctggggccctgggcgcccggggcaccagcggggcccggagccccaggagcctggccgtggcccacgccgctgtgcacccctag

SEQ ID NO: 269525 - DNA, 2067 bp, Artificial Sequence
  derived and/or modified sequence
atgctgcccaccgaggtgccccagagccaccccggccccagcgccttactcctcttacagttgcttctgccaccgacaagcgcttttttcccgaatatctggtcccttctggcggcccccggtagtatcacacatcaagacctcaccgaggaggcggccctgaatgttacactgcagctttttttggaacagcccccacctgggcggccaccactgcgcctagaagacttcctggggcgcacattgctcgccgacgacctgtttgcggcatattttgggcccgggtccagccggaggttcagggcagcactgggggaggtctcacgggccaatgcagcccaggatttcttaccaacttcccgcaatgacccggacctgcacttcgatgcagagagacttggccaaggtagagcccgtttagtgggcgctcttagggagaccgtggtggccgccagggccctggatcacacactggcccggcagcggttaggcgccgcactgcacgcccttcaagatttctactcccactcaaactgggtggagctgggtgagcagcaaccacaccctcacttgctatggcctaggcaggaactccagaacctcgctcaggtggctgatccaacttgttcagattgcgaggagctgagctgcccccggaactggctcgggtttaccctgctgacgtcaggatacttcggaacccacccccccaagccccccggcaaatgttcccacggcggccatttcgacagatcgagctcacagccacctcgtggaggcatcaataaggattctacgtccccagggttcagtccccaccacatgctgcatctgcaggctgctaagcttgccttgttagccagcattcaggcctttagtcttttacgctcacgcctgggcgatagagacttctcacgattgctggacattactccagcctcaagcctgtcatttgttcttgatacaacaggaagcatgggggaagaaataaacgcagctaagatccaggcaaggcacctcgtagaacaacgtcggggaagccccatggagccggtccattatgttctagtgccttttcacgatcctgggtttggacccgtcttcaccactagcgaccccgattctttctggcagcagctcaacgaaatccacgccttgggaggcggagatgagcccgaaatgtgcctgtccgccctgcagctcgccctgctccataccccacctttaagcgacatctttgtgtttactgatgctagccccaaggacgcctttctgactaatcaagtagaatccctgacgcaagaacgcaggtgtagggttacatttttagtgacagaggacacatccagggtacaggggagggcgcggcgtgaaattctatctcccctgaggttcgagccttacaaggccgtagctttagcgagcggaggcgaagtgatatttactaaagatcagcatattagggacgtggccgccattgtcggcgaatccatggcagcattagttacactgcctttagatcccccagttgtggtccccggacagccactggtcttttccgttgatggcctgttgcagaagatcaccgtccggatccacggagacatcagtagcttctggattaagaatccagcaggcgtgtcccagggccaggaagaaggcggcgggcccctgggtcacacacgcaggttcggccagttctggatggtgactatggatgacccacctcagacgggaacttgggagattcaggtcacggccgaggacacccccggtgtgagggtgcaggctcagacatctctcgattttctgttccactttggcatcccaatggaggacggtcctcacccaggactgtatccattgacccagcccgtagctggtctccagacacagctcttagtagagagtcagtcttggggctcctctgctgccttcctgccacgtcatccatcacgtggcccccggggctgcaggacacgaccaggggccctgggggcaagagggacatccggtgctagatcccctagaagcctcgctgtggctcatgctgctgtccatccctag

SEQ ID NO: 269526 - DNA, 2067 bp, Artificial Sequence
  derived and/or modified sequence
atgctgcccaccgaggtgccccagagccaccccggccccagcgccctgctgctgctgcagctgctgctgccccccaccagcgccttcttccccaacatctggagcctgctggccgcccccggcagcatcacccaccaggacctgaccgaggaggccgccctgaacgtgaccctgcagctgttcctggagcagcccccccccggcagaccccccctgagactggaggacttcctgggcagaaccctgctggccgacgacctgttcgccgcctacttcggccccggcagcagcagaagattcagagccgccctgggcgaggtgagcagagccaacgccgcccaggacttcctgcccaccagcagaaacgaccccgacctgcacttcgacgccgagagactgggccagggcagagccagactggtgggcgccctgagagagaccgtggtggccgccagagccctggaccacaccctggccagacagagactgggcgccgccctgcacgccctgcaggacttctacagccacagcaactgggtggagctgggcgagcagcagccccacccccacctgctgtggcccagacaggagctgcagaacctggcccaggtggccgaccccacctgcagcgactgcgaggagctgagctgccccagaaactggctgggcttcaccctgctgaccagcggctacttcggcacccacccccccaagccccccggcaagtgcagccacggcggccacttcgacagaagcagcagccagccccccagaggcggcatcaacaaggacagcaccagccccggcttcagcccccaccacatgctgcacctgcaggccgccaagctggccctgctggccagcatccaggccttcagcctgctgagaagcagactgggcgacagagacttcagcagactgctggacatcacccccgccagcagcctgagcttcgtgctggacaccaccggcagcatgggcgaggagatcaacgccgccaagatccaggccagacacctggtggagcagagaagaggcagccccatggagcccgtgcactacgtgctggtgcccttccacgaccccggcttcggccccgtgttcaccaccagcgaccccgacagcttctggcagcagctgaacgagatccacgccctgggcggcggcgacgagcccgagatgtgcctgagcgccctgcagctggccctgctgcacaccccccccctgagcgacatcttcgtgttcaccgacgccagccccaaggacgccttcctgaccaaccaggtggagagcctgacccaggagagaagatgcagagtgaccttcctggtgaccgaggacaccagcagagtgcagggcagagccagaagagagatcctgagccccctgagattcgagccctacaaggccgtggccctggccagcggcggcgaggtgatcttcaccaaggaccagcacatcagagacgtggccgccatcgtgggcgagagcatggccgccctggtgaccctgcccctggacccccccgtggtggtgcccggccagcccctggtgttcagcgtggacggcctgctgcagaagatcaccgtgagaatccacggcgacatcagcagcttctggatcaagaaccccgccggcgtgagccagggccaggaggagggcggcggccccctgggccacaccagaagattcggccagttctggatggtgaccatggacgaccccccccagaccggcacctgggagatccaggtgaccgccgaggacacccccggcgtgagagtgcaggcccagaccagcctggacttcctgttccacttcggcatccccatggaggacggcccccaccccggcctgtaccccctgacccagcccgtggccggcctgcagacccagctgctggtggagagccagagctggggcagcagcgccgccttcctgcccagacaccccagcagaggccccagaggctgcagaaccagacccggcgccctgggcgccagaggcaccagcggcgccagaagccccagaagcctggccgtggcccacgccgccgtgaacccctag

SEQ ID NO: 269527 - DNA, 2067 bp, Artificial Sequence
  derived and/or modified sequence
atgctgcctacggaagtaccacagtctcatcctggcccaagcgccctactgttgctgcagctcttgcttccgcccacctccgccttcttccccaacatttggagcctccttgccgctccgggttccatcacccatcaagatctgacagaggaagccgcactcaacgtgaccctgcagctctttttggaacagcctcccccgggtcggcctcctctgagactggaggattttctcggcaggacactgttggcggatgacctgtttgccgcttattttggccccggctcctcaaggagatttcgggccgctttaggagaggtgtcgcgagctaacgcagctcaagactttcttcctaccagtcgaaatgatccagatctccacttcgacgccgaacgtctgggtcagggtagggcgcgtttagtgggagccctaagggagacggtggtcgccgctcgtgccttggatcacactctagcgcgtcaaagactcggagcagctctgcatgcgctgcaagacttctactcacactccaattgggtcgagcttggagagcaacagccccacccgcacctgctttggcccaggcaggagctccagaacctcgcacaagttgctgatccaacatgttccgactgcgaagagctgtcatgcccccgcaattggctgggattcactcttttaaccagtggatacttcggtacacatccaccaaagcctccagggaaatgtagccacggcggacattttgaccgcagttcatctcagcccccaaggggcggcatcaataaggactccacctcccctgggttcagtccccaccacatgttacatctccaggccgcaaagcttgcgctccttgcatcaattcaggccttcagcctgctaaggagccgtctgggcgatcgcgatttcagccgcctattggatatcacccctgcttcctcactgtccttcgttctcgataccacaggcagtatgggcgaggagatcaacgccgcgaaaattcaggcaaggcatctagtcgaacagcgccgggggtctcccatggagcctgtccactacgtgctagtgcccttccatgacccgggcttcggccctgtgtttacaacctccgatccagatagcttttggcagcagctcaatgagattcacgccttaggcgggggggatgagccggaaatgtgcctcagtgctctacaactggcccttcttcataccccccccctatccgatatattcgtgttcactgacgcgtcgcccaaagatgctttcctgacgaatcaggtagagagtctcacgcaagaaaggcgatgtcgcgttaccttcttggtgaccgaggatacaagccgcgtgcagggcagagctaggcgcgaaattttgagcccactgcgctttgaaccctacaaagccgttgctttggccagcgggggagaggtaatttttaccaaggaccagcacatccgcgacgtggcagccatagtgggggagagcatggcggccctggtgaccttacctctcgatccacctgtggtcgtgccaggacagcctctggtgtttagcgttgacggattgttgcagaagataacagtcaggatccatggggacataagctccttttggatcaaaaaccctgcaggggtgagccagggacaggaggagggaggcggccctttagggcacactcggcgctttggccaattttggatggttaccatggatgatcctcctcaaactggcacctgggagatccaggtgaccgccgaagatacccctggagtcagggtccaagcccagactagcttagactttctattccatttcgggatacccatggaagatggtccccatcctggattataccctcttacacagcccgtagccggcctgcaaacccagctattggttgaaagtcaatcttggggttcgagtgcagctttccttcccagacatccctctagagggcccagaggatgcaggaccaggcccggtgccctgggtgccagaggcacgagcggtgcgcgatcccctaggtcactggctgtagcccacgcagcagtcaacccatag

SEQ ID NO: 269528 - DNA, 2067 bp, Artificial Sequence
  derived and/or modified sequence
atgctgcccacagaggtgccccagagccaccctggccccagcgccctgctgctgctgcagctgctgctgccccccaccagcgccttcttccccaacatctggagcctgctggccgcccctggcagcatcacccaccaggacctgacagaggaggccgccctgaatgtgaccctgcagctgttcctggagcagcccccacctggccggccccccctgcggctggaggacttcctgggccgcaccctgctggctgatgacctgtttgctgcctacttcggccctggcagcagccgccgcttccgggccgccctgggggaggtgtcccgggccaatgctgcccaggacttcctgcccaccagcagaaatgaccctgacctgcactttgatgctgagcggctgggccagggccgggcccggctggtgggcgccctgcgggagaccgtggtggccgcccgggccctggaccacaccctggcccggcagaggctgggcgccgccctgcacgccctgcaggacttctacagccacagcaactgggtggagctgggggagcagcagccccacccccacctgctgtggccccggcaggagctgcagaacctggcccaggtggccgaccccacctgcagcgactgtgaggagctgagctgccccaggaactggctgggcttcaccctgctgaccagcggctacttcggcacccacccccccaagcccccaggcaagtgcagccatggaggccactttgacaggagcagcagccagcccccccggggcggcatcaacaaggacagcaccagccctggcttcagcccccaccacatgctgcacctgcaggccgccaagctggccctgctggccagcatccaggccttcagcctgctgcggagccggctgggggaccgggacttcagccggctgctggacatcaccccagccagcagcctgagctttgtgctggacaccaccggctccatgggagaggagatcaatgctgccaagatccaggcccggcacctggtggagcagaggcggggcagccccatggagcctgtgcactacgtgctggtgcccttccatgaccccggcttcggccctgtgttcaccaccagtgaccctgacagcttctggcagcagctgaatgagatccacgccctgggcggcggagatgagcctgagatgtgcctgagcgccctgcagctggccctgctgcacaccccacccctgagtgacatctttgtgttcacagatgccagccccaaggatgccttcctgaccaaccaggtggagagcctgacccaggagcggcgctgccgggtgaccttcctggtgacagaggacaccagccgggtgcagggccgggcccggcgggagatcctgagccccctgcgctttgagccctacaaggctgtggccctggccagcggcggggaggtgatcttcaccaaggaccagcacatcagagatgtggccgccatcgtgggggagagcatggccgccctggtgaccctgcccctggacccccctgtggtggtgcccggccagcccctggtgttttctgtggatggcctgctgcagaagatcaccgtgcgcatccatggagacatcagcagcttctggatcaagaacccagctggggtgtcccagggccaggaggagggcggcggccccctgggccacacccggcgcttcggccagttctggatggtgaccatggatgatcctccccagacaggcacctgggagatccaggtgacagctgaggacaccccaggagtgcgggtgcaggcccagaccagcctggacttcctgttccacttcggcatccccatggaggatggcccccaccctggcctgtaccccctgacccagcctgtggccggcctgcagacccagctgctggtggagagccagagctggggcagcagcgctgccttcctgcccaggcaccccagccggggcccccggggctgcaggaccaggcctggggccctgggcgcccggggcaccagcggggcccggagccccaggagcctggccgtggcccacgccgctgtgaacccctag

SEQ ID NO: 269529 - DNA, 2067 bp, Artificial Sequence
  derived and/or modified sequence
atgctgcccaccgaggtgccccagagccaccccggccccagcgcccttctgctattgcagctgttgctgcccccgactagcgcatttttccctaacatctggagtctgttggccgcacctgggagtattactcatcaggacttgacagaagaagccgcactgaatgtgactctgcaactctttttagagcagccacctcccggaagacccccactgcgtctggaggactttcttggcagaacactgctcgccgatgacttattcgctgcctatttcgggccaggatcttcacgtagattccgtgcagccttgggcgaagtgtcacgggccaatgcagctcaggattttctgcctaccagccggaatgatcccgacctgcactttgacgctgaaagactcggccaaggcagagctcggctggttggcgctctgcgggaaacggtggtcgccgcacgtgcgctcgatcatacgcttgctcgccagcgtctgggagctgctctccacgcactacaggacttttactctcattccaactgggtcgagctgggcgagcagcagccccacccccacttgctttggccaaggcaggaactgcagaatttagcgcaggtggcagatcctacatgctctgattgcgaggagctcagttgccctcgcaactggctgggcttcacgctgctgacttccggatacttcggaactcacccccccaaacctccgggaaaatgtagccatggaggccacttcgacagaagtagttcacagcccccaaggggcgggatcaataaagactccacttctcccggtttcagtcctcaccatatgctccacctccaggccgcaaaattggctctgctcgcgtcaatccaggccttcagcctgctcagatcccgattaggggatcgggatttcagccggctgctggacattacacctgcaagcagcttaagtttcgtgcttgacactaccggcagtatgggggaagagatcaatgctgccaagattcaggcccgccacctggtggagcaaaggcgggggtcaccaatggagcccgtgcactacgtgttagtgcctttccacgacccaggctttggaccggtgtttacaacctcagatcccgactctttttggcagcaactgaacgagatccacgccctgggaggcggcgacgaacccgagatgtgtctctcagcactccagctcgctctcctgcataccccacctctgagtgatattttcgtgttcactgacgccagccccaaggacgcctttcttactaaccaggtggaatcgcttacgcaagagcgccggtgccgcgtcacgtttctggtgactgaagatacttctagggtccagggtcgggcacggcgggaaatcctcagtcccctgcgcttcgaaccttacaaagccgttgcccttgccagcggcggagaagttatcttcactaaagaccaacacatcagagacgtagccgccatcgtgggagagtcgatggccgccttggttacgctaccattggatcctccggtggtggttcccggacagcccctagtattctcggttgacggtctgctgcagaagatcacagttcggattcatggggatatcagttcgttttggattaagaaccccgctggcgtttctcaaggccaagaagaaggcgggggccccctcggccacacgcggcggtttggacaattttggatggttaccatggacgacccccctcagactggaacctgggaaatccaggtgacggcagaagacaccccaggcgtgcgcgtacaagcccagaccagcctggattttctctttcattttggcatacccatggaggacgggcctcacccgggactctaccctctgacgcagcctgtcgctggcctccagacacaactgctcgttgagagccagagttggggttcatccgcagcttttctgccccgtcatccatctcgcggccccagaggctgtcggactagaccaggagccctgggtgcccgaggcacgtctggggcccgcagcccgcggtcactggccgtggcccacgcagcagtgaacccttag

SEQ ID NO: 269530 - DNA, 2067 bp, Artificial Sequence
  derived and/or modified sequence
atgctacccactgaggttccccagagccaccctggaccaagtgcactcctcctcctgcaactgctgttgcctcccacatccgccttcttcccaaacatttggagcctgttggctgcccctggcagcatcacacatcaggatttgaccgaggaggcagcgctgaatgtgacactgcagctgttcctggagcaaccaccccctgggaggccacccctgcggctggaggacttcctgggacgaaccctgctggcagacgatctgttcgctgcttacttcgggccagggtcctctcggaggtttagggctgctttgggggaagtttcacgggcaaatgcagcccaggattttctgccgactagtaggaatgacccagacctgcattttgacgcagagcggctgggacaggggagagcccgtctcgtgggcgcactgcgggagaccgtggtggccgctcgtgcactagaccacacactggccaggcaaagactgggagccgctctacatgcacttcaagacttctacagccatagcaattgggtagaactgggggagcagcagccccacccgcacctgctctggcctagacaggaattgcaaaatctcgcacaggttgcggatcctacctgtagtgactgtgaagaactttcttgcccacggaattggctgggctttacgctgctgacatcagggtactttggtacccatccccctaagccccctggcaaatgctcccacgggggacacttcgaccgctcctcgagccaaccccctaggggcggaatcaataaggacagtacatcacccggtttctccccccatcacatgctccatcttcaggctgcaaagctggccttgctagcgagcatccaggcctttagccttctgcggtccagactcggcgatcgcgacttttccagactgctggacattacaccggcttcttccctctcctttgtactcgatacaaccggaagcatgggcgaggaaatcaacgccgctaagattcaggcacgccatctagtcgagcagcgcaggggttccccgatggaacccgtccattatgttctggtcccatttcacgatccgggtttcggacctgtgtttactacctcagaccccgactccttttggcagcagctgaatgagattcatgcgctgggcggaggcgatgagcccgaaatgtgcttatccgccctccaactggcacttctgcacacgcctcctctgagtgatatctttgtgtttaccgatgcttcccctaaggacgctttcctgacaaaccaggtggagagcctgacgcaagagagaaggtgccgagtaacattccttgtgactgaggacacatcgcgcgtacaagggcgtgccaggcgggaaattctgtcccctctcagatttgaaccgtataaggctgtggctctggctagcgggggagaagtaatctttacgaaggaccagcacattcgagacgtggccgcaatcgttggtgaaagcatggcagctctcgtgacattgcctttagatccccctgtggtggtgcctggccagccgttggtgttttccgtagacgggttgctgcagaagatcacagttcggatccatggcgacatttcaagcttttggatcaagaaccccgcaggggtgagtcaaggacaggaggaagggggagggccactagggcatacccggagatttggacaattttggatggtgacaatggacgacccccctcaaacaggcacttgggagattcaggtgacggctgaggacacccctggtgtgagagtgcaagcccagacatccctagacttcctgttccactttggtatcccaatggaggatgggccacatcccggtctgtaccccctgacccaacccgtggcaggactgcagacgcagcttctggtcgagtcccagtcatgggggtcctccgccgcttttttgccgagacaccccagccggggtcctagagggtgtagaacacgtccaggagcactgggtgctcgagggacatccggcgcaaggtcgcccagatccctcgcagtagctcatgctgctgttaacccttag

SEQ ID NO: 269531 - DNA, 2305 bp, Artificial Sequence
  derived and/or modified sequence
ctcactcacctccgcactgcagccaagggaggcccgccctggcgtgggctgctgcctgtggctttgggcaggcaggagcgaaagggccaggggttgcctgtcctcccccaccctgttgaggccttcctccccctctgctgagcctcggttaattataactctgacctaagtgccctgtgacgtcaagcccgggccagccctgcccaggagacccagcaaccaggtccatgtctcagccatgctccccacggaggtcccccaatcccacccgggcccctcagcgttgcttctgctgcagctgttgctgccccccacatctgccttcttccccaacatctggagcctgctggctgcccctggctccatcacccaccaagacctaactgaggaggcagcgctcaacgtcaccctgcagctcttcctggagcagccacccccaggccgcccccctcttcgtcttgaggacttcctgggtcgaacactccttgctgatgacctctttgccgcctactttggacctggttcttctcggcggttccgagcagccttaggtgaggtgtctcgtgccaatgcagcccaggacttcctgccaacttccaggaatgaccccgacctgcactttgatgctgagcgactgggtcagggacgcgcgcgcctggtaggggctctgcgggagaccgtggtggcagccagggcccttgaccacaccctggctcgccagcgcctcggggctgcacttcatgccctgcaggatttctacagtcatagcaactgggtggagctgggcgagcagcagccacaccctcacctcctctggccaaggcaggagctccagaacctggcacaagtggccgatcctacctgctccgattgcgaggagttgagctgccccaggaattggctgggcttcacactcctcacctctggctactttggaactcatcccccgaaacctccagggaaatgtagccacgggggccattttgaccggagcagctcccagccaccgaggggaggcatcaacaaggacagcacatccccaggcttctcccctcaccacatgctgcacctccaggctgcaaaactggcccttctagcctccatccaggccttcagccttctgcgaagccgcctgggagacagggatttctccaggctgctggacatcaccccagcctccagcctgagctttgtcctggacaccacgggcagcatgggtgaggagatcaacgctgccaaaatccaggctcgccaccttgtggagcagcggagaggcagccccatggagcctgtccactatgtcctggtgccttttcatgacccagggttcggccctgtctttacaaccagtgaccctgacagcttctggcaacagcttaatgagatccatgccttggggggtggagacgagcctgagatgtgcctgtcagccctgcagctggccctgctgcacacacctccactctcagatatctttgtcttcacggatgcctcccccaaggatgcctttctcaccaaccaggtggaatccctgactcaggagcggcgctgccgggtaacattcctggtgactgaagatacatcaagggttcagggtcgagctcggcgtgagatcttgtcccctctgcgttttgagccatacaaagcagtggccctggcctcaggaggagaggtgatcttcaccaaagaccagcacattcgagacgtggcagccattgttggggagagcatggctgccctggtgactcttcccctggaccctcctgttgtggtgcctgggcagccacttgtgttcagcgtggatgggctgctccagaagatcacagtccggatccacggagacatcagcagcttctggatcaagaaccctgcaggggtctcccagggccaggaggaaggcgggggtcctctaggtcacactcgccgctttgggcagttctggatggtgaccatggatgaccctccacagacaggaacctgggagatccaggtcacagctgaggacacccctggggtgagagtgcaagcccagacctccctggacttcctcttccactttgggatccccatggaggatggaccccaccctggcctctaccccctgactcagccagttgcaggtcttcagacccagctgctggtagaaagccaatcctggggatcctcagccgcatttctcccacgtcatccttcgaggggtcccagagggtgccgaactaggccaggtgcccttggagcccgtgggacctccggagcgaggtctcctcgcagcctcgctgtcgcccacgctgctgtcaacccctag

SEQ ID NO: 269532 - RNA, 2067 nt, Artificial Sequence
  derived and/or modified sequence
augcugccuacugaaguuccacaaagccauccaggccccagugcuuuacugcuccuacagcugcuccuuccuccaaccagcgccuuuuucccuaacauuuggucccuacuugccgcccccgggucaaucacacaccaggaccugacugaggaggccgcccugaacgucacccugcaacuuuuucuggagcaacccccaccaggccggccgccucugcgguuggaggauuuccugggacguacccuccuggcugaugaucuguuugccgcguacuucgggccaggaucaucccgccgguuccgggccgcccuuggcgagguguccagagcuaaugcagcgcaggacuuucugcccaccucucgcaaugauccugaccuccacuucgaugcugagcggcuggggcaggggagagcucgacucguuggcgcacugcgugagacugucguggccgcucgugcccuagaucacacuuuggcaaggcaaaggcugggcgccgcccugcacgcacuccaagacuucuauucgcacucuaauuggguagaguuaggcgaacagcagccucacccccaccuccucuggccccgccaagagcuccagaaccuggcacagguggcugacccuaccugcucugacugugaggaguugucauguccccgaaauuggcucggauucaccuugcuuaccaguggcuacuucggcacccauccaccaaagccacccggcaaaugcucucacggcggccacuuugaucgaucuuccagucaacccccuaggggcgguaucaacaaagauucuacuucaccgggguucucuccacaccacaugcugcaccuccaggccgccaaauuagcacuauuagcuaguauccaggcuuucucucugcucagaucuagauugggcgaccgugacuuuagccggcugcucgauaucaccccugcaagcucacugaguuuugucuuggauacgacuggaucgaugggagaagaaauaaacgcagcuaagauccaagcccgacaccugguugagcagcgccgcggcucaccgauggagcccgugcauuacgugcuuguaccuuuccaugauccugguuuuggcccagucuuuacaaccucagacccagauucauucuggcagcagcucaaugagauucaugcccuuggcggcggagacgaaccugaaaugugucuuucugcccuacagcuggcgcuccugcacaccccacccuugagugacauuuucguguuuacugaugcgucccccaaagaugcuuuccugacuaaccagguagaaagucucacacaggagagacggugucgaguaacguuccugguuacagaggauacauccagggugcagggccgagcucggagggaaaucuugucaccuuugcguuuugaaccuuacaaagcuguggcguuagccagcgggggagaaguaaucuuuaccaaggaucagcacauacgggacguggcagcgaucguaggagaaagcauggcagcucuugugacauuaccgcuugaucccccaguagucgugccgggccagccauugguguuuucuguggauggccugcugcaaaaaaucacuguuagaauccauggcgacaucagcuccuucuggaucaagaaccccgccggagugagucaagggcaagaagagggaggagggcccuuaggccacacccggagguuugggcaauuuuggaugguaacgauggaugacccaccacagaccggaacaugggagauccaggucacagcagaggacacucccggugugcggguucaggcacaaaccucucuggacuuccuguuccauuucgguauuccuauggaagauggcccacacccaggguuauacccccuuacucagcccguggccggcuuacagacucagcuacuggucgagagucagucaugggggucuucagccgcuuuucugccacggcaccccucccgcgguccccgaggaugcagaacaagaccaggcgcccugggcgcacgcgggacaagcggcgcccggucuccucgaagccuggccguagcgcaugccgccguucacccuuag

SEQ ID NO: 269533 - RNA, 2067 nt, Artificial Sequence
  derived and/or modified sequence
augcucccaacugaagugccccagucccauccugggccuucugccuuauugcuucuacagcucuuacuacccccuaccucugccuucuuucccaacaucuggagcuuacuggcagccccaggaagcauuacacaccaggaccuuaccgaggaggccgcccugaacguuacacugcagcuuuuucucgagcaacccccccccgggaggcccccacuucgcuuggaagauuuccuugguaggacacuucucgcagacgaccuguucgcagcguauuucggcccaggaaguucacgucgauuucgagccgcccugggcgaaguuucacgggcaaaugcagcucaggauuuccuaccaacuucaaggaacgauccggaucuccacuucgacgcugagagacucggacaaggcagagcccgguuggugggggcccuccgcgagaccgucguggccgcucgggcccuugaucauacacuugcccgacagcgccugggggccgcucuucaugcccuccaggauuucuauucccacucuaacuggguagagcucggugaacaacagccucacccucaucuacuguggccccgccaggagcuucagaaucucgcucagguggccgacccgaccugcagugacugcgaagaacugagcugucccagaaauuggcugggguucacccugcugaccucaggauauuucggcacccaccccccaaagccuccaggaaaaugcucucacggugggcacuucgaucgauccaguucucagccaccuagaggaggaauuaauaaggacucuacuaguccuggguucaguccucaccacaugcuccaucuucaggccgcuaaacuggcccucuuggccuccauccaagcauucucccugcugagaucgcggcugggggaccgcgacuucaguagacuacuggauauuacccccgcgucaagucuuaguuucguauuagacacaacuggcuccaugggcgaagaaaucaacgccgccaaaauccaggcuagacacuuaguagagcagaggcgugggucuccuauggaaccugugcacuaugucuuagucccauuccacgaccccggcuuugguccuguguucacaacaagcgacccagauuccuuuuggcagcagcuuaaugagauucacgcacucgguggaggcgaugagcccgagaugugcuuguccgccuugcaguuggcacuccuacacacacccccauugagugacaucuuuguguuuaccgacgccagcccaaaagacgcguucuuaaccaaccaggucgagucucugacccaggaacgaagaugcagaguuacauucuuagugaccgaagacaccucucgugugcagggaagagcgcggcgagagauacuguccccuuuacguuucgagccguauaaagcaguggcgcuagccagcggaggcgaagucauuuuuaccaaagaucagcacaucagagauguggcagccauuguaggcgaaagcauggcggcccucguaacauugccucuugacccacccgucguugucccuggacaaccgcugguguuuagcguugauggauuacugcagaagauuacugugcgaauucacggcgauaucuccaguuucuggaucaaaaauccugcuggagugagccaggggcaggaagaaggaggcgguccccugggccacacccgccgcuuuggacaauucuggaugguuaccauggaugacccaccccagacgggcaccugggaaauucaggucacugcugaggacaccccgggcguacggguccaagcucaaacgucccucgauuuuuuguuucacuucgggauccccauggaggacggcccacacccaggacuuuaccccuugacucagccaguagcuggacugcagacacagcugcugguggaaucucagucuugggggucgagcgcggccuuucugccuaggcauccuucucgcgguccgcgaggguguagaaccagaccgggagcgcuaggugcucgcgggacguccggcgcuaggaguccacgcucgcuugccgucgcacacgccgcggugcauccauag

SEQ ID NO: 269534 - RNA, 2067 nt, Artificial Sequence
  derived and/or modified sequence
augcuccccaccgaaguuccacagucucaucccgggccuuccgcccucuugcugcuccagcuguuacugccaccuacauccgccuucuuuccuaacaucuggucucuucuugcagcaccuggaucuaucacacaucaggaccugacagaagaagcagcacugaauguuacacugcagcuguuuuuggaacagccgcccccgggccggccuccacuuaggcuggaagauuuucugggacgcacccugcuggcugaugaucuuuucgcagccuacuuugggcccggcagcagccgacgauuccgggcagcacugggcgaagugaguagagcuaacgcugcacaggacuuucuacccacgucgcguaacgaucccgaucuccauuucgaugcugagcgccugggacaggguagagcgcgcuuaguuggagcccugagagaaacaguaguggccgcccgcgcacuggaccauacguuggcccggcagaggcucggagccgcauugcacgcccuccaggacuucuacucucauaguaauugggucgagcuuggagagcagcagccucauccacacuugcuuuggccccggcaggagcugcagaaucuugcccaggucgccgauccaacauguuccgauugugaggaauuguccugcccuagaaauugguugggauucacgcugcugacuagcggauacuuuggcacacacccgcccaagccuccuggcaaauguagucacggcggucauuucgauagaagcuccucccaacccccaaggggcggaauuaacaaagacucaacaagcccaggauucagcccacaucacaugcugcaccuccaggccgcuaaacuagcccuacuagcauccauccaggcuuucucucuguuaagaucuagacuuggugauagggacuucucucgccuccuagacauuacgccagcgucaucgcuguccuuuguccucgacacuacaggguccaugggggaggagaucaacgcggcuaaaauccaggcgaggcaccuuguggaacagcgacguggaucaccuauggagccuguccauuaugugcucguacccuuucacgauccagguuucgguccugucuuuacaacaucugaucccgauucauucuggcagcagcucaacgaaauucacgcccugggaggaggcgacgagcccgagauguguuugagcgcccuccaacucgcauugcuucauacaccaccccucagugacauuuucguguucacagacgcuagcccaaaagacgcauuccugaccaaccagguugagucucugacgcaagagcggagauguagagugaccuuccucguaaccgaggauacuucccguguacagggucgcgcaagaagagagaucuuaucaccgcugcgauucgaacccuauaaggcgguugcccuggcuuccggcggcgaggucauuuucaccaaagaccagcacaucagagauguugcagcaauugugggagagagcauggcggcccuggucacacugccucuggauccuccaguuguuguccccggucagccccuggucuuuucgguugauggauugcuccagaagauuacuguuagaauacauggagacauuuccuccuucuggaucaagaauccagcaggcguaucucagggacaggaggaggguggcgggccuuugggucauacacguagguucggccaauucuggauggugaccauggaugacccuccucagaccgguacgugggaaauucaggucaccgcagaggacacuccugggguccgcguccaggcccagacaucccuagacuuucucuuucacuuugguauuccaauggaggacggcccacacccuggacuuuacccacuaacccagccaguggcagggcugcagacacagcugcucguagaaucucagagcugggggaguucugcugcauuucugccccgucacccaaguaggggcccuagggguugccggacccguccuggagcccugggugccaggggcaccucgggcgcacgcucgccucggagccuugcaguggcucacgccgcagugcauccguag

SEQ ID NO: 269535 - RNA, 2067 nt, Artificial Sequence
  derived and/or modified sequence
augcucccaacagaggugccccagagccauccuggucccagcgcgcuccugcugcugcagcuacuucugccuccgacauccgcuuucuucccaaacauauggagucugcuagccgcgccuggcagcauaacucaccaggacuugacagaggaagcagcucugaaugugacccugcaguuauuccuugaacagccacccccuggaaggccgccacucagacucgaggauuuucugggaagaacucuacuggcggacgaucuuuucgccgcauacuucgguccaggcucaucaagaagauuccgggcagccuugggcgaggucucaagggcuaacgcagcccaggacuuucugccaacuagccguaacgauccugacuugcacuucgacgccgaacgacugggccaaggacgagcccgccucgucggcgcgcuuagagagaccguuguagccgcacgugcucuggaccacacccuugccagacagcgguugggcgccgcccugcaugcacuucaagauuucuauagccauagcaacuggguggaacuuggagagcagcaaccacacccacaucuccuuuggccacgacaagagcuacagaaccucgcccagguagcagacccgaccuguucggacugcgaagaacugagcuguccucgaaauuggcugggauucacucugcuuacaaguggcuauuuuggcacucauccacccaaaccccccgggaaauguagccacggcgggcacuucgaucguucuagcagucagccaccaagagggggaauuaacaaggacuccacaucucccggauucaguccucaccauaugcuucaccugcaagcagcuaaguuagcucugcuggcuucuauccaggccuucucucuucugcgcuccaggcugggcgaucgggauuuuagccgacuccuggacaucacuccagcuuccucccugucuuuuguucuagacacgacagguucaaugggagaggaaaucaaugcugccaaaauccaagcaaggcaucuagucgagcagagacgggggucuccaauggaacccguccacuauguacucguaccauuccacgacccugguuucgguccaguguuuacuaccuccgacccugacagcuuuuggcagcaguugaacgagauucacgcucucggcggcggcgaugagcccgagaugugucuguccgcccugcaacucgcccugcugcacacgcccccgcuguccgauauuuuuguguucaccgaugccagcccuaaggaugcauuucuaacuaaucagguagagagccucacacaagagcgccgcugccgaguuacauuccugguuaccgaagauaccucuaggguucaagggcgcgcccgaagagagauucugucuccucugagauuugagccauacaaggccguggcucuggccucgggcggggaggucauuuuuacuaaagaucagcacauucgugauguggcggcuauaguuggcgaaucuauggcagcucugguaacuuugccccuggaucccccagucguagugccaggacagccccuuguguucagcguugacggacuucuucagaagauuacggucaggauccacggggauaucagcucuuucuggauaaaaaauccugcaggcgucucccaagggcaggaagagggcgggggcccauuaggccacaccaggcgguuuggucaguucuggaugguaacgauggacgaccccccccagacgggcacaugggaaauacaggucacagccgaggacaccccaggcgugcgcgugcaagcccagacgagccuugacuuccuuuuccauuucgguaucccaauggaagacgggccacaccccgggcucuaccccuugacucaaccaguagccggucuucaaacucaacugcucguggaaagccaguccuggggcaguagcgcugccuuucugcccaggcaccccagccguggcccccgggggugucggacacgcccuggggcacugggugcacgcggaacgaguggagcccguucuccaaggucccuugcuguggcacaugccgccgugcaccccuag

SEQ ID NO: 269536 - RNA, 2067 nt, Artificial Sequence
  derived and/or modified sequence
auguuaccuaccgaggugccucagucccacccaggacccucugcuuuauuacuucugcagcugcugcugccaccuacuucugcauucuuuccuaacauuuggucccugcuggcagcaccaggaucuauuacacaccaagaccucacugaagaggccgcccugaacgucacucuucaacucuuccuagaacagcccccacccggccgacccccucugcgcuuggaggacuuucucggucguaccuuguuggccgacgauuuguuugccgcuuacuucgggccuggcuccucucgaagauuccgcgcugcccugggagaggugucucgcgcaaacgccgcccaggacuucuugcccacuagcaggaaugacccagaccugcacuuugacgcugagagacucgggcaagggcgcgcccggcuagucggcgcccuacgggaaacagucguggccgcuagagcucuggaccacaccuuagcccggcagcgccuuggggcugccuugcacgcucuucaggauuuuuauagccacaguaauuggguugaguugggggaacaacagccucacccacaucuucuauggccuagacaggaacugcagaaccuugcccagguggccgaccccaccuguagugauugugaggaacugaguugcccgagaaauuggcugggauuuacccugcucaccucuggguauuuuggaacacacccacccaagccgccuggaaagugcucucaugggggacacuucgacaggagcucuagccaaccccccagagguggcauaaacaaggacucuaccuccccaggguucagcccacaccacauguuacacuugcaggccgcuaaguuggccuuacucgccucuauucaggccuucucucuucuucguucuagacuuggcgacagggauuuuucaagacuccucgacauuacucccgcuucaucucucuccuuugugcuagauaccacgggcagcaugggagaggagauuaacgccgccaaaauccaggccaggcaccucguggagcagcgcagagguucccccauggaacccgugcacuacguucucguuccauuucacgacccuggauuuggaccaguguucacuaccucugauccggacagcuucuggcagcaacucaacgaaauucacgcacuggguggaggggaugaaccagagaugugccugucggcccuccagcuggcguugcuucacaccccaccacucuccgacauuuucguguucacggaugccagcccuaaggacgccuuuuugacaaaucaaguugaauccuuaacacaggaacgacgaugcagagucacguucuuggugaccgaagauacaagccggguacaaggcagggccaggagggagauucugagcccauugcgcuucgaaccauacaaggcggucgcccuugccagcgggggcgaagugaucuuuacuaaggaccagcacauacgagacguagcagccauugucggggaaucaauggccgcucuggucacucugccacuagauccgcccgucgugguccccgggcaaccucugguguucuccguugauggccugcugcagaagauuacugugagaauucauggagacaucucauccuucuggaucaagaauccagccggcguaucccaggggcaggaggaaggaggcggcccgcucgggcauacucgccgguuuggccaguuuuggauggucaccauggaugaucccccacaaacugguaccugggaaauucaaguuaccgcugaagauacaccgggagucaggguacaggcacagacaucucucgauuuucuguuccauuuugguaucccuauggaagacggaccacauccuggauuguacccacugacucaaccuguggcaggucugcagacacagcugcugguagagagccagagcuggggcagcucagccgccuuucucccaagacacccuucucggggaccccgaggcugcagaacccgccccggugcacucggcgcccguggcaccuccggagcuaggucaccacggagcuuggcagucgcacacgccgccguccacccguag

SEQ ID NO: 269537 - RNA, 2067 nt, Artificial Sequence
  derived and/or modified sequence
auguugccaacugaaguaccccagagccacccugguccauccgcccuccuguuguugcaguugcugcuucccccuaccagugccuucuuccccaacauuuggucacugcuugcugcuccaggaucaaucacucaucaggauuugaccgaggaagccgcccucaacguaacacugcaacucuuucuggaacagcccccccccggccggccaccuuuacgguuagaggacuuuuuaggacggacucucuuagccgaugaucuguucgccgcguacuucggucccggaucuagucgucguuuccgggcugcccuaggugaagucagucgcgccaacgcagcacaggacuuucuucccacuagccguaacgacccugauuugcauuuugacgcugaacgccucggacaggggcgcgcaagacucgugggcgcacuucgagagacagucguggcagcacgagcacuggaucacacucucgcccgccaacgccugggagccgcucuccaugcacugcaggacuucuacucucacagcaacuggguagaacucggcgagcaacagccacacccucaccuguuauggccuagacaagaacuccagaaucuggcacagguggcugacccuaccugcucugacugugaggaguugucauguccccgaaauuggcucggauucaccuugcuuaccaguggcuacuucggcacccauccaccaaagccacccggcaaaugcucucacggcggccacuuugaucgaucuuccagucaacccccuaggggcgguaucaacaaagauucuacuucaccgggguucucuccacaccacaugcugcaccuccaggccgccaaauuagcacuauuagcuaguauccaggcuuucucucugcucagaucuagauugggcgaucgcgauuucucccgacuccucgacaucacaccagcuucuaguuuaucauucgugcuagacaccacgggcuccaugggugaagaaauuaacgcagcuaagauccaggcaagacauuugguggagcagagacgcggcucgccaauggaaccagugcacuacguacuuguaccuuuucacgacccuggcuucggaccgguuuuuaccacuucugauccugacuccuuuuggcaacagcucaacgagauccacgcgcugggcggcggagaugagccagagaugugucuuagugcucugcagcuggcauuacugcacacaccaccucuuucagacauauucgucuucaccgaugccucuccaaaagacgccuucuugaccaaccaggucgaaucccugacccaggaacguagaugcagagucaccuuuuugguaacggaagauaccucccguguucaggggagagccaggagggaaauacugaguccacuaagguuugagcccuacaaagccgucgcacuugcuuccggcggugaagugauauuuacuaaagaccagcauauccgcgacgucgcagcaaucgugggagaguccauggcagccuuaguuacauugccucucgacccacccguagucguuccaggccagccuuuaguuuuuucuguggacgggcugcugcagaagauaacagugagaauacauggcgauauuucaucuuucuggaucaaaaauccugcgggugucagccaaggacaagaggaggguggaggcccguuaggccacaccagaagguuuggacaguuuuggauggugacgauggaugauccuccacagacugggacuugggaaauucaggucacugccgaggacacuccuggugugcggguucaggcccagacaucccucgacuuccuuuuccauuucgggauccccauggaggacgguccucacccugguuuauacccucucacucagccugucgcaggucugcagacucaguuguugguugaaucccagucuuggggcagcagcgcggccuuucuacccagacacccaucccgcggcccaagaggaugcaggacacguccaggagcacucggagcucguggcacaucuggagcucggucgccccggucucuggcuguggcucacgccgccguacaucccuag

SEQ ID NO: 269538 - RNA, 2067 nt, Artificial Sequence
  derived and/or modified sequence
augcuucccaccgaagucccgcagucccaucccggucccucugcauugcuguuauugcaacuucuccuuccaccuacuuccgccuucuucccaaacauuuggagccuauuggcagccccaggauccaucacacaccaggaccucaccgaggaggccgcucucaauguuacccuucaacuguuccucgaacaaccgccaccuggccgccccccuuugcgguuggaagauuuccucggacggacacuccuggcggacgaccuuuucgcagcuuacuuuggaccaggcucaagccgacgguucagagccgcucuaggagaagugagucgagcuaaugcagcccaggauuuccugccuacuucuaggaaugacccagaucuacauuuugaugccgaacgcuuaggccagggcagagccagacuugucggcgccuugcgugaaacggugguggccgcccgcgcacucgaccauacccuugcacggcaacgacuaggagccgcacuucacgcccugcaggacuucuacagucacucuaacuggguagaacugggcgagcagcagccucacccacacuugcuguggcccaggcaggaacuacagaaucuggcacaggucgcagacccaaccugcuccgauugcgaggaauuaaguugcccgcgcaacugguuaggguucacauugcugacauccggauacuucggcacccaucccccaaaaccucccgggaaauguagccacggcggccauuucgaccguucaucaucccaaccuccccgcggcggcaucaauaaggacucaacuucaccaggauuuuccccacaucauauguuacacuugcaagccgccaaauuagcacugcucgcuagcauccaggccuucucccugcugagaucacggcucggggaucgggauuuuucaagacuacuggauauuacacccgcaaguucucugucauucguacuggacaccacuggcucuaugggggaggaaaucaacgcagcgaaaauacaggcgcgccacuugguugagcagagaaggggcucaccuauggagcccguacauuacguuuuagugccuuuucaugacccuggauucggcccagucuucacaacaagcgacccggacucuuuuuggcagcaauugaacgaaauacaugcucucggagguggggacgagcccgaaaugugucuguccgcacuucagcuggcccuucuccauacuccaccucuauccgacaucuuuguuuucaccgacgccucucccaaagaugcuuuucugacgaaucaggucgagagucuaacccaagaaagacggugcagggucacuuuuuuggugaccgaagauacaucucgcgugcaaggucgggccaggcgagaaauccugucuccccuuagauuugaacccuacaaagccguggcauuggcaagcgggggcgaaguuauuuuuaccaaggaucaacacauucgggacguugcugcgauugucggugagucaauggcagcccuggugacccucccauuagauccuccagugguuguacccgggcagccucuuguuuuuagcgucgauggcuugcuucagaaaaucacggugagaauacauggagauauuucaagcuuuuggaucaaaaacccagcaggcguuucucaaggccaggaggaggggggagguccucuaggucacacacgucguuuuggccaguuuuggaugguaacuauggacgacccaccgcagaccggcacgugggaaauucagguaacagcagaagacaccccuggagugagggugcaggcucagacuucccuggacuuccuguuucacuuugguauaccuauggaggaugguccccacccuggguuguacccccuuacgcagccaguggccggccuccagacccagcuccugguagagucucagucuuggggaucuuccgcagcguuuuuaccucggcacccuaguaggggaccccgcggaugucgcacgaggcccggcgccuugggugcaagaggaacaucaggggcuagaucaccccggucccuagccgucgcucaugcagccgugcacccuuag

SEQ ID NO: 269539 - RNA, 2067 nt, Artificial Sequence
  derived and/or modified sequence
auguuaccaacagaagugccacagagccaccccggucccagcgcucucuuacuauuacaauuacuccuccccccuacauccgcauucuucccuaacauuuggagucuccuugccgccccagggucuauuacucaccaggaucuuaccgaagaagcagcucugaaugugacccugcagcucuuucuggagcaaccuccucccggcagacccccacuucgauuggaggacuucuuaggccggacccuccuggcagacgaccucuucgcagcuuauuucggacccgguaguuccagacgcuuucgggcagcacugggcgaagugaguagagcuaacgcugcacaggacuuucuacccacgucgcguaacgaucccgaucuccauuucgaugcugagcgccugggacaggguagagcgcgcuuaguuggagcccugagagaaacaguaguggccgcccgcgcacuggaccauacguuggcccggcagaggcucggagccgcauugcacgcccuccaggacuucuacucucauaguaauugggucgagcuuggagagcagcagccucauccacacuugcuuuggccccggcaggagcugcagaaucuggcacagguggccgaucccacauguuccgauugugaagagcuuucuugcccuaggaauugguugggcuuuacacuuuuaacuagcggauauuuuggaacacacccucccaaacccccaggcaagugcucccauggugggcacuuugaccgcucuucaucacaacccccccgcgggggcaucaauaaagacaguacaagcccugguuucagcccacaucacaugcugcaucugcaggcugcaaagcuggcgcugcuggcuuccauccaagcuuuuucacugcucaggucccgacucggcgacagagauuuuucacggcugcuagauaucaccccugccucaucucugaguuucguuuuggacaccaccggcucaaugggcgaagaaauuaaugcugccaaaauccaggcaagacaucucguggaacaacggagaggcucacccauggaaccuguccacuacgugcugguacccuuccacgauccaggauucggaccuguguucacuaccuccgaccccgacagcuuuuggcaacaacugaaugaaauccacgcacugggagggggggaugaacccgaaaugugucucucugcacuucaacuggcucuguugcauacaccaccuuuguccgauaucuucguuuuuacagaugcaagcccaaaagacgccuucuugacaaaccaggucgagucucuaacucaggaacgaagaugcagagucacuuuccugguuacggaagauacuaguaggguucaaggucgagcucgucgggaaaucuugaguccacugcgcuuugagccuuauaaagccguggcccuggccagugggggagaaguaaucuucaccaaagaucagcacaucagagacguugcggccaucguuggagaguccauggcagcucuuguuacucucccuuuagauccuccuguggugguuccagggcagccgcugguuuuuaguguggacgggcuguuacagaagaucacugucagaauucauggugauauaucuucguuuuggaucaagaaccccgcaggugugagccaaggucaggaagaaggcggagggccauuaggccauacaagacgcuuuggucaauuuuggaugguuacgauggaugacccuccucagacagguaccugggaaauacaaguuacagcagaggauacaccuggcgugagaguucaggcccaaacaucccucgauuucuuguuucacuucgguauuccaauggaggacgguccucaucccgguuuguacccauugacucagccuguggccggcuugcaaacacagcuucuuguugagagccagucguggggaucaagcgcagcuuuucugcccagacauccaaguaggggcccacgugggugccgaacuagacccggagcauuaggcgcacgugguacaagcggagcccggucaccucggagucucgcaguggcgcacgccgccgugcaccccuag

SEQ ID NO: 269540 - RNA, 2067 nt, Artificial Sequence
  derived and/or modified sequence
augcugccuaccgaagucccucagagccauccugggccgagcgcucuacuccuccuccagcugcuucuccccccuaccucugcuuuuuucccaaauaucuggucauuauuggccgcccccggcuccauaacgcaucaggaucucacagaggaggccgcucucaacgucacccugcaacucuuucucgaacagccucccccaggccgacccccuuugaggcuggaggauuuccuuggaagaacccucuuagccgaugaucuguucgcagcauauuuuggacccggaucuucucggagguuucgcgcugcccugggugaggucucaagagcgaaugcugcgcaagauuuucuaccgaccagcaggaacgacccggauuuacacuucgacgcugaaagauugggacagggacgggcacgguuggugggagcucuuagagaaacagucguugcagcucgcgcccuagaccauacgcuugcacgccagcggcuuggagcugcacuucacgcucugcaagauuucuauucucauucuaauuggguggagcugggcgaacagcagccucauccccaucuguuauggccuaggcaagaacuucagaaucucgcucagguugcagauccuacuuguucugacugugaggaauugaguugcccacgaaacuggcuuggauucacacuguugaccagcgguuacuucggcacccacccccccaaacccccuggaaaaugcucacacggcggacauuucgauagaagcaguagccagccaccucguggagggauuaacaaggauucuaccuccccugguuuuaguccccaccacauguugcaccuccaggccgcuaagcucgcacuacuggcaucuauucaggcguuuucucugcugcguucaagacuuggggaucgugacuucagucgacugcuggacaucacacccgcuucaucucugagcuucguauuggauacgaccggaucaaugggugaagagaucaaugccgccaagauacaggccagacaccuaguugaacagcgcagagggucuccaauggagccgguucauuaugugcucguccccuuccacgaccccggguucgguccuguuuuuacuacuucagaucccgacucuuuuuggcagcaauuaaacgaaauacacgcccucggggggggcgaugaaccugagaugugccugucggcccugcaacucgcacuuuuacacacaccaccccuuucggauauuuucguguuuaccgacgccucacccaaagacgcuuuucucacaaaucagguggagucacuuacucaggaacgcaggugcaggguaacauuuuuggugaccgaggacacuucccgagugcaaggacgagccagacgcgaaauacucuccccacuaagauuugaaccauacaaggcaguggcccuggcuagcggaggagagguuaucuucacuaaggaucaacacaucagagauguggccgccauugugggggaaagcauggcugcgcuugugacccugccacuggacccaccaguuguugucccagggcaaccacugguuuuuucagucgauggacugcuucaaaagauuaccgucagaauccacggggacaucaguuccuucuggauuaagaaucccgccggaguaagucaaggacaagaggaaggcggaggacccuugggucauacacgaagauucggacaguuuuggaugguuacgauggaugaccccccccaaaccgguacuugggaaauucaagugacugccgaggacacaccgggcguuaggguacaggcccagaccucccucgacuuccuguuccacuuugggaucccaauggaggacggaccucacccuggccuguacccucuuacucagcccgucgcuggacuucaaacccaacugcuggucgaaucccaaucuuggggcucuucugcagccuuccugccgagacauccuucaagagggccacgggguugucguaccagacccggugcccuaggugcucgcgguaccuccggcgccagaucuccuagaagccucgccgucgcacaugcggcuguccaccccuag

SEQ ID NO: 269541 - RNA, 2067 nt, Artificial Sequence
  derived and/or modified sequence
augcucccaaccgaggugccucagagccaccccggaccgucugcccugcucuugcuccagcugcuccugccccccacauccgccuucuuuccuaacaucuggagucugcuggccgcccccgguuccauuacacaccaagaucuuacugaagaggcugcccugaaugugacccugcagcucuucuuggaacagccuccaccuggaagacccccuuugcgccuggaagacuuuuuaggucguacacugcuagcugacgaucuuuucgccgcuuacuuuggcccgggcucaucucgccgcuuccgagcagcccugggagaggucucuagggcaaacgccgcacaggacuuucuccccaccagccgcaaugaccccgaccugcacuuugaugccgaaagauuaggacaaggacgcgcccggcuaguuggcgcuuuacgagagacugugguagcggcaagagcccuggaccacacguuggcacgccaaaggcucggagccgcguuacaugcgcuucaggauuuuuacucccacucuaauuggguggagcucggagaacaacagccacauccucacuuacucuggccucgccaggaauuacagaaccuggcccaaguggccgauccaacaugcucagacugcgaggagcuuagcugcccuaggaacuggcucggcuucacccuguuaacguccgguuacuucggcacacaccccccuaaaccaccuggcaaguguucccacggugggcacuucgacaggucuucuucccaaccgccuagaggaggcaucaauaaagauaguaccagcccaggauucuccccucaccacaugcuccacuugcaagccgccaaguuagcccuucucgcuucuauacaagccuuuucucuuuugagaucgcgccuaggugaucgagacuucucgagacuccuggauaucaccccugcuucuucauugucauuugugcuagacacaaccggcucaaugggcgaagagauuaaugccgcuaagauucaggcaagacaccugguagaacaacgacgcggauccccuauggaaccagugcauuauguucucguacccuuucacgauccuggcuucgguccaguguucacaacaucugaccccgacuccuuuuggcagcaacugaacgaaauccacgcgcuaggaggaggagaugaacccgaaauguguuugucugcacuacagcuggcacugcugcacaccccuccacugagcgauauuuuuguauucaccgacgcguccccaaaagacgcguuucuaacaaaucaaguagagaguuugacgcaagagaggcgcuguaggguuacauucuuagugaccgaagacaccuccagggugcaagggcgcgcaagacgagaaauauuguccccccuaagguucgaaccauauaaggccguagcuuuggcaucgggcggcgagguuauauuuacuaaagaucagcacauccgagaugucgcagcuaucgugggcgagucaauggcagcccuuguaacucugccuuuagaccccccuguugucgugccaggucagccucuaguguucucuguugacggccuuuugcagaagauuacaguucgcauccauggcgacauuucgagcuuuuggauuaagaauccagccggaguuucacaaggacaggaagaagguggcgguccacuuggccacacucgccguuucggacaguucuggauggugaccauggaugauccuccgcagacgggcacaugggagauucaggugacggccgaagauacaccuggcguucggguucaggcccagaccucgcuggacuuucuuuuucauuucggaauccccauggaggauggcccacaccccggucuuuacccccucacucagcccguggcgggucugcagacccaacugcuugucgaaucacagucuuggggcuccuccgcagcuuuccuuccccgccacccaagcagaggcccaagaggcugucgaacacgacccggagccuugggagcuagaggaacgaguggagcucggaguccccgaucauuggcgguagcccacgcagcaguucaccccuag

SEQ ID NO: 269542 - protein, 158 aa, Artificial Sequence
  derived and/or modified sequence
MEGKRKLEGKPLRFRGVHHAFAKILAEGGIRGLWAGWVPNIQRAALVNMGDLTTYDTVKHYLVLNTPLEDNIMTHGLSSLCSGLVASILGTPADVIKSRIMNQPRDKQGRGLLYKSSTDCLIQAVQGEGFMSLYKGFLPSWLRMAAVIVNSSRSQLKV

SEQ ID NO: 269543 - protein, 98 aa, Artificial Sequence
  derived and/or modified sequence
  misc_feature (1)..(1): Xaa can be any naturally occurring amino acid
XNMGDLTTYDTVKHYLVLNTPLEDNIMTHGLSSLCSGLVASILGTPADVIKSRIMNQPRDKQGRGLLYKSSTDCLIQAVQGEGFMSLYKGFLPSWLRM

SEQ ID NO: 269544 - protein, 149 aa, Artificial Sequence
  derived and/or modified sequence
MSECPLILYIHKHIDTYSQSYLFNDLFYPVYSGGRMVTYEHLREVVFGKSEDEHYPLWKSVIGGMMAGVIGQFLANPTDLVKVQMQMEGKRKLEGKPLRFRGVHHAFAKILAEGGIRGLWAGWVPNIQRAALVNMGDLTTYDTVKHYLV

SEQ ID NO: 269545 - protein, 159 aa, Artificial Sequence
  derived and/or modified sequence
  misc_feature (1)..(1): Xaa can be any naturally occurring amino acid
XMEGKRKLEGKPLRFRGVHHAFAKILAEGGIRGLWAGWVPNIQRAALVNMGDLTTYDTVKHYLVLNTPLEDNIMTHGLSSLCSGLVASILGTPADVIKSRIMNQPRDKQGRGLLYKSSTDCLIQAVQGEGFMSLYKGFLPSWLRMAAVIVNSSRSQLKV

SEQ ID NO: 269546 - DNA, 477 bp, Artificial Sequence
  derived and/or modified sequence
atggaggggaaaaggaagctggagggcaagcctctccggtttcgaggggtccaccacgcatttgcaaagattttggcagaaggaggcattcgcggcctttgggcggggtgggtccccaacatacagagggcggcactcgtcaatatgggtgacctgacaacctatgataccgtcaagcattacctggttcttaataccccattagaagacaacataatgacccacggcctgagttctctttgctctggtctagtcgcctccattctgggaacacctgctgacgttatcaagtctcgcatcatgaatcaaccccgggataaacaaggacgaggccttctgtacaaatccagcactgattgcctaattcaagcagtacagggtgagggctttatgtctctatacaaaggctttttacctagctggctcaggatggcagcagttatagtgaactccagccgatcacagctgaaggtttag

SEQ ID NO: 269547 - DNA, 297 bp, Artificial Sequence
  derived and/or modified sequence
tagaacatgggtgacctgactacatacgacacagtaaaacactatctggtcttgaacacccctttagaagataacataatgacacacgggctgtcaagcctctgtagcgggctggtcgcttcgattcttggtacacccgctgatgtgattaagtcccgcataatgaaccagcccagggataagcagggcagaggtctgctatacaagtctagcaccgactgcctgatccaggctgtgcagggggaaggcttcatgtccttgtataagggtttcttaccgtcctggctccgtatgtag

SEQ ID NO: 269548 - DNA, 480 bp, Artificial Sequence
  derived and/or modified sequence
taaatggagggcaagagaaagctggagggaaaaccacttcggttccgcggagtacatcacgcattcgccaaaattctagccgaaggcggaatcaggggactctgggccggctgggtgccgaatattcagagagccgccctggtcaatatgggtgacctgacaacttatgacacagtgaagcattacttggtgttgaacaccccactagaggataatattatgacccacggcctgagtagcctttgctccgggttggtggcttctatattgggcacccctgccgacgtgatcaagtcacgcatcatgaatcagcctcgggacaagcaaggacgtggactgttgtacaaatcaagcactgattgcctgatccaggcagtccagggcgagggcttcatgtccctatacaaagggtttctcccctcctggctgcgaatggcggccgtaattgtcaactcctctagatcacagctcaaagtctag

SEQ ID NO: 269549 - DNA, 477 bp, Artificial Sequence
  derived and/or modified sequence
atggagggcaagaggaagctggagggcaagcccctgcgcttccggggcgtgcaccacgcctttgccaagatcctggccgagggcggcatccggggcctgtgggccggctgggtgcccaacatccagagagctgccctggtgaacatgggagacctgaccacctatgacacagtgaagcactacctggtgctgaacacccccctggaggacaacatcatgacccacggcctgagcagcctgtgcagcggcctggtggccagcatcctgggcaccccagcagatgtgatcaagagccgcatcatgaaccagccccgggacaagcagggccggggcctgctgtacaagagcagcacagactgcctgatccaggccgtgcagggcgagggcttcatgagcctgtacaagggcttcctgcccagctggctgaggatggccgccgtcatcgtgaacagcagccgcagccagctgaaggtgtag

SEQ ID NO: 269550 - DNA, 297 bp, Artificial Sequence
  derived and/or modified sequence
tgaaacatgggagacctgaccacctatgacacagtgaagcactacctggtgctgaacacccccctggaggacaacatcatgacccacggcctgagcagcctgtgcagcggcctggtggccagcatcctgggcaccccagcagatgtgatcaagagccgcatcatgaaccagccccgggacaagcagggccggggcctgctgtacaagagcagcacagactgcctgatccaggccgtgcagggcgagggcttcatgagcctgtacaagggcttcctgcccagctggctgaggatgtag

SEQ ID NO: 269551 - DNA, 480 bp, Artificial Sequence
  derived and/or modified sequence
tgaatggagggcaagaggaagctggagggcaagcccctgcgcttccggggcgtgcaccacgcctttgccaagatcctggccgagggcggcatccggggcctgtgggccggctgggtgcccaacatccagagagctgccctggtgaacatgggagacctgaccacctatgacacagtgaagcactacctggtgctgaacacccccctggaggacaacatcatgacccacggcctgagcagcctgtgcagcggcctggtggccagcatcctgggcaccccagcagatgtgatcaagagccgcatcatgaaccagccccgggacaagcagggccggggcctgctgtacaagagcagcacagactgcctgatccaggccgtgcagggcgagggcttcatgagcctgtacaagggcttcctgcccagctggctgaggatggctgctgtgattgtgaacagcagccgcagccagctgaaggtgtag

SEQ ID NO: 269552 - DNA, 477 bp, Artificial Sequence
  derived and/or modified sequence
atggagggcaagcggaagctggagggcaagcccctgcggttccggggagtgcaccacgcattcgcgaaaatcctcgccgaaggcggtatacgggggctctgggccggctgggtacctaatattcaacgggcggctctggtgaacatgggtgatctgacaacctacgatacagtgaagcactatctcgtcctgaacacccccctggaggacaatataatgacacacggcctgtcctccttgtgctccggtctcgtggcttctatcttgggtacccccgccgacgtgatcaagtcacggataatgaatcagcccagggacaaacagggtaggggtttactgtataaaagcagcaccgactgtttgattcaggcggtccaaggcgagggatttatgagcctgtacaagggattcctccctagttggcttagaatggccgcagtgattgtgaattcaagccggtctcagttgaaagtgtag

SEQ ID NO: 269553 - DNA, 297 bp, Artificial Sequence
  derived and/or modified sequence
tgaaacatgggcgacctgaccacctacgacaccgtgaagcactacctggttttaaacacgccactcgaggacaatatcatgactcacggactgagttccctgtgttcaggcctagtggcctcaatacttggcacacctgctgacgtgatcaagagcagaatcatgaaccagcccagggacaagcagggacggggcctgctatataagtcctctacggactgccttattcaggcagtacaaggcgaaggcttcatgtctctctataaggggttcttaccctcctggctgcgaatgtag

SEQ ID NO: 269554 - DNA, 480 bp, Artificial Sequence
  derived and/or modified sequence
tgaatggagggcaagcggaagctggagggcaagcccctgcggttccggggagttcatcacgcttttgctaaaatactcgcggagggcggaattagaggcctgtgggcaggctgggtgcctaacatccagcgcgcagcactggtcaatatgggcgatttgaccacatatgatacagtgaagcattacttagtgctcaataccccgctggaggataatattatgactcacggcctgtcctctctgtgttccggcctcgtcgcatctatcctcggcactcctgccgatgtgatcaagtctcgcatcatgaaccagcccagagacaagcagggaagaggtttgctgtacaaatcttctaccgattgtctaatccaggctgtccagggcgaaggtttcatgagtctctacaaaggtttcctccccagttggctgagaatggcagctgtcattgtgaacagttcacggtcacagttgaaagtgtag

SEQ ID NO: 269555 - DNA, 477 bp, Artificial Sequence
  derived and/or modified sequence
atggagggcaaaaggaagttagagggcaagccactgaggttccgaggtgtgcaccacgctttcgccaagatcttggccgaaggcggtataaggggcctgtgggccggatgggtccctaacatccagcgggctgcacttgtcaatatgggggatctgacaacctatgacactgttaagcactatttggtgttgaatacccccctggaggataatatcatgacccatggcctctcatccctgtgctctggactggtggcgtctattctaggaacgcccgcagacgttattaagtctcggatcatgaaccagcctagagacaagcagggcagagggttactgtataaatcttctactgactgtctcatccaggcagtgcaaggagaggggttcatgagtttgtataagggctttctgcctagctggcttcgcatggccgctgtgatcgttaattcttcacgcagccaactgaaagtgtag

SEQ ID NO: 269556 - DNA, 297 bp, Artificial Sequence
  derived and/or modified sequence
tagaacatgggagatctgaccacctatgataccgtgaagcattatctggtgttaaatacaccacttgaagacaacattatgactcacggtctatctagtctttgcagcgggctggtggcctcgatcttgggcacacctgccgatgttatcaagtcccgtattatgaaccagccccgtgataaacaggggaggggcctactgtacaagagcagtacggattgcctaatccaagcggtgcagggcgaggggtttatgagtctctacaaagggttcttaccgtcatggctacgcatgtag

SEQ ID NO: 269557 - DNA, 480 bp, Artificial Sequence
  derived and/or modified sequence
tgaatggaggggaagagaaagcttgaaggaaagcccctacgctttaggggcgtgcaccacgcttttgcgaaaattctggccgagggcggaattcggggtctgtgggcgggatgggtgccaaacattcagagagcggcattagtgaatatgggagatctcactacatacgacactgtgaagcattatctggtcttgaacacccctctcgaggataacattatgacacatgggctcagctctctgtgtagtggtctggtcgcgtcaatcctgggcacacctgctgacgtaatcaagagtaggatcatgaaccagcccagagacaagcaggggagggggctgctttataaatctagtacggattgcctgattcaagccgtacaaggggaaggttttatgagcctgtacaaaggttttctcccctcctggctccgcatggcggcagtaatcgtgaatagtagccggtcccaacttaaagtgtag

SEQ ID NO: 269558 - DNA, 650 bp, Artificial Sequence
  derived and/or modified sequence
tgaatatgggagatttaaccacttatgatacagtgaaacactacttggtattgaatacaccacttgaggacaatatcatgactcacggtttatcaagtttatgttctggactggtagcttctattctgggaacaccagccgatgtcatcaaaagcagaataatgaatcaaccacgagataaacaaggaaggggacttttgtataaatcatcgactgactgcttgattcaggctgttcaaggtgaaggattcatgagtctatataaaggctttttaccatcttggctgagaatgtgatctggtcggatctcacaaggccatccaatgagaccccgcacagcattttctaaagaagaatcgaagcctgaccactttcaccttgggcaagaaggtttggcctttgagttgctattctatgctgaagagcctgcttagaggaggagtaccaggagggagccagcatttcagatctgaagtagacgataggaatgtggaagaacacatacatagtgcttaagaaatacatttaacctgttatgtcagtatttatcaatgaagtttgataattcacttttctgtcattgttaaagcgtacatactgtaaattaaagggaggtgaatggaaattaatgaataaacattttgagtttc

SEQ ID NO: 269559 - DNA, 526 bp, Artificial Sequence
  derived and/or modified sequence
aatggaaggaaaaaggaaactggaaggaaaaccattgcgatttcgtggtgtacatcatgcatttgcaaaaatcttagctgaaggaggaatacgagggctttgggcaggctgggtacccaatatacaaagagcagcactggtgaatatgggagatttaaccacttatgatacagtgaaacactacttggtattgaatacaccacttgaggacaatatcatgactcacggtttatcaagtttatgttctggactggtagcttctattctgggaacaccagccgatgtcatcaaaagcagaataatgaatcaaccacgagataaacaaggaaggggacttttgtataaatcatcgactgactgcttgattcaggctgttcaaggtgaaggattcatgagtctatataaaggctttttaccatcttggctgagaatggctgctgtgattgtcaacagcagcaggagccagttgaaggtttgataaaagcagatgaagatgcttaaagatgtctgtttgctgaaaatatct

SEQ ID NO: 269560 - DNA, 477 bp, Artificial Sequence
  derived and/or modified sequence
atggagggcaagagaaagctggagggcaagcccctgagattcagaggcgtgcaccacgccttcgccaagatcctggccgagggcggcatcagaggcctgtgggccggctgggtgcccaacatccagagagccgccctggtgaacatgggcgacctgaccacctacgacaccgtgaagcactacctggtgctgaacacccccctggaggacaacatcatgacccacggcctgagcagcctgtgcagcggcctggtggccagcatcctgggcacccccgccgacgtgatcaagagcagaatcatgaaccagcccagagacaagcagggcagaggcctgctgtacaagagcagcaccgactgcctgatccaggccgtgcagggcgagggcttcatgagcctgtacaagggcttcctgcccagctggctgagaatggccgccgtgatcgtgaacagcagcagaagccagctgaaggtgtag

SEQ ID NO: 269561 - DNA, 297 bp, Artificial Sequence
  derived and/or modified sequence
tgaaacatgggcgacctgaccacctacgacaccgtgaagcactacctggtgctgaacacccccctggaggacaacatcatgacccacggcctgagcagcctgtgcagcggcctggtggccagcatcctgggcacccccgccgacgtgatcaagagcagaatcatgaaccagcccagagacaagcagggcagaggcctgctgtacaagagcagcaccgactgcctgatccaggccgtgcagggcgagggcttcatgagcctgtacaagggcttcctgcccagctggctgagaatgtag

SEQ ID NO: 269562 - DNA, 480 bp, Artificial Sequence
  derived and/or modified sequence
tgaatggagggcaagagaaagctggagggcaagcccctgagattcagaggcgtgcaccacgccttcgccaagatcctggccgagggcggcatcagaggcctgtgggccggctgggtgcccaacatccagagagccgccctggtgaacatgggcgacctgaccacctacgacaccgtgaagcactacctggtgctgaacacccccctggaggacaacatcatgacccacggcctgagcagcctgtgcagcggcctggtggccagcatcctgggcacccccgccgacgtgatcaagagcagaatcatgaaccagcccagagacaagcagggcagaggcctgctgtacaagagcagcaccgactgcctgatccaggccgtgcagggcgagggcttcatgagcctgtacaagggcttcctgcccagctggctgagaatggccgccgtgatcgtgaacagcagcagaagccagctgaaggtgtag

SEQ ID NO: 269563 - protein, 342 aa, Artificial Sequence
  derived and/or modified sequence
MAASQAVEEMRSRVVLGEFGVRNVHTTDFPGNYSGYDDAWDQDRFEKNFRVDVVHMDENSLEFDMVGIDAAIANAFRRILLAEVPTMAVEKVLVYNNTSIVQDEILAHRLGLIPIHADPRLFEYRNQGDEEGTEIDTLQFRLQVRCTRNPHAAKDSSDPNELYVNHKVYTRHMTWIPLGNQADLFPEGTIRPVHDDILIAQLRPGQEIDLLMHCVKGIGKDHAKFSPVATASYRLLPDITLLEPVEGEAAEELSRCFSPGVIEVQEVQGKKVARVANPRLDTFSREIFRNEKLKKVVRLARVRDHYICKKDLLAAVAHTCNPSTLGGQGEWITGSRERDHPG

SEQ ID NO: 269564 - DNA, 1029 bp, Artificial Sequence
  derived and/or modified sequence
atggcagctagtcaggcggtagaggagatgcgatcaagagtggtcctgggcgagtttggtgtgaggaatgtccatacaaccgactttccagggaactacagcgggtacgatgatgcttgggaccaggatcgcttcgagaaaaattttcgggtggacgttgtacatatggatgagaattccttagagtttgacatggtgggaatcgacgcagctatagccaatgcttttagaagaatcctgctcgcggaggtcccaactatggccgttgagaaggtgctggtgtataataacaccagcattgtgcaggacgagatccttgcccatcgcctgggcctaattcctattcatgccgatcccaggttgttcgagtacagaaatcagggggatgaggagggaacagagattgacacactgcagttcagattgcaggtcagatgcacccgaaatcctcacgccgcaaaagattcttctgatcccaatgagctctatgtgaatcataaggtctacaccaggcacatgacgtggatcccgctcggcaatcaggccgacctctttccggagggtactattcggcccgttcatgacgacatcctcattgcccagctgagaccaggacaagagatcgaccttctcatgcattgcgtcaaagggattggcaaagaccacgcgaaattctcaccggtggcaacagcttcctatagactgcttcctgatataaccctccttgaacccgtggagggggaagctgccgaagagttgagcagatgcttcagccctggcgtgatagaagtgcaggaggttcaggggaagaaagtagcaagagttgcgaaccccagactagatacattctcaagggaaatttttagaaatgagaaactgaagaaggttgtgcggctggccagagtgagggaccactacatttgtaagaaggacctgctggctgccgtcgcgcacacttgcaatccaagcacattgggcggacaaggggaatggataaccggatctcgggagcgggaccatccagggtag

SEQ ID NO: 269565 - DNA, 1029 bp, Artificial Sequence
  derived and/or modified sequence
atggccgccagccaggccgtggaggagatgaggagccgggtggtgctgggggagtttggagtgagaaatgtgcacaccacagacttccctggcaactacagcggctatgatgatgcctgggaccaggacagatttgagaagaacttccgggtggatgtggtgcacatggatgagaacagcctggagtttgacatggtgggcattgatgctgccatcgccaatgccttccgccgcatcctgctggccgaggtgcccaccatggctgtggagaaggtgctggtgtacaacaacaccagcatcgtgcaggatgagatcctggcccaccggctgggcctcatccccatccatgctgacccccggctgtttgagtacagaaaccagggagatgaggagggcacagaaattgacaccctgcagttccggctgcaggtgcgctgcaccaggaacccccacgccgccaaggacagcagtgaccccaatgagctgtatgtgaaccacaaggtgtacaccaggcacatgacctggatccccctgggcaaccaggccgacctcttccctgagggcaccatccggcctgtgcatgatgacatcctgattgcccagctgcggcccggccaggagattgacctgctgatgcactgtgtgaagggcatcggcaaggaccacgccaagttcagccctgtggccacagccagctaccgcctgctgcctgacatcaccctgctggagcctgtggagggggaggccgctgaggagctgagccgctgcttcagccctggggtcatcgaggtgcaggaggtgcagggcaagaaggtggcccgggtggccaacccccggctggacaccttcagccgggagatcttcagaaatgagaagctgaagaaggtggtgcggctggcccgggtgcgggaccactacatctgcaagaaggacctgctggccgctgtggcccacacctgcaaccccagcaccctgggcggccagggcgagtggatcaccggcagccgggagcgggaccaccctggatag

SEQ ID NO: 269566 - DNA, 1029 bp, Artificial Sequence
  derived and/or modified sequence
atggccgccagccaggccgtggaggagatgcggagccgggtggtgctgggagagttcggagtgcgtaacgtgcacacaacggacttcccagggaactactcgggttacgacgacgcttgggaccaagaccgattcgaaaaaaatttcagagtcgacgtggtccatatggacgagaatagcctggagttcgatatggtgggaatcgatgcagctatcgcgaatgcatttaggcgtattctgctggccgaggtgccgacaatggcggtggagaaggtcctggtgtacaacaacacctcgatagtacaggatgagatcttggctcatcggctcggactaatccccatccatgctgacccacgcctgttcgagtacagaaaccagggcgacgaggaagggacagaaatcgacacactccagttccgcctgcaagttaggtgtacccggaatcctcatgccgcaaaggattccagcgacccgaatgagctgtacgttaaccacaaggtttacacccgacatatgacatggatcccactggggaaccaagccgatttgttccccgaggggaccattagacctgtgcacgacgacatccttatagcacagctgcgccctggacaggaaatcgacctgctgatgcactgcgtgaaagggatcgggaaggatcacgccaagttcagtcctgtggcaacagccagttatcggctgttgccagatatcactctgctcgagcctgtggaaggagaggccgcagaggagctgagtaggtgcttctcccccggagtcatcgaggtgcaggaagtgcaaggcaagaaggttgcccgggtggccaaccctcggcttgacacctttagtagggaaatttttaggaacgagaagttaaagaaagtcgtcagactcgcgagggtacgggaccactatatatgtaagaaagacttgctcgccgccgtcgcacatacatgtaatcccagcaccctcggcggtcagggcgaatggattactggatctcgtgagcgtgaccacccaggctag

SEQ ID NO: 269567 - DNA, 1280 bp, Artificial Sequence
  derived and/or modified sequence
agtctcgtggagagattgaagatggcggcttctcaggcggtggaggaaatgcggagccgcgtggttctgggggagtttggggttcgcaatgtccatactactgactttcccggtaactattccggttatgatgatgcctgggaccaggaccgcttcgagaagaatttccgtgtggatgtagtacacatggatgaaaactcactggagtttgacatggtgggaattgacgcagccattgccaatgcttttcgacgaattctgctagctgaggtgccaactatggctgtggagaaggtcctggtgtacaataatacatccattgttcaggatgagattcttgctcaccgtctggggctcattcccattcatgctgatccccgtctttttgagtatcggaaccaaggagatgaagaaggcacagagatagatactctacagtttcgtctccaggtcagatgcactcggaacccccatgctgctaaagattcctctgaccccaacgaactgtacgtgaaccacaaagtgtataccaggcatatgacatggatccccctggggaaccaggctgatctctttccagagggcactatccgaccagtgcatgatgatatcctcatcgctcagctgcggcctggccaagaaattgacctgctcatgcactgtgtcaagggcattggcaaagatcatgccaagttttcaccagtggcaacagccagttacaggctcctgccagacatcaccctgcttgagcccgtggaaggggaggcagctgaggagttgagcaggtgcttctcacctggtgttattgaggtgcaggaagtccaaggtaaaaaggtggccagagttgccaacccccggctggataccttcagcagagaaatcttccggaatgagaagctaaagaaggttgtgaggcttgcccgggttcgagatcattatatctgtaagaaagatttgctggctgcggtggctcacacctgtaatcccagcactttgggaggccaaggcgagtggatcacggggtcaagagagcgagaccatcctggctaacatggtgaaaccccgtctctactaaaaaaaaaaaaaaaaaaaaaaaaaattagtcgggcatgggggcgagcgcctgtagtcccagctactcgagaagctaaggcaagagaatggtgtgaacctgggaggcgaagcttgcagtgagccgagatcacgccactgcactccagcctgggcaacagagcaagactccgtctcaaaaaaaaaaaaaaagaaaagaaagaaagaga

SEQ ID NO: 269568 - DNA, 1029 bp, Artificial Sequence
  derived and/or modified sequence
atggcggcatcacaggcagtggaagagatgcggtcgagagttgtgctcggagagttcggcgtacggaacgtgcatactacagactttcctggtaactacagcggctacgatgacgcatgggatcaggaccgcttcgagaaaaattttcgcgtcgatgtcgtacatatggacgagaactccttggaattcgacatggttggtattgacgctgccattgccaatgcctttcgacggatccttttggccgaggtccctactatggctgtcgagaaggttttagtttataacaacacatctatcgtgcaagatgagatcttggcacaccgcctcggacttatccccatccatgccgacccacgactatttgagtatagaaaccagggagacgaagaaggaaccgagatcgacactcttcagttcaggctgcaagttcggtgtacaagaaacccacatgctgccaaagactcgtctgacccgaatgaactttatgtcaaccacaaggtgtatacccggcacatgacatggattcctctcggcaatcaggctgatctgtttcccgagggaacaatcaggccagtccatgatgatatccttatcgctcaacttcggccaggccaggaaatcgacttactgatgcactgcgtaaaaggcatcggcaaggaccacgccaaattctcccctgtggccacagctagctatcgcctactgcccgacatcactctgctggagccagtcgaaggggaggcagcagaggagctctccagatgcttttctccaggcgtgattgaggttcaggaggttcagggcaagaaagtcgcccgagtcgctaaccctcgcctggataccttttccagagaaatattccgcaatgagaagctgaagaaggtggttcgcttagcacgtgtccgggaccactatatctgcaagaaggatctacttgcagcagttgcccacacatgtaacccctctaccctcgggggtcagggtgagtggatcactgggagccgggagcgggaccatcccggttag

SEQ ID NO: 269569 - DNA, 1029 bp, Artificial Sequence
  derived and/or modified sequence
atggccgccagccaggccgtggaggagatgagaagcagagtggtgctgggcgagttcggcgtgagaaacgtgcacaccaccgacttccccggcaactacagcggctacgacgacgcctgggaccaggacagattcgagaagaacttcagagtggacgtggtgcacatggacgagaacagcctggagttcgacatggtgggcatcgacgccgccatcgccaacgccttcagaagaatcctgctggccgaggtgcccaccatggccgtggagaaggtgctggtgtacaacaacaccagcatcgtgcaggacgagatcctggcccacagactgggcctgatccccatccacgccgaccccagactgttcgagtacagaaaccagggcgacgaggagggcaccgagatcgacaccctgcagttcagactgcaggtgagatgcaccagaaacccccacgccgccaaggacagcagcgaccccaacgagctgtacgtgaaccacaaggtgtacaccagacacatgacctggatccccctgggcaaccaggccgacctgttccccgagggcaccatcagacccgtgcacgacgacatcctgatcgcccagctgagacccggccaggagatcgacctgctgatgcactgcgtgaagggcatcggcaaggaccacgccaagttcagccccgtggccaccgccagctacagactgctgcccgacatcaccctgctggagcccgtggagggcgaggccgccgaggagctgagcagatgcttcagccccggcgtgatcgaggtgcaggaggtgcagggcaagaaggtggccagagtggccaaccccagactggacaccttcagcagagagatcttcagaaacgagaagctgaagaaggtggtgagactggccagagtgagagaccactacatctgcaagaaggacctgctggccgccgtggcccacacctgcaaccccagcaccctgggcggccagggcgagtggatcaccggcagcagagagagagaccaccccggctag

SEQ ID NO: 269570 - DNA, 489 bp, Artificial Sequence
  derived and/or modified sequence
atggaggacacccaggccatcgactgggacgtggaggaggaggaggagaccgagcagagcagcgagagcctgagatgcaacgtggagcccgtgggcagactgcacatcttcagcggcgcccacggccccgagaaggacttccccctgcacctgggcaagaacgtggtgggcagaatgcccgactgcagcgtggccctgcccttccccagcatcagcaagcagcacgccgagatcgagatcctggcctgggacaaggcccccatcctgagagactgcggcagcctgaacggcacccagatcctgagaccccccaaggtgctgagccccggcgtgagccacagactgagagaccaggagctgatcctgttcgccgacctgctgtgccagtaccacagactggacgtgagcctgcccttcgtgagcagaggccccctgaccgtggaggagacccccagagtgcagggcgagacccagccccagagactgtag

SEQ ID NO: 269571 - DNA, 384 bp, Artificial Sequence
  derived and/or modified sequence
atggaggacacccaggccatcgactgggacgtggaggaggaggaggagaccgagcagagcagcgagagcctgagatgcaacgtggagcccgtgggcagactgcacatcttcagcggcgcccacggccccgagaaggacttccccctgcacctgggcaagaacgtggtgggcagaatgcccgactgcagcgtggccctgcccttccccagcatcagcaagcagcacgccgagatcgagatcctggcctgggacaaggcccccatcctgagagactgcggcagcctgaacggcacccagatcctgagaccccccaaggtgctgagccccggcgtgagccacagactgagagaccaggagctgatcctgttcgccgacctgctgtag

SEQ ID NO: 269572 - DNA, 342 bp, Artificial Sequence
  derived and/or modified sequence
atggaggacacccaggccatcgactgggacgtggaggaggaggaggagaccgagcagagcagcgagagcctgagatgcaacgtggagcccgtgggcagactgcacatcttcagcggcgcccacggccccgagaaggacttccccctgcacctgggcaagaacgtggtgggcagaatgcccgactgcagcgtggccctgcccttccccagcatcagcaagcagcacgccgagatcgagatcctggcctgggacaaggcccccatcctgagagactgcggcagcctgaacggcacccagatcctgagaccccccaaggtgctgagccccggcgtgagccactag

SEQ ID NO: 269573 - DNA, 489 bp, Artificial Sequence
  derived and/or modified sequence
atggaagacactcaggctatcgattgggatgtggaggaagaggaagagactgaacagtcatctgaatccctgagatgtaatgtggagcccgtggggcgccttcacatcttttcgggtgctcatggccccgagaaggacttcccattacaccttggcaaaaacgttgtgggcagaatgccagattgttccgtcgcgctgccattcccttcaattagtaagcagcacgccgagatcgaaattttggcttgggataaagcccctatcctgcgtgactgtgggtctctcaatggaactcagatactccggcctccgaaagtcctcagccccggggtgtcccatagactgagagatcaggagctgattctgtttgctgatctgctgtgtcaataccatcgactcgacgtttcactccctttcgtttcacggggaccgctgaccgtggaagaaacccctcgcgtccaaggggagacacaaccacagaggctttag

SEQ ID NO: 269574 - DNA, 384 bp, Artificial Sequence
  derived and/or modified sequence
atggaggacacccaggcaattgactgggacgtggaggaggaggaggaaactgaacagtcaagtgagtccctgaggtgcaatgtcgagcccgttggccgtctccatatcttctctggcgctcatgggcccgagaaagacttccctttgcatttaggaaagaacgtcgtgggccgcatgcccgactgctcagtggccctgcccttccctagtatttcaaaacagcacgccgaaatcgagattctcgcgtgggacaaggccccgatactaagggattgcggcagtttgaatggaacgcagatactcagaccacccaaggtgctttccccaggggtgagccaccgcctgcgggaccaggagctaatcttgttcgccgaccttctgtag

SEQ ID NO: 269575 - DNA, 342 bp, Artificial Sequence
  derived and/or modified sequence
atggaggatactcaagcgatagattgggatgttgaggaagaagaggagacagaacaatcatccgagtcactgcggtgcaatgtggagcctgtaggacggctgcacattttctccggtgcccatggacctgagaaagactttcccctgcacctcgggaaaaacgtggtgggcaggatgccagactgttcagtggctctgccatttccatccataagtaagcagcacgcagagatcgagattttggcctgggacaaagcaccaattctgagggattgcggctctttaaacggtacgcaaatactccgacctcctaaggttctgtctcctggcgtcagccattag

SEQ ID NO: 269576 - DNA, 489 bp, Artificial Sequence
  derived and/or modified sequence
atggaggacacccaggccatcgactgggatgtggaggaggaggaggagacagagcagagcagcgagagcctgcgctgcaatgtggagcctgtgggccgcctgcacatcttcagcggggcccacggccctgagaaggacttccccctgcacctgggcaagaatgtggtgggccgcatgccagactgcagcgtggccctgcccttccccagcatcagcaagcagcacgccgagattgagatcctggcctgggacaaggcccccatcctgcgggactgtggcagcctgaatggcacccagatcctgcggccccccaaggtgctgagccctggggtgagccaccggctgcgggaccaggagctgatcctgtttgctgacctgctgtgccagtaccaccggctggatgtgtccctgccctttgtgtcccggggccccctgactgtggaggagaccccccgggtgcagggcgagacccagccccagaggctgtag

SEQ ID NO: 269577 - DNA, 384 bp, Artificial Sequence
  derived and/or modified sequence
atggaggacacccaggccatcgactgggatgtggaggaggaggaggagacagagcagagcagcgagagcctgcgctgcaatgtggagcctgtgggccgcctgcacatcttcagcggggcccacggccctgagaaggacttccccctgcacctgggcaagaatgtggtgggccgcatgccagactgcagcgtggccctgcccttccccagcatcagcaagcagcacgccgagattgagatcctggcctgggacaaggcccccatcctgcgggactgtggcagcctgaatggcacccagatcctgcggccccccaaggtgctgagccctggggtgagccaccggctgcgggaccaggagctgatcctgtttgctgacctgctgtag

SEQ ID NO: 269578 - DNA, 342 bp, Artificial Sequence
  derived and/or modified sequence
atggaggacacccaggccatcgactgggatgtggaggaggaggaggagacagagcagagcagcgagagcctgcgctgcaatgtggagcctgtgggccgcctgcacatcttcagcggggcccacggccctgagaaggacttccccctgcacctgggcaagaatgtggtgggccgcatgccagactgcagcgtggccctgcccttccccagcatcagcaagcagcacgccgagattgagatcctggcctgggacaaggcccccatcctgcgggactgtggcagcctgaatggcacccagatcctgcggccccccaaggtgctgagccctggggtgagccactag

SEQ ID NO: 269579 - DNA, 582 bp, Artificial Sequence
  derived and/or modified sequence
gtaccttgggtgcgactgggcggaggtgacttggaagttcgcttctcggactgtaatactcatccttacctggcgccccgctccgagtttagatcatggaggacacccaggctattgactgggatgttgaagaagaggaggagacagagcaatccagtgaatccttgaggtgtaacgtggagccagtagggcggctacatatctttagtggtgcccatggaccagaaaaagatttcccactacacctcgggaagaatgtggtaggccgaatgcctgactgctctgtggccctgccctttccatctatctccaaacaacatgcagagattgaaatcttagcctgggacaaggcacctatcctccgagactgtgggagccttaatggtactcaaatcctgagacctcctaaggttttgagccctggggtgagtcaccgtctgagggaccaggaattgattctctttgctgacttgctctgccagtaccatcgcctggatgtctctctgccctttgtctcccggggccctctgacagtagaagagacacccagagtacagggagaaactcaaccccagaggcttc

SEQ ID NO: 269580 - DNA, 582 bp, Artificial Sequence
  derived and/or modified sequence
attaactgatctcagcagcctgggagacaccacctatttgaactctaagggggcggggctttgggtgtgcctccgctcgactggctgcggttgtgaaagacagcggcagaagccaatcagcaaataagctctttttcggcacacgcagtcgctccacccgggtcgcgaccgttactggtggcgcgcgcggggacttaaaatcatggaggacacccaggctattgactgggatgttgaagaagaggaggagacagagcaatccagtgaatccttgaggtgtaacgtggagccagtagggcggctacatatctttagtggtgcccatggaccagaaaaagatttcccactacacctcgggaagaatgtggtaggccgaatgcctgactgctctgtggccctgccctttccatctatctccaaacaacatgcagagattgaaatcttagcctgggacaaggcacctatcctccgagactgtgggagccttaatggtactcaaatcctgagacctcctaaggttttgagccctggggtgagtcaccgtctgagggaccaggaattgattctctttgctgacttgct

SEQ ID NO: 269581 - DNA, 583 bp, Artificial Sequence
  derived and/or modified sequence
aatactcatccttacctggcgccccgctccgagtttaggtatgaagacacagggagacgtcgggccacaagggaacccactgaggtggggaccaaagatggtggctctttgaattggagccaagcgtggtgggcacccgctgagttggcctgtcataaagacggagttgacactttatccatggggcatcctactttccctacctgtcaacagtttccctctagagtggcatattttcagatcatggaggacacccaggctattgactgggatgttgaagaagaggaggagacagagcaatccagtgaatccttgaggtgtaacgtggagccagtagggcggctacatatctttagtggtgcccatggaccagaaaaagatttcccactacacctcgggaagaatgtggtaggccgaatgcctgactgctctgtggccctgccctttccatctatctccaaacaacatgcagagattgaaatcttagcctgggacaaggcacctatcctccgagactgtgggagccttaatggtactcaaatcctgagacctcctaaggttttgagccctggggtgagtcacc

SEQ ID NO: 269582 - DNA, 850 bp, Artificial Sequence
  derived and/or modified sequence
gaccgttactggtggcgcgcgcggggacttaaagtagatcatggaggacacccaggctattgactgggatgttgaagaagaggaggagacagagcaatccagtgaatccttgaggtgtaacgtggagccagtagggcggctacatatctttagtggtgcccatggaccagaaaaagatttcccactacacctcgggaagaatgtggtaggccgaatgcctgactgctctgtggccctgccctttccatctatctccaaacaacatgcagagattgaaatcttagcctgggacaaggcacctatcctccgagactgtgggagccttaatggtactcaaatcctgagctccagccttccacctccacagaccagcctgttacccctgagcctacgtctcaggctactaggggaagaacagatagatcctctgtcaagactcctgaaacagttgtccccacagcccctgagctacaggcttccgcctccacagaccagcctgtcacctctgagcccacatctcggaccactaggggaagaaaaaatcggtcctctgtcaagacccctgaaacagttgtgcccgcagcccctgagctccagccttccacctccacagaccaacctgtcacccctgagcccacatctcgggccactaggggcaggacaaataggtcctctgtcaagacccctgaatcaattgtccctatagcccctgagcttcagccttccacctccagaaaccagcttgtcacccctgagcccacatctcgggccactaggtgcaggacaaataggtcctctgtcaagacccctgagccagttgtccccacagcccctgagccccatcctacca

SEQ ID NO: 269583 - DNA, 489 bp, Artificial Sequence
  derived and/or modified sequence
atggaggacacccaggccatcgactgggacgtggaggaggaggaggagactgagcagtcctctgaatccttacgctgcaacgtggaacctgtgggtagattgcatatcttctccggggcacacggtcccgagaaagattttccactgcacctgggcaaaaacgtggttggaagaatgcctgactgctccgtcgctctaccctttcctagcataagtaaacaacatgcagaaatagaaattctggcgtgggataaagctcccatactgagagattgtggttccttgaatgggacacagatcctgcgccctcctaaggtcttatctcctggcgtgagtcatcgcctaagggaccaggaactgattttgttcgcagaccttttgtgtcagtaccataggctcgatgtgtcattgccattcgtgtctcggggtccactgaccgtagaggagaccccaagagtccagggcgaaacacagccgcagaggttatag

SEQ ID NO: 269584 - DNA, 384 bp, Artificial Sequence
  derived and/or modified sequence
atggaggacacccaggccatcgactgggacgtggaggaggaggaggaaacagagcagagctccgaaagtctacggtgcaatgtagaacccgtggggagacttcatattttttccggggcccacggacccgaaaaggacttccccctccatctcggaaagaacgtagtgggcagaatgcctgattgtagtgtggccctcccattcccctctatttcaaagcagcacgccgagatcgagattcttgcctgggacaaggcccctattctgcgtgattgcggtagcttgaatggcacgcagatcctgcgtccaccgaaggtgctttcacctggggtgtcccaccggctgagagatcaggagctgattttgttcgcggacctgctgtag

SEQ ID NO: 269585 - DNA, 342 bp, Artificial Sequence
  derived and/or modified sequence
atggaggacacccaggccatcgactgggacgtggaggaggaggaggaaaccgaacagtcctctgagagcctgcgttgcaatgtggaaccagtggggagactacatatcttcagtggggcccacgggcccgagaaggatttccctctccaccttggtaaaaacgtggtgggcaggatgccggactgcagcgttgccttgccctttccgtctatctccaagcaacacgcggagatcgagatcttagcctgggacaaagcccctattctgagagactgtggatctttgaacggtacccagatactgcgtccacctaaagtgctgtcccctggtgtgtctcattag

SEQ ID NO: 269586 - DNA, 489 bp, Artificial Sequence
  derived and/or modified sequence
atggaggacacccaagccatcgactgggacgtggaagaggaggaagagaccgagcagagttcagaatcactgcgctgcaatgtagaacccgtaggtaggctacatatcttctcgggagcccacgggcctgaaaaggactttcctttacatctgggaaaaaatgtagttgggagaatgcctgactgttccgtggccctccctttcccatctatctccaagcagcacgctgaaattgagatacttgcctgggacaaggctcctattctgcgggattgcggctctctcaacggtacccaaatcctgcgccctcccaaagttctctcccctggcgttagccatagattgcgtgatcaggaactgattcttttcgcagacttgctgtgccaatatcaccggctggatgtgtcactccctttcgtgtcacgcggacctcttaccgtggaggagaccccgcgtgtgcagggagagactcagccccaaaggctgtag

SEQ ID NO: 269587 - DNA, 384 bp, Artificial Sequence
  derived and/or modified sequence
atggaagacactcaggccatcgattgggatgttgaggaagaggaagaaacagaacagtcgtcggagagcttgcggtgtaacgtggaaccagtcggcaggcttcacatcttctctggcgcacatgggcctgagaaagatttcccactccatctcggcaaaaatgtcgtgggtcgaatgccggattgttcagtggcactgccattccctagcataagcaagcagcacgccgaaatagagattctggcctgggacaaggcgccaattctgagggactgtggctcacttaacgggactcaaattttgcgacccccaaaggttctctcacctggggtgtcccacaggctccgcgaccaggagctaattctctttgccgacctcctgtag

SEQ ID NO: 269588 - DNA, 342 bp, Artificial Sequence
  derived and/or modified sequence
atggaggatacccaggccatagattgggacgtcgaagaagaagaggaaacagagcaaagctcagaaagtctgcgctgcaacgtggagccagtcggtaggctgcacatctttagtggagcacatggacccgagaaggatttccctctgcatctcggcaaaaatgtggtggggcgaatgccagattgcagcgtagccttgccctttccaagcattagcaaacaacatgccgaaatagaaattctggcatgggataaagctccaatcctacgtgattgcggatcgttaaatggcacccagatcttaaggccaccaaaagtccttagcccgggagtaagccactag

SEQ ID NO: 269589 - DNA, 489 bp, Artificial Sequence
  derived and/or modified sequence
atggaagacacccaggctatcgattgggacgtggaagaagaggaggagacagagcaatcttctgaaagcctgcgttgtaatgtcgagcccgtgggacggttacacatcttttccggggcgcacggaccagagaaggattttcccttgcacttaggcaagaatgtggtgggaaggatgccagactgctctgtggcattaccattcccctcaatctcaaaacagcacgcagaaatcgaaattctcgcttgggataaggcaccgatactgagggattgcgggagtctgaacggtacgcagatcctgcgaccacctaaggttcttagcccgggagttagtcaccggttaagggaccaggagttgattctgttcgctgacctgctgtgccagtatcaccggcttgatgtatccctgccctttgtctctcgaggcccgcttacagtggaggagactccacgggtccagggcgagactcaaccccagcgactctag

SEQ ID NO: 269590 - DNA, 342 bp, Artificial Sequence
  derived and/or modified sequence
atggaagatacccaggcgattgattgggacgtggaggaggaagaggaaacagaacagtcctctgagtcccttcgatgcaacgtggagccggtggggaggctgcacatattctctggagcgcacggtcctgagaaagacttcccactacatttggggaagaatgtggtggggaggatgcccgattgcagcgtagcccttccattcccttccatctcaaaacaacacgccgaaatcgaaatcctggcctgggacaaggccccgattttgagggactgcgggtctctgaacggcactcagatcctgagaccgcccaaagttctgagtccaggggtgtctcactag

SEQ ID NO: 269591 - DNA, 384 bp, Artificial Sequence
  derived and/or modified sequence
atggaggacactcaggctatcgactgggatgtcgaagaggaagaggagacagagcaatcctccgagtcccttcgctgtaatgtggagccggtgggccggcttcacatcttttctggggcccatggaccggaaaaggacttccccctccatctcggaaagaacgttgtcgggagaatgccagactgcagcgtagctctcccattccccagtatttctaaacagcacgctgagatcgaaatccttgcctgggacaaggctcccatattaagagattgcggtagtctcaatggaacccaaatcctcaggcctcctaaagtcttaagccctggagtgtcccaccgccttagggatcaggagctgatcctgtttgcagatctactgtag

SEQ ID NO: 269592 - DNA, 489 bp, Artificial Sequence
  derived and/or modified sequence
atggaggacactcaggcgatcgactgggatgtcgaggaagaggaggaaacagagcagtcaagcgaatcactacgttgcaatgtggagccagtgggcaggctgcatatcttcagcggcgctcacggtcccgaaaaggattttccactacatttgggaaaaaatgtcgtcggccggatgcctgattgctccgtagctttgcccttcccaagcataagtaaacaacacgccgagatcgaaatactggcctgggacaaggcgccaatactgcgggactgtgggagcctcaacggcacacagatcttaaggcctcccaaagtacttagcccgggggtttcccacagactccgcgaccaggagctgatcttgtttgccgacctactgtgccagtaccacaggctcgatgtgtcccttcctttcgtcagcagagggcccctgactgtggaggaaacacctcgagttcaaggcgagactcagcctcagagactgtag

SEQ ID NO: 269593 - DNA, 384 bp, Artificial Sequence
  derived and/or modified sequence
atggaagacacccaagccatcgactgggacgtagaagaggaggaggagactgagcagagctctgagtccctgagatgtaatgttgagcccgtgggccggcttcatattttcagtggtgctcacgggcctgaaaaagatttcccactgcaccttggtaaaaatgtcgtgggccgaatgcctgattgttctgtagccctgccgttcccaagcatttcgaagcagcacgctgaaatagaaatacttgcctgggacaaagccccaatcctgcgagactgcggctccctgaatgggacccagattcttcgccctcccaaggtcttaagcccaggtgtttctcataggcttagggaccaagaactcattctgtttgcagacctattatag

SEQ ID NO: 269594 - DNA, 489 bp, Artificial Sequence
  derived and/or modified sequence
atggaagatacacaagccatcgactgggacgtcgaggaagaggaagagaccgagcaatctagtgaatcactacggtgcaatgtagaaccggtcggcagactccatatcttctcaggtgcacacggacctgagaaggattttcccctacacctgggaaagaatgtcgtcggccgcatgcccgattgttctgtagcattaccatttccttccatctccaaacaacacgcggaaatcgagatccttgcctgggacaaggcgccaatacttcgagactgtggttcgctcaatggcacccaaatcctgcgcccacctaaggtgttgtctcccggggtgtcccatcggctcagagatcaggagctgatcctctttgcggatctgttatgccagtaccataggctggatgtgtcactgcccttcgtttcacgggggccccttactgttgaggaaacccctcgagtgcagggcgaaactcagcctcaaaggctttag

SEQ ID NO: 269595 - DNA, 342 bp, Artificial Sequence
  derived and/or modified sequence
atggaggatacccaggccatcgactgggatgtagaagaagaagaagagaccgaacagtcttccgagtccctgaggtgtaatgtcgagcccgtgggccgcctgcacattttctcaggtgcccacggcccagagaaggactttcctcttcacttagggaaaaacgtggtgggccggatgcctgactgttccgtggccctcccattcccgagcataagtaaacagcatgctgagatagagatcctcgcatgggataaagccccaatactgagggattgcggctccctgaacgggacgcaaatcctacgtcctcccaaagtcctcagccccggcgtaagtcactag

SEQ ID NO: 269596 - DNA, 342 bp, Artificial Sequence
  derived and/or modified sequence
atggaggacacgcaggctatcgattgggatgttgaggaggaagaagaaaccgaacagtcatcagagtctctgcggtgcaatgtggagcccgtcggccgcttgcacattttttcaggagctcatggtcccgaaaaggacttcccactgcatctagggaagaatgtagttggtcgcatgcctgactgcagtgttgctcttccctttcccagtatctctaagcagcacgcagaaatcgagatcctggcatgggataaggccccaatccttagggattgtggcagcctcaatgggacgcagattttacggccacccaaggttctcagccctggcgtaagtcattag

SEQ ID NO: 269597 - DNA, 384 bp, Artificial Sequence
  derived and/or modified sequence
atggaggacacacaggctattgactgggatgtggaggaggaggaggaaaccgagcaaagcagtgagtccctaaggtgcaatgtagaacccgtgggcagattacacatttttagcggcgcccacgggccagagaaggacttccccttacatctgggtaaaaatgtggtcggccgtatgccggattgctccgtcgccctgcctttcccctcgatttctaaacaacatgctgaaatagaaatcctggcatgggataaggcgccaatcctcagggattgtggaagcttgaacggcacccaaattctccggccacccaaggtcttgagccccggcgttagccaccgcctccgtgaccaggagctgattttgttcgccgacctgctgtag

SEQ ID NO: 269598 - DNA, 489 bp, Artificial Sequence
  derived and/or modified sequence
atggaagatacacaagcaatcgactgggacgtggaggaagaggaagagacggagcaatcttccgagtcactgagatgcaatgtggaacccgtaggacgcttgcacattttctctggggcacatggccccgagaaggacttccctctccacctggggaaaaatgtggtaggtagaatgccagactgttctgtagctcttccctttccaagcattagcaaacagcacgcagagatcgagatcctggcttgggataaagcgcctattcttagggactgcggctccctgaatggcactcagatcctgcggcccccgaaggtgcttagtccaggtgtttctcaccggctgagggaccaggaattaatcctgtttgcagacttgctgtgccaatatcacaggctcgatgtcagcctgccatttgtctctcggggcccactgactgtggaggaaactcctcgcgtgcagggagagacacagcctcagcggttgtag

SEQ ID NO: 269599 - DNA, 342 bp, Artificial Sequence
  derived and/or modified sequence
atggaagatactcaggccatagactgggacgtagaagaggaggaggaaacggaacaaagctcggagtctcttcggtgcaacgtggagcccgtcgggagactccacatatttagtggagctcacggcccagaaaaggactttcctctgcacctgggtaaaaacgttgtggggcgcatgccagattgcagcgtcgccctgccattcccatccatatcgaagcagcatgccgaaatcgaaatactggcttgggacaaggctcccattcttagggattgtgggagtctcaacggcacgcaaattctgcgcccccccaaggtgctttccccaggagtgtcccactag

SEQ ID NO: 269600 - DNA, 489 bp, Artificial Sequence
  derived and/or modified sequence
atggaggacacgcaggctattgattgggatgtagaggaagaggaagaaacagagcagtcatcagagtcactcaggtgtaatgttgagcccgtgggtagactgcacatcttctctggggcacacgggcctgagaaggacttcccgctgcaccttggtaaaaacgtcgtgggcagaatgcccgattgtagtgtcgccctgcctttcccctccatttcaaaacaacacgccgagatcgagattcttgcctgggataaagcacctattctacgagactgcggttccctgaacggcacccaaattctgcggcccccaaaggtactcagccccggcgtcagtcatcgtttaagggatcaagagctcattctgtttgcggacttgctttgtcaatatcaccggcttgatgtctcactgccatttgtgagcaggggtcccctgaccgtcgaggaaaccccccgagtccaaggcgagacccagccacagagactgtag

SEQ ID NO: 269601 - DNA, 384 bp, Artificial Sequence
  derived and/or modified sequence
atggaagacacgcaagctattgattgggacgtggaagaagaggaagagaccgagcaaagctcagagtcgctgcggtgcaatgttgagcctgtcgggagactgcatattttttcaggcgcccacggacctgagaaggatttcccattgcatctgggtaaaaatgtggtcggccggatgcctgactgctctgttgccctgcctttccctagcatctcaaagcagcacgctgaaattgaaattcttgcatgggacaaagcaccaattctcagagactgtgggagcctaaatggcactcagattctccggcctccaaaggtcctgtctcccggagtcagtcatagacttcgggaccaggaactgatcttattcgccgaccttctgtag

SEQ ID NO: 269602 - DNA, 342 bp, Artificial Sequence
  derived and/or modified sequence
atggaggatacccaagcgatcgactgggacgtcgaagaagaggaggaaacagagcagtcctcagagtccctgcggtgcaacgtcgagcctgtaggcaggcttcacatatttagtggcgcccacggtccagagaaagacttccccttgcatctgggcaagaacgtcgttggaaggatgcctgactgcagcgtggctctcccctttccttccatttctaagcagcatgccgagatcgagattctcgcctgggacaaggcaccgatcctgcgagactgcggctcattgaacggaacccagatacttcgccctcctaaggtcctcagccccggggtctcgcactag

SEQ ID NO: 269603 - DNA, 342 bp, Artificial Sequence
  derived and/or modified sequence
atggaggacacccaagccatcgactgggacgtcgaggaagaggaggagactgagcaatccagtgagtcgctaagatgcaacgtggaaccggtaggcaggctccatatttttagtggcgcgcacggtcccgaaaaagattttcccttgcacctgggcaagaatgtggtcggccgcatgccagattgctcagttgctctgcccttcccctcaatcagcaagcagcatgcagagatcgaaatactggcctgggataaagctccgatcctcagagattgtggctccctgaatggcactcagatcctccggccccccaaagttctgtcacctggggtttcgcattag

SEQ ID NO: 269604 - DNA, 384 bp, Artificial Sequence
  derived and/or modified sequence
atggaggacactcaggccatagattgggatgtggaggaggaggaagaaacagagcaatcctctgagtctttgcgatgcaatgtggagcccgtgggaaggctgcacatcttcagcggggctcatgggccagaaaaggacttcccactccacttggggaagaacgtggtcggtagaatgcccgactgtagcgttgccctgccttttccctctatatcgaaacagcacgccgaaattgaaatcctggcttgggacaaggcccccattcttcgcgactgtggctccctgaatggtacacagatactcagaccgcccaaagtgttgagcccgggcgtcagccatagactccgtgaccaggagttgatccttttcgccgatttactgtag

SEQ ID NO: 269605 - DNA, 489 bp, Artificial Sequence
  derived and/or modified sequence
atggaggatacccaggctatcgattgggatgttgaagaagaggaggaaacagagcagtctagtgaaagccttaggtgcaatgtcgaacccgtgggtcgactgcacattttctctggggcccacggtcctgaaaaggatttcccactccatctgggaaagaacgtggtcgggaggatgcccgattgctccgtcgcacttcctttcccatccattagcaaacagcatgccgagattgagatacttgcttgggacaaagcccctattctaagagactgcggcagccttaacggcactcaaatccttaggccccctaaggtcttaagtccgggagtttcccacaggctgcgagatcaagaactgattctgtttgcggatttgctctgccagtaccatcgcttagatgtgtcactcccatttgtatccagaggacctctgaccgtagaagagaccccacgcgtgcagggtgagactcagccccagcgactgtag

SEQ ID NO: 269606 - DNA, 384 bp, Artificial Sequence
  derived and/or modified sequence
atggaagacacccaggccatcgattgggacgtcgaagaggaggaggagaccgagcaaagctccgagagtctgaggtgcaacgtagagcccgtgggcagactccacatatttagcggggcccatggcccggagaaggactttcctctgcacctgggcaaaaatgtagttggaaggatgcccgattgctccgtcgctctgcccttcccgagcattagcaagcagcatgccgaaatagagatcctcgcctgggacaaggctcccattctccgagattgcggaagccttaacggtacacaaatactgcgtcccccaaaggttctctcgccaggggtgagccacagactgagggaccaggagctcattctgtttgcggacctgctctag

SEQ ID NO: 269607 - DNA, 489 bp, Artificial Sequence
  derived and/or modified sequence
atggaagacacgcaagccattgactgggatgtagaagaggaggaggagacggagcagtcttctgagagtctgaggtgtaatgtggaacccgttggccgcctgcacatcttctctggcgcccatggcccagaaaaagacttcccacttcacctgggcaaaaatgttgtcggaagaatgccagactgcagtgttgcactccccttcccgtccatatcaaagcaacacgctgagatcgagattttggcctgggacaaggcaccaatattacgggattgtgggtctctaaatggcacccaaattctgcgccccccaaaagtattgtccccaggcgtgtcccatcgactgagagaccaggagttaatcctcttcgcagacctgctgtgtcagtaccaccgtctcgacgtgagcttgccttttgtctcccggggtcccctcaccgtggaagaaacgccaagagttcagggagagacgcagccacagcgcctgtag

SEQ ID NO: 269608 - DNA, 384 bp, Artificial Sequence
  derived and/or modified sequence
atggaggacacccaggccattgactgggacgtggaggaagaagaagagacagagcaatcctccgagagcctgagatgcaacgtggagcctgtcggccggcttcacatcttttctggggctcacggaccagagaaggattttccactgcaccttggcaagaatgtagtcggacggatgcccgattgtagcgtggctctgccatttccatctatctctaaacaacacgctgaaattgagatactggcctgggataaggctcctattctgagagactgcgggtcactgaacggcactcagatcctcagaccccctaaggtactctcccccggcgtgtcccatcgtctgcgtgatcaggagcttatactcttcgctgacctgctgtag

SEQ ID NO: 269609 - DNA, 342 bp, Artificial Sequence
  derived and/or modified sequence
atggaggacacccaagctattgattgggatgtagaagaagaggaagaaacagaacagtcctctgaaagtctcaggtgcaatgtggagcccgtgggtcgtctgcatatattttccggtgcccacggacccgaaaaggattttccgctgcacttgggtaagaacgtcgtgggccggatgccggactgttctgtagccctgccattcccgagcattagcaagcagcacgctgagattgagatcctggcgtgggataaagctccaattcttcgggactgcggcagtctgaacggtactcagattttgaggcccccaaaggttctttcaccaggtgtgagccattag

SEQ ID NO: 269610 - DNA, 7576 bp, Artificial Sequence
  derived and/or modified sequence
ttggatttaagaaaatgacctcaaaatgtccgtcagagacgtattcccaggaagaaagatattacttctactacaaaccaaatcaaaaggaaatgaaattccaatgcaacaggagtgaactgccacgcctacgggctgttctccaaactgcagcctccagccacgactgcaacgcgcaacccactttcatttctcatgagtcagcggacaccatgtctaggaggaccgaggaaaggcgctctggccttaccagacacgtcggacgtctatgacacagcccctctatccgttgccggcagctggcgccagactctctggtcgcggtttggaactgcgcgggaagtgggtggtgggcgggcaagcggtagtgggttgtcccttggagctgcccaatcgacgtgcattattctgttggcgcacggcggccttcaattaccgtctcattaactgatctcagcagcctgggagacaccacctatttgaactctaagggggcggggctttgggtgtgcctccgctcgactggctgcggttgtgaaagacagcggcagaagccaatcagcaaataagctctttttcggcacacgcagtcgctccacctgggtcgcgaccgttactggtggcgcgcgcggggacttaaagtagatcatggaggacacccaggctattgactgggatgttgaagaagaggaggagacagagcaatccagtgaatccttgaggtgtaacgtggagccagtagggcggctacatatctttagtggtgcccatggaccagaaaaagatttcccactacacctcgggaagaatgtggtaggccgaatgcctgactgctctgtggccctgccctttccatctatctccaaacaacatgcagagattgaaatcttagcctgggacaaggcacctatcctccgagactgtgggagccttaatggtactcaaatcctgagacctcctaaggttttgagccctggggtgagtcaccgtctgagggaccaggaattgattctctttgctgacttgctctgccagtaccatcgcctggatgtctctctgccctttgtctcccggggccctctgacagtagaagagacacccagagtacagggagaaactcaaccccagaggcttctgttggctgaggactcggaggaggaagtagattttctttctgaaaggcgtatggtaaaaaaatcaaggaccacatcttcctctgtgatagttccagagagtgatgaagaggggcattccccggtcctgggcggccttgggccgccttttgccttcaatttgaacagtgacacagatgtggaagaaggtcagcaaccagccacagaggaggcctcctcagctgccagaagaggtgccactgtagaggcaaagcagtctgaagctgaagttgtaactgaaatccagcttgaaaaggatcagcctttagtgaaggagagggacaatgatacaaaagtcaagaggggtgcagggaatggggtggttccagctggggtgattctggagaggagccaacctcctggagaggacagtgacacagatgtggatgatgacagcaggcctcctggaaggccagctgaggtccatttggaaagggctcagccttttggcttcatcgacagcgacactgatgcggaagaagagaggatcccagcaaccccagttgtcattcctatgaagaagaggaagatcttccatggagtaggtacaaggggtcctggagcaccaggcctggcccatctgcaggagagccaggctggtagtgatacagatgtggaagaaggcaaggccccacaggctgtccctctggagaaaagccaagcttccatggttatcaacagcgatacagatgacgaggaagaagtctcagcagcgctgactttggcacatctgaaagagagccagcctgctatatggaacagagatgcagaagaggacatgccccaacgtgtggtccttctgcagcgaagccaaaccaccactgagagagacagtgacacagacgtggaggaggaagagctcccagtggaaaatagagaagctgtcctcaaggatcacacaaagattagagcccttgttagagcacattcagaaaaggaccaacctccttttggggacagtgatgacagtgtggaagcagataagagctcacctgggatccacctggagagaagccaagcctccaccacagtggacatcaacacacaagtggagaaggaagtcccgccagggtcagccattatacatataaagaagcatcaggtgtctgtggaggggacaaatcaaacagatgtgaaagcagttgggggaccagcaaagctgcttgtggtatctctagaggaagcctggcctctgcatggggactgtgaaacagatgcagaggagggcacctccctaacagcctcagtagttgcagatgtaagaaagagccagcttccagcagaaggggatgctggggcagagtgggctgcagctgttcttaagcaggagagagctcatgaggtgggggcccagggtgggccacctgtggcacaagtggagcaggacctccctatctcaagagagaacctcacagatctggtggtggacacagacactctaggggaatccacccagccacagagagagggagcccaggtccccacaggaagggagagagaacaacatgtgggtgggaccaaggactctgaagacaactatggtgattctgaagatctggacctacaagctacccagtgctttctggagaatcagggcctggaagcagtccagagcatggaggatgaacctacccaggccttcatgttgactccaccccaagagcttggcccttcccattgcagcttccagacaacaggtaccctagatgaaccatgggaggtcctggctacacagccattctgtctgagagagtctgaggactctgagacccagccttttgacacgcaccttgaggcctatggaccttgcctgtctccacctagggcaataccaggagaccaacatccagagagcccagttcacacagagccaatggggattcaaggcagagggaggcagactgtggataaagtcatgggtataccaaaagaaacagcagagagggtgggccctgagagagggccattggagagagaaactgagaaactgctaccagaaagacagacagatgtgacaggagaggaagaattaaccaaggggaaacaggacagagaacaaaaacagttgttagctagagacacccagagacaagaatctgacaaaaatggggaaagtgcaagtcctgaaagagatagggagagtttgaaggtagaaattgagacatctgaggaaatacaagagaaacaagtacagaagcagacccttccaagcaaagcatttgagagagaagtagagagaccagtagcaaacagagagtgcgatccagccgagttagaagagaaggtgcccaaagtgatcctggagagagatacacagagaggggagccagagggagggagccaggaccagaaagggcaggcctccagcccaacaccagagcctggggtgggggcgggggaccttccgggacctacctcagcccccgtaccttctgggagccagtcaggtggaaggggatccccagtgagccccaggaggcatcagaaaggcctcctgaattgcaagatgccacctgctgagaaggcttccaggatcagagctgctgagaaggtttccaggggcgatcaggaatctccagatgcttgtctgcctcctacagtacctgaagccccagccccaccccaaaagccccttaactctcagagccagaaacatcttgcacctccgccccttctttctccccttttaccttctatcaagccaaccgttcgtaagaccaggcaagatgggagtcaggaagctccagaggctcccttgtcctcagagctggagcctttccacccaaagcctaaaattagaactcggaagtcctccagaatgacaccctttccagctacctctgctgcccctgagccccacccttccacctccacagcccagccagtcactcccaagcccacatctcaggccactaggagcaggacaaataggtcctctgtcaagacccctgaaccagttgtccccacagcccctgagctccagccttccacctccacagaccagcctgtcacctctgagcccacatctcaggttactaggggaagaaaaagtagatcctctgtcaagacccctgaaacagttgtgcccacagcccttgagctccagccttccacctccaccgaccgacctgtcacctctgaacccacctctcaggctactaggggaagaaaaaatagatcctctgtcaagacccctgaaccagttgtccccacagcccctgagctccagccttccacctccacagaccagcctgtcacttctgagcccacatatcaggctactaggggaagaaaaaatagatcctctgtcaagacccctgaaccagttgtgcccacagcccctgagctccggccttccacctccacagaccgacctgtcacccccaagcccacatctcggaccactaggagcaggacaaatatgtcctctgtcaagacccctgaaacagttgtccccacagcccctgagctccagatttccacctccacagaccaacctgtcacccctaagcccacatctcggaccactaggagcaggacaaatatgtcctctgtgaagaaccctgaatcaactgtccctatagcccctgagctcccaccttccacctccacagagcagcctgtcacccctgagcccacatctcgggctactaggggaagaaaaaatagatcctctggcaagacccctgaaacacttgtccccacagcccctaagctcgagccttccacttccacagaccaacctgtcactcctgagcccacatctcaggccaccaggggcaggacaaataggtcctctgtgaagacccctgaaacagttgtccccacagcccctgagctccagccttccacctccacagaccagcctgttacccctgagcctacgtctcaggctactaggggaagaacagatagatcctctgtcaagactcctgaaacagttgtccccacagcccctgagctacaggcttccgcctccacagaccagcctgtcacctctgagcccacatctcggaccactaggggaagaaaaaatcggtcctctgtcaagacccctgaaacagttgtgcccgcagcccctgagctccagccttccacctccacagaccaacctgtcacccctgagcccacatctcgggccactaggggcaggacaaataggtcctctgtcaagacccctgaatcaattgtccctatagcccctgagcttcagccttccacctccagaaaccagcttgtcacccctgagcccacatctcgggccactaggtgcaggacaaataggtcctctgtcaagacccctgagccagttgtccccacagcccctgagccccatcctaccacctccacagaccagcctgtcacccccaagctcacatctagggccactaggagaaagacaaataggtcctctgtcaagactcccaaaccagttgaaccagcagcctctgatcttgagccttttacccccacagaccagtccgtcacccctgaggccatagctcagggtggtcagagcaaaacactgaggtcttccacagtaagagctatgccggttcctaccacccctgaattccaatctcctgtcaccacagaccagcctatttcccctgagcctattactcaacccagttgcatcaagaggcagagagccgctgggaaccctggctccctcgcagctcccattgaccataagccttgctctgcacccttggaacctaaatcccaggcctcaaggaaccaaagatggggagcagtgagagcagctgaatcccttacagccattcctgagcctgcctctccccagcttcttgagacaccaattcatgcctcccagatccaaaaggtggaaccagcaggtagatctaggttcaccccggagctccagcctaaggcctctcaaagccgcaagaggtctttagctaccatggattcaccaccacatcaaaaacagccccaaagaggggaagtctcccagaagacagtgattatcaaggaagaggaagaagatactgcagagaagccagggaaggaagaggatgtcgtgactccaaaaccaggcaagagaaagagagaccaggcagaggaggagcccaacagaataccaagccgcagcctccgacggaccaaacttaaccaagaatcaacagcccccaaagtgctcttcacaggagtggtggatgctcggggagagcgggctgtgctggcactggggggaagtctggctggttcagcggcagaggcttcccacctggtcactgatcgcatccgccggacagtcaagttcctgtgtgccctggggcggggaatccccattctgtccctggactggctgcatcagtcccgcaaggctggtttcttcttacccccggatgaatatgtggtgaccgaccctgagcaagagaagaactttggctttagccttcaagacgcactgagcagggctcgggagcgaaggctgctagagggctatgagatctatgtgacccctggagtccagccaccaccacctcagatgggagagattattagctgctgtggaggcacatacctacccagcatgcctcggtcctataagcctcagagagttgtgatcacatgccctcaggacttccctcattgctccattccactacgggttgggctgcccctcctctcgcctgagttcctgctgactggagtgctgaagcaggaagccaagccagaggcctttgtcctctcccctttggagatgtcatccacctgagaactccactacccttttccctcccagaccacgaattagaagatatgtggaagaaagaactcagggcgttagaaaggattggggtatattgatacaacttgtcctggaacatgggtgggaccagaaatctttatgaataaatgaaaagataagggatttggaagccacaggttgttttttgtttgtttgtttgtttttttaatggccattttattttatttgtatttatagttttttatttgtatagatttaggggatacaagatttcttacatgcatgtattaaatggccattttaaaattagctagtttcatgctcagatgtcataagtggcagctatctttagccagactgttgcagttattgctcgatgccactcatggtgtcctacctcctatttggaaaccatctctatttttttcttactgagattcttactttggggtcaggaacttgaagggatgcttggagtgagtagatttgagggtccagttatggagtgctactaaaacattttcttctctcctggcctctggaagcatctttagctttgactttgggcaagtctctgtacttttctggccagcttttccaggatttataaaattagagcttcggcttgacctctgtgataaataaatattcactctgtgcctta

SEQ ID NO: 269611 - DNA, 7576 bp, Artificial Sequence
  derived and/or modified sequence
ttggatttaagaaaatgacctcaaaatgtccgtcagagacgtattcccaggaagaaagatattacttctactacaaaccaaatcaaaaggaaatgaaattccaatgcaacaggagtgaactgccacgcctacgggctgttctccaaactgcagcctccagccacgactgcaacgcgcaacccactttcatttctcatgagtcagcggacaccatgtctaggaggaccgaggaaaggcgctctggccttaccagacacgtcggacgtctatgacacagcccctctatccgttgccggcagctggcgccagactctctggtcgcggtttggaactgcgcgggaagtgggtggtgggcgggcaagcggtagtgggttgtcccttggagctgcccaatcgacgtgcattattctgttggcgcacggcggccttcaattaccgtctcattaactgatctcagcagcctgggagacaccacctatttgaactctaagggggcggggctttgggtgtgcctccgctcgactggctgcggttgtgaaagacagcggcagaagccaatcagcaaataagctctttttcggcacacgcagtcgctccacccgggtcgcgaccgttactggtggcgcgcgcggggacttaaagtagatcatggaggacacccaggctattgactgggatgttgaagaagaggaggagacagagcaatccagtgaatccttgaggtgtaacgtggagccagtagggcggctacatatctttagtggtgcccatggaccagaaaaagatttcccactacacctcgggaagaatgtggtaggccgaatgcctgactgctctgtggccctgccctttccatctatctccaaacaacatgcagagattgaaatcttagcctgggacaaggcacctatcctccgagactgtgggagccttaatggtactcaaatcctgagacctcctaaggttttgagccctggggtgagtcaccgtctgagggaccaggaattgattctctttgctgacttgctctgccagtaccatcgcctggatgtctctctgccctttgtctcccggggccctctgacagtagaagagacacccagagtacagggagaaactcaaccccagaggcttctgttggctgaggactcggaggaggaagtagattttctttctgaaaggcgtatggtaaaaaaatcaaggaccacatcttcctctgtgatagttccagagagtgatgaagaggggcattccccggtcctgggcggccttgggccgccttttgccttcaatttgaacagtgacacagatgtggaagaaggtcagcaaccagccacagaggaggcctcctcagctgccagaagaggtgccactgtagaggcaaagcagtctgaagctgaagttgtaactgaaatccagcttgaaaaggatcagcctttagtgaaggagagggacaatgatacaaaagtcaagaggggtgcagggaatggggtggttccagctggggtgattctggagaggagccaacctcctggagaggacagtgacacagatgtggatgatgacagcaggcctcctggaaggccagctgaggtccatttggaaagggctcagccttttggcttcatcgacagcgacactgatgcggaagaagagaggatcccagcaaccccagttgtcattcctatgaagaagaggaagatcttccatggagtaggtacaaggggtcctggagcaccaggcctggcccatctgcaggagagccaggctggtagtgatacagatgtggaagaaggcaaggccccacaggctgtccctctggagaaaagccaagcttccatggttatcaacagcgatacagatgacgaggaagaagtctcagcagcgctgactttggcacatctgaaagagagccagcctgctatatggaacagagatgcagaagaggacatgccccaacgtgtggtccttctgcagcgaagccaaaccaccactgagagagacagtgacacagacgtggaggaggaagagctcccagtggaaaatagagaagctgtcctcaaggatcacacaaagattagagcccttgttagagcacattcagaaaaggaccaacctccttttggggacagtgatgacagtgtggaagcagataagagctcacctgggatccacctggagagaagccaagcctccaccacagtggacatcaacacacaagtggagaaggaagtcccgccagggtcagccattatacatataaagaagcatcaggtgtctgtggaggggacaaatcaaacagatgtgaaagcagttgggggaccagcaaagctgcttgtggtatctctagaggaagcctggcctctgcatggggactgtgaaacagatgcagaggagggcacctccctaacagcctcagtagttgcagatgtaagaaagagccagcttccagcagaaggggatgctggggcagagtgggctgcagctgttcttaagcaggagagagctcatgaggtgggggcccagggtgggccacctgtggcacaagtggagcaggacctccctatctcaagagagaacctcacagatctggtggtggacacagacactctaggggaatccacccagccacagagagagggagcccaggtccccacaggaagggagagagaacaacatgtgggtgggaccaaggactctgaagacaactatggtgattctgaagatctggacctacaagctacccagtgctttctggagaatcagggcctggaagcagtccagagcatggaggatgaacctacccaggccttcatgttgactccaccccaagagcttggcccttcccattgcagcttccagacaacaggtaccctagatgaaccatgggaggtcctggctacacagccattctgtctgagagagtctgaggactctgagacccagccttttgacacgcaccttgaggcctatggaccttgcctgtctccacctagggcaataccaggagaccaacatccagagagcccagttcacacagagccaatggggattcaaggcagagggaggcagactgtggataaagtcatgggtataccaaaagaaacagcagagagggtgggccctgagagagggccattggagagagaaactgagaaactgctaccagaaagacagacagatgtgacaggagaggaagaattaaccaaggggaaacaggacagagaacaaaaacagttgttagctagagacacccagagacaagaatctgacaaaaatggggaaagtgcaagtcctgaaagagatagggagagtttgaaggtagaaattgagacatctgaggaaatacaagagaaacaagtacagaagcagacccttccaagcaaagcatttgagagagaagtagagagaccagtagcaaacagagagtgcgatccagccgagttagaagagaaggtgcccaaagtgatcctggagagagatacacagagaggggagccagagggagggagccaggaccagaaagggcaggcctccagcccaacaccagagcctggggtgggggcgggggaccttccgggacctacctcagcccccgtaccttctgggagccagtcaggtggaaggggatccccagtgagccccaggaggcatcagaaaggcctcctgaattgcaagatgccacctgctgagaaggcttccaggatcagagctgctgagaaggtttccaggggcgatcaggaatctccagatgcttgtctgcctcctacagtacctgaagccccagccccaccccaaaagccccttaactctcagagccagaaacatcttgcacctccgccccttctttctccccttttaccttctatcaagccaaccgttcgtaagaccaggcaagatgggagtcaggaagctccagaggctcccttgtcctcagagctggagcctttccacccaaagcctaaaattagaactcggaagtcctccagaatgacaccctttccagctacctctgctgcccctgagccccacccttccacctccacagcccagccagtcactcccaagcccacatctcaggccactaggagcaggacaaataggtcctctgtcaagacccctgaaccagttgtccccacagcccctgagctccagccttccacctccacagaccagcctgtcacctctgagcccacatctcaggttactaggggaagaaaaagtagatcctctgtcaagacccctgaaacagttgtgcccacagcccttgagctccagccttccacctccaccgaccgacctgtcacctctgaacccacctctcaggctactaggggaagaaaaaatagatcctctgtcaagacccctgaaccagttgtccccacagcccctgagctccagccttccacctccacagaccagcctgtcacttctgagcccacatatcaggctactaggggaagaaaaaatagatcctctgtcaagacccctgaaccagttgtgcccacagcccctgagctccggccttccacctccacagaccgacctgtcacccccaagcccacatctcggaccactaggagcaggacaaatatgtcctctgtcaagacccctgaaacagttgtccccacagcccctgagctccagatttccacctccacagaccaacctgtcacccctaagcccacatctcggaccactaggagcaggacaaatatgtcctctgtgaagaaccctgaatcaactgtccctatagcccctgagctcccaccttccacctccacagagcagcctgtcacccctgagcccacatctcgggctactaggggaagaaaaaatagatcctctggcaagacccctgaaacacttgtccccacagcccctaagctcgagccttccacttccacagaccaacctgtcactcctgagcccacatctcaggccaccaggggcaggacaaataggtcctctgtgaagacccctgaaacagttgtccccacagcccctgagctccagccttccacctccacagaccagcctgttacccctgagcctacgtctcaggctactaggggaagaacagatagatcctctgtcaagactcctgaaacagttgtccccacagcccctgagctacaggcttccgcctccacagaccagcctgtcacctctgagcccacatctcggaccactaggggaagaaaaaatcggtcctctgtcaagacccctgaaacagttgtgcccgcagcccctgagctccagccttccacctccacagaccaacctgtcacccctgagcccacatctcgggccactaggggcaggacaaataggtcctctgtcaagacccctgaatcaattgtccctatagcccctgagcttcagccttccacctccagaaaccagcttgtcacccctgagcccacatctcgggccactaggtgcaggacaaataggtcctctgtcaagacccctgagccagttgtccccacagcccctgagccccatcctaccacctccacagaccagcctgtcacccccaagctcacatctagggccactaggagaaagacaaataggtcctctgtcaagactcccaaaccagttgaaccagcagcctctgatcttgagccttttacccccacagaccagtccgtcacccctgaggccatagctcagggtggtcagagcaaaacactgaggtcttccacagtaagagctatgccggttcctaccacccctgaattccaatctcctgtcaccacagaccagcctatttcccctgagcctattactcaacccagttgcatcaagaggcagagagccgctgggaaccctggctccctcgcagctcccattgaccataagccttgctctgcacccttggaacctaaatcccaggcctcaaggaaccaaagatggggagcagtgagagcagctgaatcccttacagccattcctgagcctgcctctccccagcttcttgagacaccaattcatgcctcccagatccaaaaggtggaaccagcaggtagatctaggttcaccccggagctccagcctaaggcctctcaaagccgcaagaggtctttagctaccatggattcaccaccacatcaaaaacagccccaaagaggggaagtctcccagaagacagtgattatcaaggaagaggaagaagatactgcagagaagccagggaaggaagaggatgtcgtgactccaaaaccaggcaagagaaagagagaccaggcagaggaggagcccaacagaataccaagccgcagcctccgacggaccaaacttaaccaagaatcaacagcccccaaagtgctcttcacaggagtggtggatgctcggggagagcgggctgtgctggcactggggggaagtctggctggttcagcggcagaggcttcccacctggtcactgatcgcatccgccggacagtcaagttcctgtgtgccctggggcggggaatccccattctgtccctggactggctgcatcagtcccgcaaggctggtttcttcttacccccggatgaatatgtggtgaccgaccctgagcaagagaagaactttggctttagccttcaagacgcactgagcagggctcgggagcgaaggctgctagagggctatgagatctatgtgacccctggagtccagccaccaccacctcagatgggagagattattagctgctgtggaggcacatacctacccagcatgcctcggtcctataagcctcagagagttgtgatcacatgccctcaggacttccctcattgctccattccactacgggttgggctgcccctcctctcgcctgagttcctgctgactggagtgctgaagcaggaagccaagccagaggcctttgtcctctcccctttggagatgtcatccacctgagaactccactacccttttccctcccagaccacgaattagaagatatgtggaagaaagaactcagggcgttagaaaggattggggtatattgatacaacttgtcctggaacatgggtgggaccagaaatctttatgaataaatgaaaagataagggatttggaagccacaggttgttttttgtttgtttgtttgtttttttaatggccattttattttatttgtatttatagttttttatttgtatagatttaggggatacaagatttcttacatgcatgtattaaatggccattttaaaattagctagtttcatgctcagatgtcataagtggcagctatctttagccagactgttgcagttattgctcgatgccactcatggtgtcctacctcctatttggaaaccatctctatttttttcttactgagattcttactttggggtcaggaacttgaagggatgcttggagtgagtagatttgagggtccagttatggagtgctactaaaacattttcttctctcctggcctctggaagcatctttagctttgactttgggcaagtctctgtacttttctggccagcttttccaggatttataaaattagagcttcggcttgacctctgtgataaataaatattcactctgtgcctta

SEQ ID NO: 269612 - DNA, 7576 bp, Artificial Sequence
  derived and/or modified sequence
ttggatttaagaaaatgacctcaaaatgtccgtcagagacgtattcccaggaagaaagatattacttctactacaaaccaaatcaaaaggaaatgaaattccaatgcaacaggagtgaactgccacgcctacgggctgttctccaaactgcagcctccagccacgactgcaacgcgcaacccactttcatttctcatgagtcagcggacaccatgtctaggaggaccgaggaaaggcgctctggccttaccagacacgtcggacgtctatgacacagcccctctatccgttgccggcagctggcgccagactctctggtcgcggtttggaactgcgcgggaagtgggtggtgggcgggcaagcggtagtgggttgtcccttggagctgcccaatcgacgtgcattattctgttggcgcacggcggccttcaattaccgtctcattaactgatctcagcagcctgggagacaccacctatttgaactctaagggggcggggctttgggtgtgcctccgctcgactggctgcggttgtgaaagacagcggcagaagccaatcagcaaataagctctttttcggcacacgcagtcgctccacccgggtcgcgaccgttactggtggcgcgcgcggggacttaaagtagatcatggaggacacccaggctattgactgggatgttgaagaagaggaggagacagagcaatccagtgaatccttgaggtgtaacgtggagccagtagggcggctacatatctttagtggtgcccatggaccagaaaaagatttcccactacacctcgggaagaatgtggtaggccgaatgcctgactgctctgtggccctgccctttccatctatctccaaacaacatgcagagattgaaatcttagcctgggacaaggcacctatcctccgagactgtgggagccttaatggtactcaaatcctgagacctcctaaggttttgagccctggggtgagtcaccgtctgagggaccaggaattgattctctttgctgacttgctctgccagtaccatcgcctggatgtctctctgccctttgtctcccggggccctctgacagtagaagagacacccagagtacagggagaaactcaaccccagaggcttctgttggctgaggactcggaggaggaagtagattttctttctgaaaggcgtatggtaaaaaaatcaaggaccacatcttcctctgtgatagttccagagagtgatgaagaggggcattccccggtcctgggcggccttgggccgccttttgccttcaatttgaacagtgacacagatgtggaagaaggtcagcaaccagccacagaggaggcctcctcagctgccagaagaggtgccactgtagaggcaaagcagtctgaagctgaagttgtaactgaaatccagcttgaaaaggatcagcctttagtgaaggagagggacaatgatacaaaagtcaagaggggtgcagggaatggggtggttccagctggggtgattctggagaggagccaacctcctggagaggacagtgacacagatgtggatgatgacagcaggcctcctggaaggccagctgaggtccatttggaaagggctcagccttttggcttcatcgacagcgacactgatgcggaagaagagaggatcccagcaaccccagttgtcattcctatgaagaagaggaagatcttccatggagtaggtacaaggggtcctggagcaccaggcctggcccatctgcaggagagccaggctggtagtgatacagatgtggaagaaggcaaggccccacaggctgtccctctggagaaaagccaagcttccatggttatcaacagcgatacagatgacgaggaagaagtctcagcagcgctgactttggcacatctgaaagagagccagcctgctatatggaacagagatgcagaagaggacatgccccaacgtgtggtccttctgcagcgaagccaaaccaccactgagagagacagtgacacagacgtggaggaggaagagctcccagtggaaaatagagaagctgtcctcaaggatcacacaaagattagagcccttgttagagcacattcagaaaaggaccaacctccttttggggacagtgatgacagtgtggaagcagataagagctcacctgggatccacctggagagaagccaagcctccaccacagtggacatcaacacacaagtggagaaggaagtcccgccagggtcagccattatacatataaagaagcatcaggtgtctgtggaggggacaaatcaaacagatgtgaaagcagttgggggaccagcaaagctgcttgtggtatctctagaggaagcctggcctctgcatggggactgtgaaacagatgcagaggagggcacctccctaacagcctcagtagttgcagatgtaagaaagagccagcttccagcagaaggggatgctggggcagagtgggctgcagctgttcttaagcaggagagagctcatgaggtgggggcccagggtgggccacctgtggcacaagtggagcaggacctccctatctcaagagagaacctcacagatctggtggtggacacagacactctaggggaatccacccagccacagagagagggagcccaggtccccacaggaagggagagagaacaacatgtgggtgggaccaaggactctgaagacaactatggtgattctgaagatctggacctacaagctacccagtgctttctggagaatcagggcctggaagcagtccagagcatggaggatgaacctacccaggccttcatgttgactccaccccaagagcttggcccttcccattgcagcttccagacaacaggtaccctagatgaaccatgggaggtcctggctacacagccattctgtctgagagagtctgaggactctgagacccagccttttgacacgcaccttgaggcctatggaccttgcctgtctccacctagggcaataccaggagaccaacatccagagagcccagttcacacagagccaatggggattcaaggcagagggaggcagactgtggataaagtcatgggtataccaaaagaaacagcagagagggtgggccctgagagagggccattggagagagaaactgagaaactgctaccagaaagacagacagatgtgacaggagaggaagaattaaccaaggggaaacaggacagagaacaaaaacagttgttagctagagacacccagagacaagaatctgacaaaaatggggaaagtgcaagtcctgaaagagatagggagagtttgaaggtagaaattgagacatctgaggaaatacaagagaaacaagtacagaagcagacccttccaagcaaagcatttgagagagaagtagagagaccagtagcaaacagagagtgcgatccagccgagttagaagagaaggtgcccaaagtgatcctggagagagatacacagagaggggagccagagggagggagccaggaccagaaagggcaggcctccagcccaacaccagagcctggggtgggggcgggggaccttccgggacctacctcagcccccgtaccttctgggagccagtcaggtggaaggggatccccagtgagccccaggaggcatcagaaaggcctcctgaattgcaagatgccacctgctgagaaggcttccaggatcagagctgctgagaaggtttccaggggcgatcaggaatctccagatgcttgtctgcctcctacagtacctgaagccccagccccaccccaaaagccccttaactctcagagccagaaacatcttgcacctccgccccttctttctccccttttaccttctatcaagccaaccgttcgtaagaccaggcaagatgggagtcaggaagctccagaggctcccttgtcctcagagctggagcctttccacccaaagcctaaaattagaactcggaagtcctccagaatgacaccctttccagctacctctgctgcccctgagccccacccttccacctccacagcccagccagtcactcccaagcccacatctcaggccactaggagcaggacaaataggtcctctgtcaagacccctgaaccagttgtccccacagcccctgagctccagccttccacctccacagaccagcctgtcacctctgagcccacatctcaggttactaggggaagaaaaagtagatcctctgtcaagacccctgaaacagttgtgcccacagcccttgagctccagccttccacctccaccgaccgacctgtcacctctgaacccacctctcaggctactaggggaagaaaaaatagatcctctgtcaagacccctgaaccagttgtccccacagcccctgagctccagccttccacctccacagaccagcctgtcacttctgagcccacatatcaggctactaggggaagaaaaaatagatcctctgtcaagacccctgaaccagttgtgcccacagcccctgagctccggccttccacctccacagaccgacctgtcacccccaagcccacatctcggaccactaggagcaggacaaatatgtcctctgtcaagacccctgaaacagttgtccccacagcccctgagctccagatttccacctccacagaccaacctgtcacccctaagcccacatctcggaccactaggagcaggacaaatatgtcctctgtgaagaaccctgaatcaactgtccctatagcccctgagctcccaccttccacctccacagagcagcctgtcacccctgagcccacatctcgggctactaggggaagaaaaaatagatcctctggcaagacccctgaaacacttgtccccacagcccctaagctcgagccttccacttccacagaccaacctgtcactcctgagcccacatctcaggccaccaggggcaggacaaataggtcctctgtgaagacccctgaaacagttgtccccacagcccctgagctccagccttccacctccacagaccagcctgttacccctgagcctacgtctcaggctactaggggaagaacagatagatcctctgtcaagactcctgaaacagttgtccccacagcccctgagctacaggcttccgcctccacagaccagcctgtcacctctgagcccacatctcggaccactaggggaagaaaaaatcggtcctctgtcaagacccctgaaacagttgtgcccgcagcccctgagctccagccttccacctccacagaccaacctgtcacccctgagcccacatctcgggccactaggggcaggacaaataggtcctctgtcaagacccctgaatcaattgtccctatagcccctgagcttcagccttccacctccagaaaccagcttgtcacccctgagcccacatctcgggccactaggtgcaggacaaataggtcctctgtcaagacccctgagccagttgtccccacagcccctgagccccatcctaccacctccacagaccagcctgtcacccccaagctcacatctagggccactaggagaaagacaaataggtcctctgtcaagactcccaaaccagttgaaccagcagcgtctgatcttgagccttttacccccacagaccagtccgtcacccctgaggccatagctcagggtggtcagagcaaaacactgaggtcttccacagtaagagctatgccggttcctaccacccctgaattccaatctcctgtcaccacagaccagcctatttcccctgagcctattactcaacccagttgcatcaagaggcagagagccgctgggaaccctggctccctcgcagctcccattgaccataagccttgctctgcacccttggaacctaaatcccaggcctcaaggaaccaaagatggggagcagtgagagcagctgaatcccttacagccattcctgagcctgcctctccccagcttcttgagacaccaattcatgcctcccagatccaaaaggtggaaccagcaggtagatctaggttcaccccggagctccagcctaaggcctctcaaagccgcaagaggtctttagctaccatggattcaccaccacatcaaaaacagccccaaagaggggaagtctcccagaagacagtgattatcaaggaagaggaagaagatactgcagagaagccagggaaggaagaggatgtcgtgactccaaaaccaggcaagagaaagagagaccaggcagaggaggagcccaacagaataccaagccgcagcctccgacggaccaaacttaaccaagaatcaacagcccccaaagtgctcttcacaggagtggtggatgctcggggagagcgggctgtgctggcactggggggaagtctggctggttcagcggcagaggcttcccacctggtcactgatcgcatccgccggacagtcaagttcctgtgtgccctggggcggggaatccccattctgtccctggactggctgcatcagtcccgcaaggctggtttcttcttacccccggatgaatatgtggtgaccgaccctgagcaagagaagaactttggctttagccttcaagacgcactgagcagggctcgggagcgaaggctgctagagggctatgagatctatgtgacccctggagtccagccaccaccacctcagatgggagagattattagctgctgtggaggcacatacctacccagcatgcctcggtcctataagcctcagagagttgtgatcacatgccctcaggacttccctcattgctccattccactacgggttgggctgcccctcctctcgcctgagttcctgctgactggagtgctgaagcaggaagccaagccagaggcctttgtcctctcccctttggagatgtcatccacctgagaactccactacccttttccctcccagaccacgaattagaagatatgtggaagaaagaactcagggcgttagaaaggattggggtatattgatacaacttgtcctggaacatgggtgggaccagaaatctttatgaataaatgaaaagataagggatttggaagccacaggttgttttttgtttgtttgtttgtttttttaatggccattttattttatttgtatttatagttttttatttgtatagatttaggggatacaagatttcttacatgcatgtattaaatggccattttaaaattagctagtttcatgctcagatgtcataagtggcagctatctttagccagactgttgcagttattgctcgatgccactcatggtgtcctacctcctatttggaaaccatctctatttttttcttactgagattcttactttggggtcaggaacttgaagggatgcttggagtgagtagatttgagggtccagttatggagtgctactaaaacattttcttctctcctggcctctggaagcatctttagctttgactttgggcaagtctctgtacttttctggccagcttttccaggatttataaaattagagcttcggcttgacctctgtgataaataaatattcactctgtgcctta

SEQ ID NO: 269613 - DNA, 583 bp, Artificial Sequence
  derived and/or modified sequence
aatactcatccttacctggcgccccgctccgagtttaggtatgaagacacagggagacgtcgggccacaagggaacccactgaggtggggaccaaagatggtggctctttgaattggagccaagcgtggtgggcacccgctgagttggcctgtcataaagacggagttgacactttatccatggggcatcctactttccctacctgtcaacaatttccctctagagtggcatattttcagatcatggaggacacccaggctattgactgggatgttgaagaagaggaggagacagagcaatccagtgaatccttgaggtgtaacgtggagccagtagggcggctacatatctttagtggtgcccatggaccagaaaaagatttcccactacacctcgggaagaatgtggtaggccgaatgcctgactgctctgtggccctgccctttccatctatctccaaacaacatgcagagattgaaatcttagcctgggacaaggcacctatcctccgagactgtgggagccttaatggtactcaaatcctgagacctcctaaggttttgagccctggggtgagtcacc

SEQ ID NO: 269614 - DNA, 582 bp, Artificial Sequence
  derived and/or modified sequence
attaactgatctcagcagcctgggagacaccacctatttgaactctaagggggcggggctttgggtgtgcctccgctcgactggctgcggttgtgaaagacagcggcagaagccaatcagcaaataagctctttttcggcacacgcagtcgctccacctgggtcgcgaccgttactggtggcgcgcgcggggacttaaaatcatggaggacacccaggctattgactgggatgttgaagaagaggaggagacagagcaatccagtgaatccttgaggtgtaacgtggagccagtagggcggctacatatctttagtggtgcccatggaccagaaaaagatttcccactacacctcgggaagaatgtggtaggccgaatgcctgactgctctgtggccctgccctttccatctatctccaaacaacatgcagagattgaaatcttagcctgggacaaggcacctatcctccgagactgtgggagccttaatggtactcaaatcctgagacctcctaaggttttgagccctggggtgagtcaccgtctgagggaccaggaattgattctctttgctgacttgct

SEQ ID NO: 269615 - DNA, 489 bp, Artificial Sequence
  derived and/or modified sequence
atggaggacacccaggccatcgactgggacgtggaggaggaggaggaaaccgagcagtcatcagagtctctgcggtgtaatgttgagcccgttggccggttacatatttttagcggggcgcatgggcctgagaaggattttcctctacacctgggcaagaatgtggtggggaggatgcctgactgttcggtcgcactgccgttcccttctattagtaagcagcatgctgaaatcgaaattctcgcatgggacaaagcccctatcttacgggattgtggctcactgaacggcacccaaatccttcggcccccaaaagttctcagccctggcgtgagtcatcgattacgggaccaggagctcattttgtttgccgaccttctgtgccagtaccatcggctcgatgttagcctgcctttcgtgagtagaggacctttaaccgtcgaagagacccccagagttcagggggaaacacagcctcagagattgtag

SEQ ID NO: 269616 - DNA, 342 bp, Artificial Sequence
  derived and/or modified sequence
atggaggacacccaggccatcgactgggacgtggaggaggaggaggagactgagcagtctagcgagagtctgcggtgtaatgtggagccagtaggtcggctccacatattcagcggggcccatggtcccgaaaaagacttcccacttcatttgggaaaaaatgtcgttggcaggatgcccgattgctcagtagctctgcccttcccatcaatttcaaagcaacacgccgaaatagagatcctggcttgggacaaggcacccatcctgcgcgattgtggatctttaaacggaactcagattctgaggcccccgaaggtcctttctcctggagtgagtcattag

SEQ ID NO: 269617 - DNA, 384 bp, Artificial Sequence
  derived and/or modified sequence
atggaggacacccaggccatcgactgggacgtggaggaggaggaggagacagagcagtcctctgagtctctgaggtgcaatgtcgagcccgtgggcagactccacatcttttcgggcgcgcatggacccgaaaaagacttccccttgcacctaggcaagaatgtagtaggcaggatgccagattgttcagtggctctcccattcccctccatcagcaagcagcacgccgagatagagatcctggcttgggacaaagcgcctatcctaagggactgcggatcactcaatgggactcaaattctgcgcccacctaaagtgcttagccctggggtcagccacagacttagagaccaagagctcatcctgttcgcagatctgctgtag

SEQ ID NO: 269618 - DNA, 489 bp, Artificial Sequence
  derived and/or modified sequence
atggaggacacccaggccatcgactgggacgtggaggaggaggaggagaccgagcaatcgtctgaaagcctcaggtgcaatgtcgaaccagtaggaagattacatatcttctctggggcccacggcccggagaaagattttcccctgcacctcgggaagaacgtggtgggacgcatgcccgattgcagcgtcgccctacctttcccctcaatctcaaagcaacacgccgaaattgagatcttggcttgggataaggctcccatattgcgcgactgcgggagtttgaatgggacccaaatcctcaggccccctaaggtcctctctcccggggtgtctcaccgcctgagggatcaggagctgatcctcttcgccgacttgctgtgccagtaccatcgtctcgacgtgagcctgccattcgtgtctcgcggcccactaacagtggaagagacacccagggttcagggagaaactcagccccagaggctttag

SEQ ID NO: 269619 - DNA, 384 bp, Artificial Sequence
  derived and/or modified sequence
atggaggacacccaggccatcgactgggacgtggaggaggaggaggaaacagagcagagctcagaaagccttagatgcaatgtggaacccgtcggaaggctgcacatcttctccggggcccacggccctgagaaggacttccccctccaccttggcaaaaacgtagttgggcggatgcctgattgcagtgtagcactgccattcccaagcataagtaagcagcacgcggaaattgagatccttgcatgggacaaggcccctatcctacgtgactgtggtagtttgaacggcacacagatcctgcggcccccgaaagtcctctcacctggcgtatcccatcgactgcgggaccaggaactgattttgttcgccgacctcctgtag

SEQ ID NO: 269620 - DNA, 489 bp, Artificial Sequence
  derived and/or modified sequence
atggaggacacccaggccatcgactgggacgtggaggaggaggaggaaaccgaacagtcctccgagagtctgcggtgtaacgtggaacccgttggccggctgcacatcttctcaggggcgcacggaccagaaaaagactttccgctgcacctgggaaaaaacgttgtgggccggatgcctgattgtagcgtggcactccctttcccatccatctcaaagcagcacgctgaaatcgaaatacttgcctgggataaggctccgattctacgcgattgtggcagtctgaatgggacccagatactgcggcctccaaaggtgctctctcccggggtctctcaccgtctccgtgaccaggaactgatactgttcgcagatctcctctgtcagtaccaccgcctcgacgtcagcctaccatttgtgagccgaggtcctctgactgtggaagagaccccgcgggttcaaggcgaaactcagccacagcggctgtag

SEQ ID NO: 269621 - DNA, 342 bp, Artificial Sequence
  derived and/or modified sequence
atggaggacacccaggccatcgactgggacgtggaggaggaggaggaaaccgaacagtccagcgaaagcctgcgctgtaatgttgagccggtcggccgattacatatcttttccggtgctcacgggccggagaaagattttcccctacacctgggtaaaaacgtcgtggggcgcatgcccgattgttctgtcgcgcttcccttcccatcaatatcgaagcaacatgctgagatcgaaatactagcatgggataaagcccccatcttgcgagattgtgggtcactgaacggtacccagattctgaggccacctaaagtactctctccaggggtgagtcactag

SEQ ID NO: 269622 - DNA, 342 bp, Artificial Sequence
  derived and/or modified sequence
atggaggacacccaggccatcgactgggacgtggaggaggaggaggagaccgagcagagctcagaaagccttaggtgcaatgtcgagcctgtcgggcgactacatattttttcaggagcacacggcccggagaaggatttccctctacatttgggaaaaaatgtggtgggccgtatgccggactgctccgtggctttaccatttccttccataagcaagcagcacgctgagatcgagatcctcgcatgggacaaagccccgattctgcgtgattgcggctcccttaacgggacccagatcctcaggcctcccaaagttctgtccccaggagtttctcattag

SEQ ID NO: 269623 - DNA, 384 bp, Artificial Sequence
  derived and/or modified sequence
atggaggacacccaggccatcgactgggacgtggaggaggaggaggagactgaacaatcaagcgagtccctgcgttgtaatgtggagcctgtgggtcgtctccacattttttccggggcccacggaccggaaaaggactttccccttcacctggggaaaaatgtcgtcggcaggatgcccgactgttccgtggcccttcccttcccgagcatctcaaaacaacatgcagagatcgaaatcctggcatgggacaaggcacctattctgagggactgcggctctttgaacgggacccagattctccgtcccccaaaggtcctatcgcctggcgtgtcacaccgcctccgcgatcaggagctcattctcttcgccgacctgctgtag

SEQ ID NO: 269624 - DNA, 489 bp, Artificial Sequence
  derived and/or modified sequence
atggaggacacccaggccatcgactgggacgtggaggaggaggaggaaactgaacagagttcggaatcacttcgttgtaacgtcgagcccgtgggaagattgcacattttctccggcgcccacggacctgagaaggattttccccttcatttgggaaagaacgtcgtgggaagaatgccagactgttccgtggctttaccatttccttctatctcaaaacaacatgcagagatcgagatactggcctgggataaagccccaatactccgtgattgcggcagtcttaatgggactcagattttgcggccgcctaaagtcctgtcgcccggagtgtcccacaggttaagagaccaagagctaatcctttttgctgatttgctttgccagtaccaccgccttgatgtatccttgccgtttgtatcgagaggacccttgaccgtcgaagaaacgccacgcgtgcagggagagacacagccacagagattatag

SEQ ID NO: 269625 - DNA, 342 bp, Artificial Sequence
  derived and/or modified sequence
atggaggacacccaggccatcgactgggacgtggaggaggaggaggaaacggagcagtctagcgaatctcttagatgtaatgtggagccagttggaagactgcatatctttagcggagcacacggacctgagaaagacttcccactccacctggggaaaaatgtggtgggcagaatgcctgactgttctgtggcactgcccttcccaagtatttcaaagcaacacgccgagatagagatacttgcctgggataaagctcccattttgcgggattgcggatctttgaacggaacccagattctgcgcccgcctaaggtcctgagccctggggtgtctcactag

SEQ ID NO: 269626 - DNA, 489 bp, Artificial Sequence
  derived and/or modified sequence
atggaggacacccaggccatcgactgggacgtggaggaggaggaggaaaccgagcagagttcggaatcgcttaggtgcaacgtggaacctgtcgggagactacacatatttagcggtgcccatgggcctgagaaggacttcccactgcacctcggtaagaacgttgtagggcggatgcccgattgttctgtggcgctcccctttccatctattagcaaacagcatgctgagatcgagattcttgcgtgggataaggcgccaatactgagggactgtggctcactgaacggcacacaaatactgaggccacccaaagttctctcaccaggcgtgtcccatcgtctccgggaccaggagctgattttgttcgctgacctcctgtgccagtaccatcgcctagatgtttccctgcctttcgtgagtagaggccccctgacagtggaggagacaccccgcgtccaaggcgagacacagccgcaaagactgtag

SEQ ID NO: 269627 - DNA, 384 bp, Artificial Sequence
  derived and/or modified sequence
atggaggacacccaggccatcgactgggacgtggaggaggaggaggaaacggagcagagcagcgagtcactccgctgcaacgttgagcctgtcgggcggctccatattttcagtggagcgcatgggcctgagaaggattttccattgcacttgggcaaaaacgtggttggtcggatgccagattgttctgtagctctgccgtttccctctatcagcaagcagcacgccgagatagagatcctggcttgggacaaagctccaatactgcgtgactgtgggtccttaaatgggacccagatattaagacctcctaaagtgttgtcaccgggtgtatcacacagactgcgtgatcaggaattaatcttgtttgctgacttgttgtag

SEQ ID NO: 269628 - DNA, 342 bp, Artificial Sequence
  derived and/or modified sequence
atggaggacacccaggccatcgactgggacgtggaggaggaggaggaaacagagcagtcatccgaatccctgagatgtaacgttgaacctgtggggagactacacatattcagcggggcacatgggccagagaaagatttccccttgcacctggggaaaaacgtggtggggcggatgcccgattgctccgttgcactccccttccccagtatcagcaagcagcatgcggagatcgagattcttgcttgggataaggccccaatcttgagagactgcggtagcttgaacggaactcagatcctacgccctccaaaggtactgtctcctggcgtcagccattag

SEQ ID NO: 269629 - DNA, 342 bp, Artificial Sequence
  derived and/or modified sequence
atggaggacacccaggccatcgactgggacgtggaggaggaggaggaaacagagcagagcagtgaaagcttgagatgcaatgtggagccagtgggacgacttcacatcttcagtggagcacatggtccagaaaaggactttccattgcatcttggcaagaatgtggtaggaaggatgcccgactgcagtgtggccctaccgtttccctctatatccaaacagcacgccgagatagagatcctggcctgggacaaagcccctatcctgagagattgtggaagtcttaacggtacccagatacttagaccccccaaggtgctctctccaggcgtgagccactag

SEQ ID NO: 269630 - DNA, 384 bp, Artificial Sequence
  derived and/or modified sequence
atggaggacacccaggccatcgactgggacgtggaggaggaggaggaaacagagcagtcctccgaaagcctgcgatgtaacgttgaacctgtaggccgtcttcacattttcagcggcgcacacgggcccgaaaaagattttccactgcacttaggcaaaaacgtggtcggacgtatgccagactgtagcgttgctttgccttttccaagcatctcaaagcagcatgccgagatcgagattctcgcctgggataaggctcccatattacgggattgcggaagcttaaatggcacccaaatactgaggcctccaaaggtgctgtccccaggcgtgtcacaccgactgcgggaccaggaactcatcctgtttgccgacctgttgtag

SEQ ID NO: 269631 - DNA, 489 bp, Artificial Sequence
  derived and/or modified sequence
atggaggacacccaggccatcgactgggacgtggaggaggaggaggagaccgagcaatcatctgaatccctgaggtgcaacgtggaaccagtgggcaggctgcatatcttctctggagctcatggccccgaaaaagatttccccctacacctaggcaagaatgtggtgggaaggatgccagactgttccgtggccctgccctttcctagcattagtaaacagcatgccgaaatcgagatcctggcttgggacaaggcaccaattctcagagactgtgggtctctaaatggcacccaaattcttcgacccccgaaggtgctttcccccggcgtgtcccaccgcctgcgtgaccaggagctaatcctcttcgcagacctcttgtgccagtaccatcggctggacgtgagcctgccctttgtgtcgcgtggtcctctaacagtcgaagaaacaccacgagtacagggcgagactcaacctcagaggctgtag

SEQ ID NO: 269632 - DNA, 384 bp, Artificial Sequence
  derived and/or modified sequence
atggaggacacccaggccatcgactgggacgtggaggaggaggaggagaccgaacaaagttcggagtctttacgctgcaacgtggagcctgtgggccggttacatatattttcaggcgctcatggccccgagaaggactttcctttgcacctcggtaaaaacgtggtgggtaggatgccagattgcagtgtggccctgccctttccttcgataagcaagcaacacgcagagatcgagatacttgcttgggacaaggctcccatccttcgtgattgcggctccctgaacggaacccaaatacttaggccaccaaaggtcttaagcccgggggtcagtcatcgacttcgggatcaggagctgattttattcgccgacctgctgtag

SEQ ID NO: 269633 - DNA, 489 bp, Artificial Sequence
  derived and/or modified sequence
atggaggacacccaggccatcgactgggacgtggaggaggaggaggagacagagcaatccagtgagagtctgaggtgtaatgtggagcccgtaggacgcctgcatattttttcaggcgcgcacggacctgaaaaggactttcccttgcatctcggcaaaaatgtcgtcggtcgcatgcctgactgttctgtggccctcccttttccaagcattagcaagcagcacgcagagatcgagatcctggcctgggataaagctcccatcttgagggattgcggatcactgaacggtactcagatactgaggccaccgaaagttctaagtccaggtgtgtcgcataggcttcgtgatcaggaactgattctcttcgcagatcttctctgccaatatcataggctggacgtctccctgcctttcgtcagcaggggcccactgactgtggaagagacaccccgcgtgcagggcgaaacccagccacagcggctgtag

SEQ ID NO: 269634 - DNA, 384 bp, Artificial Sequence
  derived and/or modified sequence
atggaggacacccaggccatcgactgggacgtggaggaggaggaggaaaccgagcagtcgtcagagtccctgcgttgcaacgtggaaccggtgggtcgactgcacatcttctctggcgctcatgggcctgagaaggacttccctttacatttgggaaaaaatgtggtagggcgcatgcccgattgcagtgtggccctgcctttcccttcaatctctaagcagcacgccgagatcgaaatcttggcttgggataaggccccaatcttgagggattgcggtagtttgaatggaacccagatactgagaccaccaaaggtgctaagtcctggagttagccacagactgagagatcaggaactgatcctttttgcagatttactgtag

SEQ ID NO: 269635 - DNA, 342 bp, Artificial Sequence
  derived and/or modified sequence
atggaggacacccaggccatcgactgggacgtggaggaggaggaggagacagagcagtccagtgagagccttcgctgtaatgttgagccagttggccggctgcacattttttccggggcccacggtccagagaaggacttcccccttcatctcgggaagaacgtcgttggcagaatgcctgactgctctgtcgccctcccctttccctctatcagtaagcagcatgcggagatcgagatcctggcatgggataaagctcccatcctcagagactgtggcagcctcaacggtacccagatccttagaccgcccaaggttcttagcccaggggttagtcactag

SEQ ID NO: 269636 - DNA, 489 bp, Artificial Sequence
  derived and/or modified sequence
atggaagacactcaggcaatcgactgggacgttgaggaagaagaggagaccgagcaaagtagcgaaagcctgcgctgtaacgtggaaccggtcggtcgactccacatcttttctggcgctcatggtcctgagaaggatttcccacttcacctgggaaagaacgtcgtgggtcgcatgccagattgtagtgtcgcgctaccattcccatctataagcaaacagcacgccgaaattgagatcttggcttgggataaggcacctattcttcgggactgtggaagcctgaatggcactcaaatactgaggcctcccaaggtgctttctccgggagtctcacatagattacgggaccaggaactcatcctattcgccgacctcctctgccaataccacaggctcgacgtgtcccttccgttcgtatctcggggtcccttgactgtggaggaaacccccagggtacagggggaaacacagcctcagcgcctatag

SEQ ID NO: 269637 - DNA, 342 bp, Artificial Sequence
  derived and/or modified sequence
atggaagacacccaggccatcgattgggacgtcgaagaggaagaagaaactgaacagagcagcgagtcattaagatgtaatgttgaacccgtgggtcggctgcatatctttagcggtgcccacggtcccgagaaggattttccactccaccttggaaaaaacgtcgtgggtagaatgcctgactgcagcgtggccttgcccttccctagcattagcaaacaacacgcagagatcgaaatccttgcctgggataaggctcccattctcagagactgcgggagcctgaacggcacccagattcttaggcccccaaaagtattgagccctggtgtcagccattag

SEQ ID NO: 269638 - DNA, 384 bp, Artificial Sequence
  derived and/or modified sequence
atggaggacacccaagccatcgattgggatgtggaagaggaggaagagacagaacagtcctcggaaagtctgcgttgcaacgtcgagccggtaggcagactccacattttctcaggggctcatggcccagaaaaagacttccctcttcacctaggcaagaatgtggtgggaaggatgccagattgcagcgtcgctctgccgttcccctctatttctaagcaacacgccgagatcgagattctggcctgggacaaggcccctatcctgagagattgcgggagcctgaacggaactcaaatactgagaccacccaaagtgcttagcccaggagtgtctcacagactgcgcgaccaggagcttatactgtttgccgacctgttatag

SEQ ID NO: 269639 - DNA, 489 bp, Artificial Sequence
  derived and/or modified sequence
atggaggacacacaagccatcgattgggatgtcgaggaagaggaagagaccgagcagagttcagagagtctccgatgcaacgtagaacctgtaggcaggctgcatatttttagcggcgcacatggaccagaaaaggatttccccctgcacctgggcaaaaacgttgtgggtaggatgccagattgtagcgtggcattgcctttcccgagcattagtaagcagcacgccgaaatcgagattcttgcttgggataaagcacccatcctgagggattgcgggtctttgaacggtacacagatcctcagacctcctaaggttctaagtccgggtgtgagccaccggttgcgggaccaagaactaatcctttttgctgatctgctatgtcagtatcacaggctggatgtgagtttaccctttgtctccagaggcccactgaccgtggaagagaccccccgtgtacagggggaaacgcagccacaacggctatag

SEQ ID NO: 269640 - DNA, 384 bp, Artificial Sequence
  derived and/or modified sequence
atggaggacacccaggccatcgactgggacgttgaagaggaggaggaaacagaacagtccagtgagtccttacggtgcaatgtggagcccgtgggtcggttgcacattttctcaggtgctcacgggcctgagaaggatttcccactacatctgggcaagaacgtggtgggcagaatgcctgattgctctgtggcacttcctttccctagtatttcaaaacagcacgccgagatagagattctggcctgggacaaagcgcctatcctgcgagactgcggttcactgaatggtacacagattttgcggcctcccaaagtgctgtcacccggtgtttcacacagactgcgggaccaagaattgatattgtttgccgacctgctatag

SEQ ID NO: 269641 - DNA, 489 bp, Artificial Sequence
  derived and/or modified sequence
atggaggatactcaggcgattgattgggatgtagaagaagaggaagaaacggagcagtcatctgagtccctccggtgtaacgtggaaccagtgggcaggctgcacatattttctggagcgcatggacctgagaaggactttcccctgcatctcggaaaaaatgtggtgggcaggatgcccgactgcagcgtggccctgcctttcccttcaatctccaagcagcatgcagagatcgaaattctcgcttgggataaagcgcctatcctaagggactgtggcagcctgaacggtacccaaattctgcgtccgcctaaggtgctaagccctggggtctctcatcgtctgagagatcaagagttaatactttttgctgatcttctgtgccagtaccacaggctggacgtgtctctaccgttcgtctccaggggcccactaacagtagaggagactccacgcgtgcaaggggagactcaaccccagcgcctgtag

SEQ ID NO: 269642 - DNA, 342 bp, Artificial Sequence
  derived and/or modified sequence
atggaggatacccaggccattgattgggacgtcgaggaggaggaggagaccgagcaatcatcagagtccctgcggtgcaatgtggaaccagtgggaaggctacacatcttctccggagcacacggaccagaaaaggacttccctctgcacttgggaaaaaacgtggtgggcagaatgcctgattgttccgtggccctgccgtttccgtctatcagcaaacagcacgcggaaatagaaattttggcctgggacaaggcccctatcctgagggactgtggatcccttaatgggactcaaatcttacgcccaccgaaggtgctgtccccaggagtttctcactag

SEQ ID NO: 269643 - DNA, 342 bp, Artificial Sequence
  derived and/or modified sequence
atggaggatacacaagcaatcgactgggatgtagaggaagaggaggagactgagcagtccagcgaatcacttcgatgcaacgtggagcccgtgggccgattgcatatcttctcgggggcacacgggccagagaaggatttcccattacatctgggaaagaatgtagtgggcagaatgcctgattgttctgttgccctaccattcccaagtattagcaagcaacacgccgagatcgagattctggcctgggataaagcccctattttgcgtgactgcgggtcccttaatggaacccaaatcttaagaccgcctaaggtactatcgcctggcgtaagccattag

SEQ ID NO: 269644 - DNA, 384 bp, Artificial Sequence
  derived and/or modified sequence
atggaggatacccaggctatcgattgggatgtggaagaggaagaagaaacagagcagtctagcgagagtttgcgctgcaacgttgagccagtgggcaggctgcacatatttagtggcgctcacgggccagagaaggacttccctttgcatcttggcaaaaacgtggtgggcaggatgcccgattgttctgtggctctccctttcccatctataagcaagcagcatgcggagattgagatcctggcatgggacaaggctcccatccttcgcgattgcggttctctgaacggaacccaaattctgaggccccctaaagtgctctcccccggtgttagccatcgactcagggatcaggagctgatccttttcgcagacctgctctag

SEQ ID NO: 269645 - DNA, 489 bp, Artificial Sequence
  derived and/or modified sequence
atggaggatacgcaagccatagattgggatgtggaggaggaggaagaaactgaacagtcatccgaatctctccgctgtaacgtggagccggtcggcaggctacacattttttccggggctcacggtcctgagaaagactttccacttcatttggggaaaaatgtggtcgggcgtatgcctgattgctccgttgccctgccgtttccatccatctcaaaacagcatgccgaaatcgagattctggcctgggacaaggctcccattttgagagattgcggctccctcaatggcacccaaatactcaggccaccaaaagtcctcagtcctggggtatctcataggctccgcgatcaggaacttatactgttcgcggacctcctctgccagtatcaccgactggacgttagtttaccctttgtctcgcgaggtccactcacagtggaggaaacacccagggtgcaaggagaaacccaaccacagcgcctttag

SEQ ID NO: 269646 - DNA, 342 bp, Artificial Sequence
  derived and/or modified sequence
atggaggatacccaggcaatcgactgggatgtcgaggaggaggaggagacagaacagtcatccgaatccttgagatgtaacgtggagcctgttggcagattgcacatcttttccggggcacacggcccagagaaggactttcccctgcatctgggaaagaacgtcgttggtcgaatgccggactgcagcgtcgctttgccatttccttccatatcaaaacagcatgctgagatcgagattttggcctgggataaggccccaatccttcgcgactgcggatctctcaacgggacacaaatcctcaggcctcccaaggtgctcagccccggtgttagccactag

SEQ ID NO: 269647 - DNA, 489 bp, Artificial Sequence
  derived and/or modified sequence
atggaagacacgcaggccattgattgggacgtggaggaggaagaggaaacagagcagagctcagaatctctccgctgtaatgtggagcccgtcggaagactgcacatctttagtggcgcacacgggccagaaaaagacttcccgctccaccttggaaagaacgtggtcggaaggatgcctgattgcagtgtggcgctgcccttcccctcaatcagcaagcaacatgccgagatcgagattcttgcctgggataaagcccctatcctacgtgactgcggtagcctgaatgggacgcaaatcctgcgacctcctaaagtactgagcccgggagtttctcacagactacgagatcaggagctgattctgttcgcggatctgctttgtcagtaccaccgtctcgacgtgagcttgccattcgtgtccagaggaccactcacagtggaggagaccccacgcgtacagggagaaacacaaccacaacgactctag

SEQ ID NO: 269648 - DNA, 384 bp, Artificial Sequence
  derived and/or modified sequence
atggaggatacccaggccattgactgggacgtggaggaagaggaggaaaccgagcagagtagcgaatcactgcggtgcaacgtagagcccgtgggaaggctccatattttttctggcgcacatggccctgagaaagattttcctctacatctgggcaaaaatgtggttggacgcatgccagactgttctgtcgcgcttccattcccctccatcagtaaacagcatgccgaaatagagatcctggcttgggacaaggcaccgatcctccgtgattgcggaagcttgaatggaacccagatcttgcgaccacctaaagtactttcccctggagtttcacacagactgcgagaccaagagttgattctgttcgccgacctcctttag

SEQ ID NO: 269649 - DNA, 342 bp, Artificial Sequence
  derived and/or modified sequence
atggaagatactcaggccattgactgggacgtcgaagaagaagaagagactgaacaatcatcggagtctttacgatgcaatgttgagcctgtgggtagacttcacatcttttcaggggctcatggtccggagaaagattttcccctgcacttgggaaaaaatgtggtcggccgtatgcctgactgtagtgttgcattaccttttccctctatttctaagcagcatgccgagatcgagattctcgcatgggataaggcgccaattctgcgagattgtgggtcattgaatggaacccaaatcctccgcccaccgaaggtgctctcacctggcgtatcccattag

SEQ ID NO: 269650 - DNA, 342 bp, Artificial Sequence
  derived and/or modified sequence
atggaggacactcaagctatagactgggatgtggaggaggaggaagaaacagaacagtctagcgaatccctccggtgtaacgtggagcccgtggggagactccacatattcagtggggctcatggcccagaaaaggatttccctctgcacctgggcaaaaacgtcgttgggcgtatgccagactgctctgttgctctgccgttcccctccatttcaaagcagcatgctgaaatcgagattctcgcttgggacaaggccccaatcctgcgtgattgtggcagtctgaacggtacccaaatcctcagaccaccaaaggtcctgtcgcctggtgtgtctcactag

SEQ ID NO: 269651 - DNA, 384 bp, Artificial Sequence
  derived and/or modified sequence
atggaagacacccaggccattgattgggatgttgaagaggaagaggaaacagaacaaagctccgagtctttgaggtgcaacgtggaaccggtcggcaggctccatattttttcaggggcacatggaccggagaaagactttccgctacacctgggcaagaacgtcgtaggcaggatgcctgattgctcagtagctctgcctttcccaagcatttccaaacagcacgcagagattgaaatattggcttgggacaaagcccctatcttaagagactgcggttcccttaatggaacgcagattctgaggcctccaaaagtgctctccccaggcgtttctcaccggcttcgagatcaggaactgatcctgttcgccgaccttctctag

SEQ ID NO: 269652 - DNA, 489 bp, Artificial Sequence
  derived and/or modified sequence
atggaagacactcaggcgatcgactgggacgtggaggaggaagaggaaacagaacagagcagtgaatctttacgatgcaacgttgaacccgtggggagactgcacatctttagcggagcacatggccctgagaaggattttcccttgcatttgggaaagaacgttgtgggtcgaatgcccgattgcagtgtcgccttaccctttccgtcaatttccaaacagcatgcagaaatcgaaattcttgcttgggataaggcacctatccttcgagactgtggatctttaaacgggacacaaattctccgtccacctaaggtactatcacccggagtgagccaccggctccgggatcaagagcttatactgtttgccgacctgttgtgtcagtatcaccggcttgacgtgtcccttccttttgtatcaagaggacccctgaccgtggaagagacaccacgtgttcaaggcgaaacccaaccccagagactgtag

SEQ ID NO: 269653 - DNA, 384 bp, Artificial Sequence
  derived and/or modified sequence
atggaggacacccaagcaatcgactgggatgttgaggaggaggaggaaacagaacagtccagcgagtccctccggtgcaacgttgaacctgtgggacgattacatatcttctccggcgcacacggaccagaaaaagacttccccctgcatctgggcaagaacgttgtgggacgtatgcctgactgcagcgtggcgcttccttttccttccatcagcaagcagcacgctgaaatcgagattctcgcctgggacaaagcgccaattttgagagactgtggctcactgaatggcactcaaattctcaggccacctaaagttctcagcccaggcgtgagccaccgtttgagggaccaggaactcattctgttcgcggatctgctgtag

SEQ ID NO: 269654 - DNA, 489 bp, Artificial Sequence
  derived and/or modified sequence
atggaggacacccaagctattgactgggacgtcgaggaagaagaggagactgaacagagctcagaaagcttgagatgcaacgtggagccggtgggccgtctccacatttttagcggagcccatgggccagagaaggactttccccttcatctcggcaaaaatgtggtaggcaggatgcccgattgcagtgtcgccctcccgtttccctccatatctaagcaacacgcagagatcgagatcctggcttgggataaggcaccaatcctccgcgattgcggcagccttaatggtactcagattctgaggcccccaaaggtcctctcccccggagtcagtcacaggctccgggaccaggagctgatcttgtttgctgacctgttgtgccagtaccacaggctcgacgtcagtctccctttcgtgtctcggggacccttaactgtggaggagaccccccgtgtgcagggggaaacccagcctcagcgactgtag

SEQ ID NO: 269655 - DNA, 384 bp, Artificial Sequence
  derived and/or modified sequence
atggaggacacccaggcgatcgattgggatgtagaggaggaggaggagactgagcaatcttcagagagcctgcggtgtaatgtggaacccgttggacggctccacattttcagtggggctcacggccctgaaaaggacttccctcttcacctcggaaaaaatgttgtgggacgcatgccagattgttctgtggcactgccatttccctctatttccaaacaacacgccgaaatcgagatcctcgcttgggataaggctcctattttgcgggactgcggctccctgaatgggactcagatcctcagacccccaaaggtactgtcaccgggagttagtcatcgcctgcgagatcaggagttgatccttttcgcagatctgctttag

SEQ ID NO: 269656 - DNA, 342 bp, Artificial Sequence
  derived and/or modified sequence
atggaggacacacaagctatcgactgggacgtggaagaggaagaagaaactgaacagagttcagaaagcttgaggtgcaatgtggagccagtcggacgtctgcacatcttctccggtgcacacggaccagagaaagactttcccttgcatctaggcaaaaatgtagttggcaggatgcccgattgttctgttgctttgcccttcccatctatcagcaagcagcatgcggagatcgagatcctcgcatgggataaagctccaattctgcgagattgtggatcgcttaacgggacccaaatcctgaggcctcccaaagtgctatcccctggtgtttcgcactag

SEQ ID NO: 269657 - protein, 1655 aa, Artificial Sequence
  derived and/or modified sequence
MYHRLDVSLPFVSRGPLTVEETPRVQGETQPQRLLLAEDSEEEVDFLSERRMVKKSRTTSSSVIVPESDEEGHSPVLGGLGPPFAFNLNSDTDVEEGQQPATEEASSAARRGATVEAKQSEAEVVTEIQLEKDQPLVKERDNDTKVKRGAGNGVVPAGVILERSQPPGEDSDTDVDDDSRPPGRPAEVHLERAQPFGFIDSDTDAEEERIPATPVVIPMKKRKIFHGVGTRGPGAPGLAHLQESQAGSDTDVEEGKAPQAVPLEKSQASMVINSDTDDEEEVSAALTLAHLKESQPAIWNRDAEEDMPQRVVLLQRSQTTTERDSDTDVEEEELPVENREAVLKDHTKIRALVRAHSEKDQPPFGDSDDSVEADKSSPGIHLERSQASTTVDINTQVEKEVPPGSAIIHIKKHQVSVEGTNQTDVKAVGGPAKLLVVSLEEAWPLHGDCETDAEEGTSLTASVVADVRKSQLPAEGDAGAEWAAAVLKQERAHEVGAQGGPPVAQVEQDLPISRENLTDLVVDTDTLGESTQPQREGAQVPTGREREQHVGGTKDSEDNYGDSEDLDLQATQCFLENQGLEVQSMEDEPTQAFMLTPPQELGPSHCSFQTTGLLNCKMPPAEKASRIRAAEKVSRGDQESPDACLPPTVPEAPAPPQKPLNSQSQKHLAPPPLLSPLLPSIKPTVRKTRQDGSQEAPEAPLSSELEPFHPKPKIRTRKSSRMTPFPATSAAPEPHPSTSTAQPVTPKPTSQATRSRTNRSSVKTPEPVVPTAPELQPSTSTDQPVTSEPTSQVTRGRKSRSSVKTPETVVPTALELQPSTSTDRPVTSEPTSQATRGRKNRSSVKTPEPVVPTAPELQPSTSTDQPVTSEPTYQATRGRKNRSSVKTPEPVVPTAPELRPSTSTDRPVTPKPTSRTTRSRTNMSSVKNPESTVPIAPELPPSTSTEQPVTPEPTSRATRGRKNRSSGKTPETLVPTAPKLEPSTSTDQPVTPEPTSQATRGRTNRSSVKTPETVVPTAPELQPSTSTDQPVTPEPTSQATRGRTDRSSVKTPETVVPTAPELQASASTDQPVTSEPTSRTTRGRKNRSSVKTPETVVPAAPELQPSTSTDQPVTPEPTSRATRGRTNRSSVKTPESIVPIAPELQPSTSRNQLVTPEPTSRATRCRTNRSSVKTPEPVVPTAPEPHPTTSTDQPVTPKLTSRATRRKTNRSSVKTPKPVEPAASDLEPFTPTDQSVTPEAIAQGGQSKTLRSSTVRAMPVPTTPEFQSPVTTDQPISPEPITQPSCIKRQRAAGNPGSLAAPIDHKPCSAPLEPKSQASRNQRWGAVRAAESLTAIPEPASPQLLETPIHASQIQKVEPAGRSRFTPELQPKASQSRKRSLATMDSPPHQKQPQRGEVSQKTVIIKEEEEDTAEKPGKEEDVVTPKPGKRKRDQAEEEPNRIPSRSLRRTKLNQESTAPKVLFTGVVDARGERAVLALGGSLAGSAAEASHLVTDRIRRTVKFLCALGRGIPILSLDWLHQSRKAGFFLPPDEYVVTDPEQEKNFGFSLQDALSRARERRLLEGYEIYVTPGVQPPPPQMGEIISCCGGTYLPSMPRSYKPQRVVITCPQDFPHCSIPLRVGLPLLSPEFLLTGVLKQEAKPEAFVLSPLEMSST

SEQ ID NO: 269658 - DNA, 1172 bp, Artificial Sequence
  derived and/or modified sequence
caccatgtctaggaggaccgaggaaaggcgctctggccttaccagacacgtcggacgtctatgacacagcccctctatccgttgccggcagctggcgccagactctctggtcgcggtttggaactgcgcgggaagtgggtggtgggcgggcaagcggtagtgggttgtcccttggagctgcccaatcgacgtgcattattctgttggcgcacggcggccttcaattaccgtctcattaactgatctcagcagcctgggagacaccacctatttgaactctaagggggcggggctttgggtgtgcctccgctcgactggctgcggttgtgaaagacagcggcagaagccaatcagcaaataagctctttttcggcacacgcagtcgctccacccgggtcgcgaccgttactggtggcgcgcgcggggacttaaagtagatcatggaggacacccaggctattgactgggatgttgaagaagaggaggagacagagcaatccagtgaatccttgaggtgtaacgtggagccagtagggcggctacatatctttagtggtgcccatggaccagaaaaagatttcccactacacctcgggaagaatgtggtaggccgaatgcctgactgctctgtggccctgccctttccatctatctccaaacaacatgcagagattgaaatcttagcctgggacaaggcacctatcctccgagactgtgggagccttaatggtactcaaatcctgagacctcctaaggttttgagccctggggtgagtcaccgtctgagggaccaggaattgattctctttgctgacttgctctgccagtaccatcgcctggatgtctctctgccctttgtctcccggggccctctgacagtagaagagacacccagagtacagggagaaactcaaccccagaggcttctgttggctgaggactcggaggaggaagtagattttctttctgaaaggcgtatggtaaaaaaatcaaggaccacatcttcctctgtgatagttccagagagtgatgaagaggggcattccccggtcctgggcggccttgggccgccttttgccttcaatttgaacagtgacacagatgtggaagaaggtcagcaaccacacagaggaggcctcctcagctgccagaagaggtgccactgtagaggc

SEQ ID NO: 269659 - DNA, 5478 bp, Artificial Sequence
  derived and/or modified sequence
atggaagacacccaggccatcgattgggacgtggaggaagaggaagagacggagcagtcaagcgagtcactgagatgcaatgtcgagcccgttggacggttgcacatcttttcaggagcacatggaccagagaaggactttcctttacatcttggcaagaatgttgtcggccgtatgcccgattgctcggtcgcgctgccgttcccaagcatttcgaagcaacatgccgaaatagagattctggcttgggacaaggctcctatcttgagggactgtggatctctgaatggtactcaaattctccgccccccgaaagtcctgagccccggtgtatcccaccgcctgcgagatcaggaactgatattatttgccgacctcttgtgccagtaccatagactggacgtcagcttaccttttgtctctaggggccccctgactgtagaagagacgccaagagttcagggtgaaacacagccacagcgtctgttgctggcggaagacagcgaggaggaagtggatttcctgagcgagcggcgaatggtgaaaaagtcacggactacaagttcttcagttatagtcccagagtctgatgaagaggggcatagtcctgtactaggtggactcggacccccttttgccttcaatttaaacagtgacaccgacgtcgaagagggtcagcagcctgcaactgaagaggcgagctcggcggcaaggagaggggccactgtagaggctaaacagtcagaggcggaagtggtgactgagattcagttggagaaggaccaacccttggttaaggagagagacaacgataccaaggttaagcgaggagctggcaacggtgtggtgcctgcaggcgtcatcttggaacggtctcagcccccaggtgaggactctgacactgatgtcgacgacgacagtcgccctcccgggcgacccgctgaggtccaccttgaacgggcccagccattcgggttcatcgattcagatactgatgcagaagaagagcggatacccgctacccctgttgttattcctatgaaaaagcgcaagattttccatggagtgggcacgagaggccccggcgcacctgggctggcacacctacaggagtcacaggcagggtcagacacggatgtagaggagggtaaggctcctcaggcagtgcccctggagaagagccaagcatctatggtgattaacagcgacactgatgacgaagaggaggtctcagccgcattgacactggctcacctcaaagagagtcagccagctatctggaatagagatgccgaggaggatatgccccagcgcgtggtcctgctccagcgctcccagaccacgaccgagcgtgattcggataccgacgtcgaggaagaggagctacctgttgaaaatcgcgaggccgttctgaaagaccacaccaaaataagggcgcttgttcgggcacactcagaaaaggaccagccccccttcggagacagcgacgactccgttgaggccgataaatcatcacccggaatccacctggagcggagccaggcctccactacggtagatatcaacacccaggtggaaaaagaggtccctcctggcagcgcaatcatccacattaaaaaacatcaggtcagcgttgaaggcacaaaccagacagacgtgaaggctgtcggtggccccgctaaactcctagttgtgagtttagaagaggcttggcccctccatggtgactgcgaaacagatgccgaagagggcacatctctcacagcttcagtcgtggctgatgtgaggaagagtcagttgcccgcagagggggatgctggagcagaatgggccgcagccgtcttgaaacaggagcgggctcatgaggtaggcgcccagggaggtcctcctgtcgcgcaggttgagcaagacctccccatcagcagggagaatcttactgacttagtcgtggacactgacactttaggcgagtctacccaaccacagagggagggcgctcaggttccaaccgggcgggaaagagagcaacatgtgggaggtaccaaggattctgaggataactacggggactctgaggatctcgatctccaggctacccagtgtttcttagagaatcaaggcttggaggctgtgcagagtatggaagacgagcccacacaagcattcatgctgaccccgccgcaggaactcgggcctagtcactgcagcttccagacaactggcttactaaactgtaagatgccgcctgctgaaaaggcttcacgcatcagagctgccgaaaaagtttccaggggtgatcaggaatctcctgacgcctgtcttccacctaccgtgccagaggcccccgcgcctcctcagaaacctttaaattcccaatctcagaaacatttggccccaccaccgcttctgagtcctctgctgccctcaatcaaacctacggttcgcaagactagacaggacggcagtcaggaagcaccagaagccccattgtctagtgaactggagccctttcatcccaagcccaaaatcaggactcgcaaatccagtaggatgacaccctttccagccacttccgccgcccccgaacctcatccttctacaagcaccgcgcagcctgtgactcctaagcctacctcacaggctaccaggtcgaggacgaaccggagcagcgttaaaacacccgagccagtggtgcccaccgcgcctgaattgcagcccagcacctctacagatcagcccgtcacttcggaacccaccagtcaagtcacccgcggtcggaagtcccggagctctgttaagaccccagagacagtggtcccaaccgctcttgagctacagccgtctacgtcaacagatcgccccgtcacatctgagcccacctcacaggccacacgaggacggaagaataggagtagcgtgaagacacccgagcccgttgtccccaccgcgcctgagctccagcccagcacatccacagaccaacccgtgactagcgagccgacgtatcaggccaccagagggcgcaagaaccgtagttccgtgaagacaccagagcccgtggttcccactgcacctgaactgcgcccctcgacttccactgataggcccgttaccccaaagcccacgagccggacaaccagaagtcgaacaaatatgtcttcagtcaagaccccggagactgtggtcccaactgcccccgaactccagattagcacatctaccgaccagccagttaccccaaagccaacaagtcggaccactagaagcaggaccaacatgtctagcgttaagaatccagagtccaccgtgccgattgcccccgaactgcccccatctacctctacggagcagcccgtgacacctgaacctactagccgcgctactcggggcagaaagaatcgatcaagcggcaaaacgcctgaaaccctggtgcctacagcccccaagctggagcctagtacatctactgaccagccggtcaccccagaacctacctcccaagccacgcgtgggagaaccaataggtcctccgtcaagacacctgaaactgtggtgcctaccgctcccgagctccagccatctacctctactgaccagcctgtaactccagagcctaccagtcaggccactaggggcaggactgatcgatcttcagtcaagacacctgaaacggtagtgcctacagcccccgagttgcaggcgtccgccagcacagatcagcctgtgacctcagagcctacaagtcgcactacccgcggccggaagaatcgttcctctgtcaaaactcccgagactgtcgtacccgccgcccccgaattacagccctctaccagcactgaccagccagtgacgcctgaaccaacttcacgtgccactcggggtcggaccaacaggagctctgttaaaacaccagagtccattgtgcctattgcccctgaactgcagcctagtaccagtcgcaaccagctggtgacccccgaaccaaccagtcgcgccaccagatgtcgcacaaaccgaagctctgtcaagacccctgagcccgtcgtgcctactgcccctgagcctcacccgacaacaagcacagatcagcccgtgacccctaaactgacttcaagggccactcgccgaaagacgaataggtcttccgtgaagactccaaagcctgtggaaccagctgcaagtgacctcgaaccatttactcccacggaccagtctgttactcctgaggccattgcccagggtggtcagtctaagactcttcgaagcagcacggtcagggctatgcctgtgccaaccacaccagagttccagagccctgtgactacggatcagcccatctcaccagaaccgattacgcagccctcctgtattaagaggcaaagggctgccgggaatcccggttcactggctgcgccaatagaccataagccgtgtagcgcacccctggagcccaaatcacaggcatcgcgtaaccagagatggggcgctgtcagggcagccgaaagtttgaccgccattccagagcctgcgagcccacagctgctagaaacgcccatccatgcttctcagatccagaaagttgaaccagcaggccggagccgctttactccggaactccagccaaaggcctcccagagcaggaagcggagtcttgcaaccatggactctcctccccatcaaaagcagccgcagaggggagaagtatcacaaaaaaccgtcattatcaaggaagaagaggaggacacggcagagaaacccgggaaggaggaagacgtggttaccccaaagccagggaagcggaaaagggaccaggctgaggaagagccaaaccgaattcctagtagaagcctccgccggacaaaactgaatcaggaatccactgcccctaaggtgcttttcaccggagtagtggacgctaggggggagagagcagtattggcccttggtggttcactggccggcagtgcagccgaagcctctcacttggtcaccgataggatcaggcgaactgtcaagttcctttgcgctcttggccggggcattccaatcctatcccttgattggctccatcagtctcgaaaggccggcttttttctccctcctgacgagtacgtggtgaccgacccagaacaggagaaaaattttggtttctccctgcaggatgccctgagccgggcccgtgagcgccgtctgctggagggatatgagatatatgtgacacccggagtccagcccccgcctccacagatgggcgagattatcagttgctgcggcggaacttacctgccttctatgccaagatcttataagccacagagagtggtgattacctgtcctcaagactttcctcattgttccatcccattgcgggtggggcttcctctcttgagccctgaattccttctgactggcgtgctcaaacaggaggccaagcccgaggcctttgtcctgtcccctcttgagatgagctctacgtag

SEQ ID NO: 269660 - DNA, 4968 bp, Artificial Sequence
  derived and/or modified sequence
atgtatcatagactcgatgtgagtcttccctttgtctcaaggggaccgttaaccgtagaggagacccctcgagttcagggggagacacaaccccagcgtctgctcttggcagaggacagcgaggaggaggtggactttttgtcggaacgtaggatggtgaagaagagcagaacaacatcatctagcgtcattgtccctgaaagcgatgaggagggccattcacctgtgttaggcggcttgggtccacccttcgctttcaaccttaacagcgacacagatgttgaagagggacaacaaccagcaacggaagaggcgtcttccgcggcacggcgaggagccacggttgaggcaaagcagtccgaagccgaagtcgttactgagattcagctggaaaaagaccagcccttggttaaggagcgagataatgataccaaagtcaaaagaggcgccgggaatggggtggttccggcgggagttattctcgaaagatctcagccacctggggaagattccgatactgacgtggatgatgatagtcgtccaccaggtcgtccggccgaagtgcaccttgagcgcgcacaaccttttggtttcatcgacagcgacaccgatgccgaggaggaaagaatccccgctactcccgtggtgattcctatgaaaaagagaaagatttttcacggcgttggcacccgcgggccgggggcaccaggactggctcatctgcaggagtcgcaggccggttctgatacggacgtggaagaaggaaaggcgccacaggccgttccccttgaaaagtctcaggcatccatggtgatcaattccgataccgatgacgaggaagaggttagtgctgctctgacgcttgcacaccttaaagagagccagccagcaatttggaaccgggatgctgaggaggatatgccccagagggtggttcttttgcaacgatcacagacgacaacggagagagactctgacaccgacgtcgaagaggaggaactccccgtcgagaatcgggaagccgtgctgaaagaccacactaaaatacgcgctctggtgagagcccactctgaaaaggaccaacccccattcggggactctgacgatagcgttgaggccgacaaaagttcccccggcattcatctggaacgctctcaggcaagtaccaccgtggacatcaacacgcaggtcgaaaaagaggtacctccaggatctgcaattatacatatcaaaaagcaccaggtttcggtcgagggcaccaaccagacggacgtgaaggcagttggggggcccgctaagctccttgtggtatcactggaagaagcttggccgcttcatggcgactgcgagacagacgctgaggaagggacatctctgactgcatctgtggtcgctgatgtgcgaaagagccaactccctgctgagggagacgccggtgctgaatgggccgctgccgtgctgaaacaggagagagcccacgaagtgggcgcccaaggcggccctcccgtagcccaggttgaacaggacctgcccatctcaagagaaaacctgacggaccttgtggtggacaccgatactctgggggaatcaactcagccgcagagagagggcgctcaggtgcctactggcagggaacgagagcagcatgtaggggggactaaggatagcgaggataactacggcgattctgaagacttggatctccaggccacgcaatgttttttagaaaatcaggggctggaagtgcagtctatggaagatgaaccaacccaggctttcatgctgacaccaccacaagagcttggcccaagtcattgctccttccagaccaccggactgctgaattgcaagatgccccccgcggagaaagcctcacgaattcgtgcggctgaaaaagtgtctcgcggggaccaagagagtccagacgcttgtctgcctccaaccgtgcccgaggctccagccccccctcagaagcctctgaactcccaaagccagaagcacctggctcccccccctttgctgtcccccctcctacccagcatcaaacctaccgttcggaagacccgccaggacggcagccaggaggcaccagaagcacctctgtcttctgaactcgaaccattccatcccaaacctaagataaggactcgcaaatcgtcgaggatgaccccgtttccagctacatctgctgctcctgagcctcacccctccacttcgaccgcgcagcccgtcactcccaaacctactagccaggcgacaagatcgcgcactaaccgcagctcggtgaagacaccagaaccagtggtacctaccgcacctgaattgcagccctctacgtctactgaccagcccgtgaccagtgagcctacttctcaggttacccggggaaggaagagtcgcagtagcgtcaaaacacctgaaacggtggtacctacggccctggaactccaaccaagtacctccaccgatcgacccgtgacctccgaacccacgtcgcaggccaccagaggtcggaaaaatagatcttcggttaagactccagagcccgtcgttccaaccgcccctgaactgcaaccaagcacctccaccgatcagcccgttacaagtgaacctacttaccaagctacccgaggacgaaaaaataggtctagtgttaagacacccgaacctgtggtccctacagcccccgagctgagaccttctacatctaccgatcgccctgtaactccaaagccaacgtcaagaacaacccgctcgcgcacaaacatgagtagtgttaagaatcctgagtccaccgtccctatagctcccgaactgcctcctagcacctcaacagaacaacctgttaccccggagccaacatctcgcgccacccggggccgcaagaaccgcagctccgggaagactcccgagactctggtccccactgcccctaaactggaaccatcaaccagtactgatcagcccgtaacacccgaacccacgagccaggctactcgcgggcggaccaaccggtccagcgtcaagaccccagagaccgtggtcccaacagctccagaactgcagccttcaaccagcaccgatcaacctgtgacccctgaaccaacctcacaggctaccagagggcgcaccgatcgatccagtgtgaagacacccgagaccgtagtgcccaccgccccagagttgcaggcaagtgcttctacagatcagccagtgacaagcgagcccaccagccgaacaacaagggggagaaagaaccgatcttccgtgaaaactcctgagactgtggtcccagcagctcccgagttgcagccctccacatcaacagaccagcctgtgacccccgaacctaccagtcgtgcgactcgaggaaggaccaatcggagctccgtcaagacgcccgaaagcattgtcccaatcgctcccgagctgcaaccctctacaagtcggaatcagcttgtcacacctgagcctacttcacgcgccacccgctgtcgcaccaaccgttcgagcgtgaaaactccggagcctgtagtgcccacagccccagagcctcatccaacaacttcgaccgatcagcctgtgacccccaagctcacctccagggctactcggagaaaaaccaaccggtcctctgtaaaaacccccaagcccgttgagcctgcagccagcgacttggagccattcactcctacggaccagtcagtgacaccggaggcaatcgcccaaggcggtcagagtaagacactgaggagttctactgtgagagccatgccggtgcctacaacccctgagtttcaatccccggtcaccacagaccaaccaatatctcccgaacccattacacaaccgagctgtattaagcgccaaagagcagcagggaatccaggtagcctcgctgctccaattgaccataaaccttgcagtgcacctctcgaaccaaagtcacaggcatccagaaatcagaggtggggcgccgtgcgagctgctgagtctctgactgctataccagagccagccagcccacagctgctcgagactcccatacatgctagtcagattcaaaaggtcgaaccggcaggtaggagccggtttacaccagagctgcagcctaaagcttcacagagtcgcaagcgcagcctggccacaatggatagcccacctcatcagaagcaaccgcaacgcggggaagtgtcccagaaaacggtgataattaaggaggaagaggaggatactgcagagaagcctggaaaggaggaggatgtcgttactccaaaacccggtaaacggaaacgcgaccaagccgaggaggagcctaacaggatccctagtagatctctcaggcgaacaaagctgaatcaggagtcaaccgcacccaaagtgctcttcaccggtgtggtagatgctcgaggcgagcgtgcagtgctggcactgggaggatcacttgccggctccgcagctgaagctagccatttggtgaccgatcgtatcagacgtaccgttaaatttctgtgtgcactcggccgcgggattcccatcttgagcttggattggctgcatcagtcccgtaaggcaggttttttcctgcctcctgacgaatatgtggtaaccgatcccgaacaggaaaagaacttcggcttctcactgcaggatgccctgagcagggctcgggaaaggcggcttctggaggggtatgagatctacgtgaccccaggcgtgcagcctcctccaccacagatgggcgagatcatcagttgttgcgggggcacctatcttccaagtatgccacgcagttataaaccccagagggtggtcatcacctgccctcaagacttcccacattgttccatacctcttcgggtgggcctcccccttcttagccctgagtttttacttaccggggtgctgaaacaggaggcgaagcccgaggcatttgtgctgtcaccactcgagatgtcttctacttag

SEQ ID NO: 269661 - DNA, 5478 bp, Artificial Sequence
  derived and/or modified sequence
atggaggatacacaggccatcgactgggatgtagaggaagaagaggagacggagcagtcttcagagagtctacgatgcaacgtggaacccgtggggagactgcacattttctccggtgctcacggcccagaaaaagattttccccttcacctgggaaagaacgtggtggggcggatgcccgactgctccgtcgctctgcctttccctagcatttctaagcagcacgccgagatcgaaatcctggcatgggacaaagcccccattctgagagactgcggttcacttaacggaacacaaatacttagacctcctaaagtgctctcccccggcgtgtcccacaggctccgggaccaagagctgattctgttcgctgacctcctttgtcaataccataggttggacgtgtcccttccctttgtcagtcgggggccgctcaccgttgaagagactcctcgggtgcagggagagacacagccccagcggttgctgctcgctgaggactccgaggaagaggtggactttctatcagagcggagaatggttaaaaaaagtcggaccacctcgtcctccgttattgtcccagagagcgatgaagaaggacactcccccgtcttaggaggcctcggcccgccattcgctttcaatcttaactctgacactgatgttgaagagggccagcagcccgcgactgaggaggctagtagcgccgctagacgcggagccactgtggaagcgaagcagagcgaagccgaagtggtaactgaaatacagctcgaaaaggaccaaccccttgtgaaagaaagagacaatgatactaaggtaaagaggggagccgggaacggtgtcgtccccgccggagtaatcctggaaaggtctcagcctcccggagaagacagcgacactgacgttgacgatgatagccggcccccagggcgcccagccgaagtgcacctcgagagagcccagccttttggtttcatcgattctgacaccgatgccgaggaggagaggatacctgctacccctgtggttatccccatgaagaagagaaaaatcttccacggtgtggggacaaggggtccaggcgcacccggcctcgcccatctgcaagagagccaggcaggctccgacaccgatgtcgaggagggaaaagcaccccaggccgtccctctggaaaaatctcaagcctcaatggtgataaattccgataccgatgatgaggaggaggtgtctgcagccttaaccctcgcccacctcaaggagagccagcccgctatatggaatcgggacgcggaagaagacatgccacaacgagtcgtcctgctgcaaaggtctcaaaccactacggagcgcgattccgatactgatgttgaagaagaggaactgcccgtcgaaaatagagaagccgtgttgaaggaccacacgaagatccgggctttggtgagagcgcactccgagaaggatcagccgccattcggggactctgatgatagcgttgaggcagacaaatcgagtcccggtatacacctcgaaagatctcaggcctcaactactgtggacattaatacccaggtggagaaagaagtaccccctggaagcgctattatccatatcaagaagcaccaagttagcgtggaggggaccaaccaaacggatgtcaaagctgttgggggtcccgcaaaactgctcgtggtcagtcttgaagaggcctggcccttgcatggtgactgtgaaaccgatgccgaggaaggtacgtccctgactgcgtctgttgtggccgacgttcgcaagagtcagctgcctgccgagggagacgctggagccgagtgggcagccgcagttctcaaacaagaacgggcccatgaggtgggagctcagggtgggccccctgtggctcaggtggagcaggatttgcctatttcacgtgagaatctgaccgatctggtggtagataccgacactctaggggagagcacccagccgcagcgggagggtgcccaggtcccaacaggacgcgagcgtgagcagcacgtcgggggcaccaaggactctgaagacaactacggtgactccgaagatttggatctgcaggcaacccagtgctttctggaaaatcagggcctggaggctgttcagtcaatggaggatgaaccaacacaggctttcatgttgactcctcctcaggagttaggtcccagtcattgctctttccaaaccactggcctgttgaattgcaagatgcctcctgctgagaaggcatcccgcatacgggcggctgagaaagtttcacggggggaccaagaatcacctgacgcctgtctccccccaaccgttcccgaggctccagctcctccccagaaacccttgaattctcagtcccaaaagcacctggcgccacccccactactgtcacctctactcccgtccataaaacctacggtgaggaagactcggcaggacggaagtcaggaggccccagaagcccccttgagtagcgaattggaaccgttccatcccaagcctaagattcgaactcggaagtcgagtaggatgaccccatttccagcaacatctgccgccccagagccccacccatcgacctcgacagcccagcctgtcacccccaagcccacatcccaggcgactcggtcaaggaccaaccgatccagtgtcaagaccccagagcccgttgtgcctaccgctccggagcttcagccctccacttcaaccgatcagcctgtgacctctgagcccacatcgcaagttacgagaggcagaaagagtcggtcttccgttaagaccccggagaccgttgtccctacagctttggagcttcaaccctcaacttccactgatagaccggtaaccagcgaaccgaccagccaggcaacacgaggtagaaagaacaggtctagcgtgaagacacccgagcccgtagtacccacagcccccgagctgcagccctctacgagtaccgatcagccagtgacctccgagcctacctatcaagcaactaggggtcgcaagaatcgatcctccgtcaaaaccccagaaccagtcgttcctactgccccggagctccggcccagtactagcacagatcggcccgttactccgaagcctacctcacgtacaacacggtcccgcaccaatatgtcttcggtgaaaaccccagaaaccgtggtgcccaccgctcctgagctgcagataagcaccagcactgatcaaccagtgacgccgaaacctacttctcgcacaacacgatcccggacaaacatgtcctcggtcaaaaatcccgagtccactgtgccaattgcaccggaactcccacctagtacaagcaccgagcagccagtcactccagaaccaactagccgggccaccaggggtagaaaaaatcggtcctctgggaaaactccagaaaccctggtgcccacagctcctaagcttgagccctctaccagcacagatcagccagtgacccccgaacccacttctcaggctacacgggggaggacgaacaggtccagtgtaaaaactcccgaaaccgtggtgccaacagcccctgagctgcagccgtcaacatctacggaccagcccgtcacccctgaacctacctcccaggccacacgcggacggaccgacagatcgtcggttaaaactccggagaccgtcgtgcccaccgctcccgaactgcaggctagcgcctctaccgatcagcctgtgacgagcgaaccaacttctcggactacacggggtagaaaaaacagatcgagcgtgaaaactcccgaaacagtcgtgcctgcggcaccagagctccagccatcaacctccacggatcaacctgtcactccagagcctaccagtcgcgcaacacgcggacgaactaatcgaagtagcgtgaaaacaccagagagtattgtgcccatcgcacccgaattgcagccctcgacgtctcgcaaccagctggtcacaccggagccaacctcaagagccacccgctgcagaactaatcgttctagtgtgaagacgcctgagcccgtcgtgcctaccgctcctgagccccaccctacaacatccaccgaccagcctgtcactccaaagctgactagtcgggctaccagaaggaagacaaaccgaagttccgtgaagacgcccaaacctgtcgagcccgctgcctcggacctggagccatttacaccaacggaccagtcagtgacacctgaggccatagctcagggaggacaaagtaagacactcagaagctcaactgtgcgcgccatgcccgtgcctactactcccgaattccagtcacctgtgacgaccgatcagcccatcagccccgagcccatcacgcaacccagctgcataaaacgccagcgggcagccggaaatccaggaagcctggccgcccctattgaccacaagccatgttccgccccccttgagcccaagagccaggcttcgcgtaatcagcgctggggcgcagtgcgggccgccgagtcgttgactgctattcctgagcccgcatctccgcagctcctggagactcctattcatgcatcccaaattcagaaagttgagcctgccggccgcagccgattcactccagagctgcagcctaaggccagccagagccggaaacgcagtctggcaactatggatagtccaccacaccaaaaacagccgcagcgtggcgaggtgagccagaaaaccgtcatcattaaagaggaggaggaggacacagccgaaaaacctggcaaggaagaggacgtcgtgacaccaaagccaggcaaacgtaagcgcgaccaggccgaggaagagccaaataggattccgtctcgttccctcagacgcactaaactgaatcaggagagtactgcccctaaagtgcttttcacgggcgtcgtggatgcacgtggtgagagagcagtactcgcactgggcggcagccttgctggcagcgcagctgaagcctcccacctggtgactgatagaattcgccgcaccgtgaaatttctatgcgccctagggcgaggcataccaatactgagcttggactggctacatcaatcgcgtaaagccggtttctttctgccgccggatgaatacgtggtgacggatcccgagcaggaaaagaatttcgggttctcgctgcaagacgctctgtctcgggcccgtgaacgtcggctcctagagggatatgagatttacgtcactcccggtgtgcaacccccgccccctcagatgggcgaaatcatctcctgttgtggtggaacttatttgccgtcaatgcccaggtcttataagcctcagagagtagtgataacatgcccccaggactttccccattgttcaataccccttcgcgtcgggttacccttactgtccccggagttcctactgaccggggtattgaagcaggaggcaaaacccgaggcgtttgtcctgagccctctagagatgagcagcacttag

SEQ ID NO: 269662 - DNA, 5478 bp, Artificial Sequence
  derived and/or modified sequence
atggaggatactcaggcaattgactgggacgtggaggaggaggaggagaccgaacagtcttccgaatccttaagatgcaatgttgaaccagttggcaggctgcacattttttcaggggcccacggaccagagaaagactttcctttacatctgggaaaaaacgtggtaggacgaatgcctgattgcagcgtggctctgccatttccttctatatccaagcaacatgcagaaattgaaatactggcctgggacaaggcccccatactcagggactgtggctctctaaatggtacccagatactgaggccacccaaagtgctctcacccggggttagccacagattgcgcgatcaagagcttatcctgtttgccgatctgctgtgccagtaccatcgcctggacgtgtccctgccattcgtgagtagaggaccactgacagtggaggaaactccccgcgtccagggagaaacccagccacagcgtttgctgctcgctgaagattctgaggaggaagttgactttctatcagagcggaggatggtcaagaagagccgcaccacttccagctccgtgatagtgccagaaagcgatgaagaaggccactctcctgtactcggtggcttgggccctcctttcgccttcaacctcaattccgacacagatgtggaggagggtcaacagccagctactgaagaagcctcctcagcagctcgacggggtgccactgtcgaggccaagcagtcagaggcagaggtcgtcactgaaatacaactggagaaagaccagcccctggtcaaagagcgcgacaatgatacaaaggtgaagcgcggggctggcaacggggtggtccctgccggggtgatactagagagaagccagccgccgggcgaagatagcgataccgacgtggatgatgactcgaggccacctggaaggcctgccgaggttcaccttgagagggcacagccatttggctttatagactcagatactgacgccgaagaggagcgaattcccgcaacccctgttgtaatacctatgaagaagcggaaaatttttcacggagtcggtactagagggcccggtgcacctgggctggcccatctgcaggagagccaggcgggcagcgatactgacgtagaagagggtaaagccccgcaggccgtgcctctcgagaagtcacaggcttccatggtgataaactccgatactgacgacgaggaggaggtgagtgctgcattgacgctcgcgcatttgaaggagagccagccggctatatggaaccgggatgcggaagaggatatgccacagcgtgttgttttactgcaaaggagtcaaaccactaccgagcgggattccgacaccgacgtagaggaagaggagctgccagttgagaacagggaggcagtcctgaaggatcataccaagatccgggcgctggtccgggcacatagcgaaaaggatcagccccctttcggagactctgacgactcagtcgaagcggataaaagttccccgggaatacacttagagcggtctcaagctagcaccactgtggatattaacacacaggtagagaaggaggttccgccaggctctgccataatacacatcaagaagcaccaggtgagcgtcgaggggactaatcaaacagacgtaaaggccgtgggcgggcccgcaaaactcctggtggtatccctcgaggaagcttggccactgcacggagactgcgaaactgacgcggaggagggcacgtctctcacagccagcgttgtcgcagacgtccggaagtcgcaattgccagccgagggcgacgccggagccgaatgggcagcagctgtgctgaaacaggaacgcgcccatgaagtaggggcgcagggaggtccaccagttgcccaggttgaacaggatttgccaatctctcgcgagaatctcaccgacctggtcgtggacactgatacactgggtgaatcgactcagccccagcgagaaggtgcacaggtgcccaccggccgcgaacgcgagcagcatgtgggaggcactaaggactctgaggacaactatggtgattccgaggacctggatttacaggccacccaatgcttccttgagaaccagggtctggaggcggtacagtccatggaggatgagcctacgcaagcctttatgctgactcctccccaggagctagggccatctcattgctccttccagactacaggcttacttaattgtaagatgccacccgccgaaaaagccagcagaattcgcgccgccgagaaggtttctaggggtgatcaggaaagcccagatgcttgtctgccgccaactgtccctgaggccccagcccccccccagaaacccctcaattcccagtctcagaaacacctggccccccctcccttgctctctccgctcttaccctcaataaaacccactgttcggaagacaaggcaagacgggagccaggaagcacccgaagcaccactatcatcggaactcgaaccattccatcctaaaccaaagatcaggactcgcaagagctcacgcatgacaccattccccgccactagcgctgctcctgagccccatccttcgacgtcaactgcacaacctgtcactccaaagccaacttcacaggctactcggtcccggaccaacagaagcagcgtgaagacgccggagcccgttgttccgaccgccccagaactccagccctcaacttcaacggatcagcccgtcacatcggaacccacgtctcaggtcactaggggccgcaagagcagatccagtgttaagacgcccgagactgtggtgccaactgctttggagctccagccttctacttctactgaccggcctgtcacatcagagccaacctcacaggccacccgggggcgcaaaaataggtcctccgtaaaaactccggagcctgttgtgcctactgctcccgagctgcagccatccactagtaccgaccagccggtgaccagcgagcctacttatcaagctactcgggggcgcaagaatcgctcaagcgtgaagactcctgagcccgtggttcctacggctcccgaactgcggccgtctaccagcacggaccgcccagttacaccaaagccaacatctaggaccactaggtccagaaccaacatgtccagcgtgaagacgccagagaccgtggtccctaccgctcctgagctgcagatttccacctcgaccgatcagcccgttactcctaagcctaccagcagaacaaccagatcaagaaccaatatgagctccgtgaaaaatccggagtctaccgtgcccatagccccagagttaccaccatcaacaagcacagaacagcctgttacgcctgagccaacttcccgagctacccgtggccgaaaaaataggagctccgggaagacacccgagacactcgtccccacggccccaaagctcgagcctagtaccagtactgatcaaccagtcacacctgaacctacatcacaagccaccagggggagaaccaacagatctagtgtcaagacccctgagacagtagtgcccactgcaccagagctgcagcccagtacatccacagatcagcctgtgacccctgaaccgacatcccaggctacccgggggagaaccgaccggagttccgtaaagactccagagacagtcgttccaacggcccctgagctgcaggcctccgcctccaccgaccagcctgtgacttctgagccgacctcgcggactacccgcgggaggaagaatagaagcagcgtcaagactccagaaactgtggtgcctgcagcccccgaactacaaccatcgacttctacagaccagcccgtcaccccagaaccgacatcccgagccactagaggacggacaaataggtcatccgtgaagaccccggagtcgattgtaccaatcgcccctgaacttcagccgagcacaagcaggaaccagctggtgactccagagcctacttccagagcgacccggtgccgaactaacagatcaagcgtgaaaactcctgagcctgtcgtcccaactgcacccgagccacaccccaccaccagcacagaccagcccgttactcctaaactgacatccagagctactcggaggaaaacgaatcggagttctgttaaaactcctaaacctgtggaaccggccgctagcgacctggagcctttcacccctacagaccagagcgtaacaccagaggcaattgcccaaggcggacagagcaagacactgaggagctctaccgtgagagctatgcccgtgcctaccacccctgaatttcagtcccctgtgactacagaccagcctatatcacccgagcctataactcagcctagctgcatcaaaaggcagagggcagccggaaatccaggttcattagccgcccccattgatcacaagccttgtagcgcaccactggaacctaaatcacaagcttctcgaaaccagcggtggggcgcggttcgggccgcagaatcactcaccgccattcccgaacccgccagccctcagctgctggagacgcccattcacgcctcacagattcagaaagtcgagcccgcagggcggtctcggttcacccccgagctccagcccaaggcttcgcaatcacggaaacggagtcttgccactatggactcacccccgcatcagaagcagccacagcggggggaggtatctcagaaaacagtgatcattaaggaggaagaagaggacactgcagagaaaccaggtaaggaggaggatgttgttaccccaaagcctgggaaacgcaaaagggaccaggctgaagaggagcctaacaggatcccatccagatccctccggcggaccaagctgaaccaggagtctactgcaccaaaggtgctttttacaggggtggtcgatgcccgcggcgaacgagctgtcctcgcactagggggcagtttggcagggtctgctgctgaggcatctcatctagtgacggaccggatccggcggacggtcaaatttttgtgcgccctgggccggggaatccctatcctctcactcgattggttgcaccaatcacgcaaggcgggcttcttcctgccacctgacgagtatgttgttacagaccctgaacaggaaaagaacttcggctttagtttacaggatgcccttagtcgggctagagaacgtaggctgcttgaggggtacgagatatatgttactccaggagttcagccaccccccccacagatgggggagatcataagttgctgcggtggcacttacctgcctagtatgccccggagctacaagcctcaaagagtagtgataacctgccctcaggacttcccacattgttctatccctctgcgcgtcggactgcccctcctgtcccccgagtttctactgacaggcgtgctgaagcaagaggccaagcctgaagcattcgtcctcagtccactggaaatgtcttctacttag

SEQ ID NO: 269663 - DNA, 4968 bp, Artificial Sequence
  derived and/or modified sequence
atgtatcatcgactggacgtgagcctgccgttcgtgtcacggggacctttgacagtggaagagacacctcgtgtgcagggtgagacccagcctcaacgactcctgctggccgaggactcagaggaagaagtggacttcctttccgagagaaggatggtaaaaaaatcgcgcactaccagctcatcagtcatcgttcctgaatccgatgaggaggggcatagtccggtgcttggagggttggggccccctttcgccttcaacctgaactctgacaccgatgtggaggaagggcagcagcccgctacagaggaggccagctctgcggcaaggcggggagctacagtcgaagccaagcagtccgaggcagaagtggtcacggagatccagctggagaaggatcagccactcgtgaaggaacgagacaatgatacaaaggtcaaaaggggcgctggaaacggggtggtccccgctggtgtgatactggagcgttcgcagccccccggcgaagactcagacacagatgtcgacgatgattctcggcctccaggtagaccggcagaagttcatctggaacgcgcgcagcctttcggttttatcgacagtgacacagacgcggaggaagagaggatcccagctactcctgtggttatacccatgaagaagagaaaaatcttccacggcgtgggaactcgagggcctggcgccccaggcctggcccatctgcaggagtctcaagctgggtctgacaccgatgtggaggaagggaaggctccacaagcagtgcccttggagaaaagtcaggcaagcatggtgataaactccgacactgacgacgaggaagaagtgtcagctgctttaactctcgctcatctgaaggagagccaacctgctatctggaacagggatgctgaggaggatatgccccagcgcgttgtgcttctgcagcgtagtcagacaacgacagaacgcgactctgacaccgacgttgaggaggaggagctgccagttgagaaccgcgaggccgtgctgaaggatcatactaaaattagggcgctggtgagagcacactctgaaaaggatcagccaccatttggcgacagcgacgactccgtcgaggccgataagagctccccagggatacacctagagagatcacaagcatcaactaccgtggatattaacactcaggtggagaaagaagtgccccctgggtccgccatcatccatataaaaaaacatcaagtctcagtggaaggcaccaaccaaacggacgtaaaggcagtgggtgggcctgcgaaattattggtggtcagcttggaagaagcctggccgctgcacggagactgcgaaaccgacgccgaggagggtaccagtttaacagctagcgttgtggctgatgtgcgaaagagccagctgcctgccgaaggcgatgccggggcggaatgggcggcagctgtcttaaaacaagagcgggcccatgaagtcggtgctcaagggggtcccccagttgcgcaggtagaacaagaccttcccatttcccgtgaaaacctcacggatctggtagtggacacagatacattaggagaaagtacccagcctcagcgagagggagcccaagtgcccaccggacgcgagcgtgagcagcacgtgggcggtaccaaagacagcgaggataattatggggactcagaagacttagacctgcaggctactcaatgctttctggagaaccaggggctcgaagtgcagtccatggaggacgagccaacacaagcttttatgctcacaccccctcaggaacttgggcctagccattgtagcttccagactacaggactgttgaattgcaagatgcccccggccgagaaggcctcgcgaatccgtgctgccgaaaaagtttcacgtggagaccaagaaagccccgacgcctgtcttccaccaacagttcctgaagctcctgcaccacctcagaagcccctgaattctcagtctcagaaacatctggcccccccacccctgttgtcccctctgctgcccagcattaaacccactgtaagaaagactcgccaggacggatcccaggaagctccagaagcccccctgagctccgaactggagccattccatcccaagcccaaaattcgtacaagaaagagtagtaggatgacacccttccccgctacatctgccgctcccgagccccacccaagcacttccactgcacagcctgtgactccgaagcctacatcccaggctactcgctctaggaccaaccgaagtagcgtgaagacccccgaaccagtcgtgcctacagctcccgagctgcaacccagcacgtccacagaccaacctgttacttcagaacctactagccaggtcaccagagggcggaagtcccgctcttcggtgaaaactcctgaaactgttgtgccaacggctttggagttacaaccctctactagtacagatagaccagtgacttctgaacccacgtcccaagctacaaggggccggaagaacaggagcagcgtgaaaacaccagaacctgtggtgcccaccgcgcctgagctgcaaccgtccacaagcactgaccaacccgtgactagcgaacctacataccaagctacacggggacgaaaaaatagatctagtgttaaaacccccgagcctgtcgtgccaaccgctccagagttgcgccccagtacgtctactgaccggcctgttacccccaagccaacctcaagaaccactagaagcagaacaaacatgagtagtgtgaaaaatcctgagtcaactgtccctatagcccccgagctgccaccaagcacttccacagagcagcctgtcacgccagagccaacatcccgcgctactagggggagaaagaatagatcatcgggtaagacccctgaaactttggtacccacagcaccaaaactggagcctagcacttctacggaccagcccgtgactccagagcctacatcacaagccaccaggggaaggaccaaccgaagtagcgttaaaacacccgaaaccgtagtccccacagcccccgaactccagccttccacctccaccgatcagcctgtaacgcctgagcctacctctcaggccaccagaggccggactgatcgctcatctgtaaagacaccggaaaccgtggtgcccacagccccggagctgcaggcgtcggccagcactgatcagcctgtcacctcagagccaacttccaggacgactcggggcaggaaaaaccgctcctcggtaaagacaccagagactgtggtgcccgcagctcccgaactgcagccaagcacaagcaccgatcagcctgttacaccggagcccacaagccgggctactaggggccgcaccaatcggtcttccgtaaagacgccagagagcatagtgcctattgcaccggaactccaacctagcacatcacggaatcagctcgtgacaccggaaccaacctcaagagccacaaggtgccgtacaaaccgcagcagtgttaaaaccccggaacctgtcgtgcccactgctcccgaaccgcacccaactaccagcactgaccagcccgtaactcccaaactgactagcagggccacaagacgaaaaactaacagatcaagtgtaaaaacccctaagccagtagagcccgcagccagcgacctcgaaccatttacaccaacagaccaatccgtcacaccagaggccatagcccagggcggacaaagtaagacacttagatcgagcactgtgcgtgcaatgccggttccgacaactcccgagttccaatcaccagtgaccactgaccaaccgattagcccagaaccaatcactcagccatcctgtatcaagcgacagcgtgcggccggcaacccaggctctctggccgcaccgatagatcataagccatgctctgcaccgctggagccaaagtcccaagctagccgaaaccaaagatggggcgccgtccgcgctgccgaatcccttacagcgatacccgaacccgccagccctcagctgctcgagacacctattcacgcttctcagatccagaaagtcgaacccgcagggagatccagattcacgccagaactgcagccaaaagcttcccagagtcggaagcgaagtcttgctaccatggactcaccccctcatcagaaacagccacaaagaggcgaagtcagtcagaaaactgtgattatcaaagaggaagaagaggatacggctgagaaaccaggcaaggaggaagatgtcgtgacacccaagcccggtaagaggaaaagggatcaggctgaggaggaaccaaatagaattcctagccggtcactgcggagaaccaagttaaaccaggaatccacagcccctaaggtgctctttaccggtgtagtggatgcacggggagagagggcagtgctggctctgggagggtcattggctggatctgctgcagaggcaagtcacctggtcactgatagaattaggaggaccgttaagtttctctgcgccctaggaaggggcattccgatcctctccctggactggctgcaccaatctaggaaggctgggttcttccttccaccagacgagtatgtcgtgacagatccggaacaggaaaagaacttcggattttcgcttcaggacgcgctaagcagagctcgggaaaggcgactccttgaggggtacgaaatttatgtgacgcctggagtgcagccaccgccccctcagatgggcgaaatcatctcgtgctgtggcggtacgtacctcccatccatgcctcgcagttacaagccacaaagggttgtgattacttgcccacaggattttccgcactgctcaatacctctgcgtgtcggtctacccttactctcccccgagttcctactgacaggcgttttgaaacaggaggctaagccggaggcgttcgttctgtcaccactggagatgagcagcacctag

SEQ ID NO: 269664 - DNA, 4968 bp, Artificial Sequence
  derived and/or modified sequence
atgtaccatcgactggacgtatcattaccatttgtcagcaggggccccctcactgtggaggagactcctcgggtacagggcgagacacaacctcaacggctcttactggcggaggattccgaggaggaggtggatttcctttcagaacggaggatggtcaaaaaatccaggactacaagctctagtgtaatagtgcccgaatcagatgaggagggacactcgcccgtgttaggaggtttggggcctccatttgcgttcaatctgaactccgacactgatgtcgaagaaggccagcagcccgctacagaagaagcgagttcagctgctcggaggggagcaaccgttgaggccaagcaatcggaagcggaagtcgtgacggagattcaacttgaaaaggaccagccccttgtgaaggaaagagacaacgatactaaggtaaagcgtggcgcaggaaatggcgttgtgcccgctggggtaatattggagcgttctcagcctcctggagaagacagcgacacagacgtggatgatgacagtcgtccacccgggcgccccgccgaggtgcacctcgaaagagcacagccttttggcttcatagatagcgatacagatgctgaggaggagcgcattccagccactccggtggttataccaatgaagaagcgcaagattttccacggagtcggcacccgtggacccggggcccccggcctcgcccatctgcaggagtcacaggctggctctgataccgatgtggaggaaggaaaagccccccaggcagtccccctggagaagagccaggctagcatggtcattaatagtgataccgatgacgaagaggaagtctctgccgctctgacattggctcatctgaaggagtcacagcccgcgatctggaacagggacgccgaggaggatatgccccagcgagtagtccttctgcagagaagtcaaactaccactgaaagggacagcgataccgatgtcgaggaagaagagctaccagtcgagaatcgggaggctgttcttaaggaccatacaaagattcgggccctcgtgcgggcccattcagagaaggatcaacctccgttcggcgattcggatgactccgtggaggcagacaaaagcagtcctggaattcacctcgagaggtcacaagccagcaccactgttgatatcaatactcaagtggagaaagaggtgccgcccggctcagctataatccatatcaaaaaacatcaggtatcagtggaaggaactaatcagacagatgttaaggcggtgggtgggcctgctaagttacttgtggttagcctggaggaggcttggccactccacggcgattgcgaaacagatgcagaggagggcactagcttaacggcttctgtagtagccgacgtgagaaagagtcagttgccggcagaaggggatgccggagctgagtgggctgccgctgtcctgaagcaggagcgagcccacgaggtgggggcacagggcgggccacctgtcgcccaagtggaacaggacctgcccatttcacgggagaacctgactgatctggtcgtagacaccgatactctgggtgagagcactcagcctcagcgcgaaggggcccaggtgcctaccggcagagagcgagagcagcatgtgggaggtacgaaagattcagaagacaactatggcgatagtgaagacctggatcttcaagcaacgcaatgtttcctggaaaaccaggggctggaggtgcaatccatggaggacgagccaacacaggcgttcatgctgacgcccccgcaggagctcggcccaagtcattgtagctttcaaacgactgggttactcaactgcaagatgccccccgcagagaaagcatctcggatccgcgctgctgaaaaggtgtctcggggagaccaagaatctcccgacgcttgcctcccccccactgtccctgaagctcccgcgcccccgcagaaacccttaaactctcaaagccagaagcacttggcaccaccacctctactttcacccttactaccctcgattaaaccaaccgtccggaaaaccaggcaggatgggagtcaggaggcacctgaggcccccttgtcttccgaactggaacccttccaccccaagcccaaaattcgtaccagaaagtcatcgcggatgactcctttcccagctaccagtgctgcaccagagcctcaccctagtacgtcgaccgcgcaacctgtaacgcccaagccaacatcacaggctacacgatccagaaccaatagaagcagtgtgaagacacccgagcctgtcgtgccgactgcacccgagctgcaaccttcaacttccactgatcagcctgtcacctccgaacctacttctcaggtgacaaggggccggaagagccggagctctgttaagacacctgagacggtcgtccctactgcccttgaactgcagccctccacgtcaacagaccggccggtcacttcggagccgacctcccaagctaccagagggagaaagaaccgcagttccgtgaagaccccggagcctgtcgttcccactgcacccgagctgcaaccctcaacatcaacggaccagcccgtcacttctgaacctacctatcaggctaccagggggagaaagaacagatccagtgtcaaaactcccgagcctgtggtccccacagcccctgagttgaggccaagcacctccaccgaccggcctgtgacgcctaaacctacttccagaaccacgcgaagtcgtactaatatgtcttcagtgaagaaccctgagtccactgtgcctatcgcgcctgagcttccacctagcacgtccaccgagcagccagtgacgcccgaacctacctcaagggctacccgggggagaaaaaacaggtcgtccggcaaaactcccgagactttggtgccaacagcccccaaactggaaccgtccacctcaaccgatcagcctgtgacgcctgagcctacttctcaggccactcgcggccgaaccaatcgatctagcgtgaaaaccccagaaactgtagtgccgacagctcccgagctgcagccttctacttcaaccgaccagcccgttaccccagaacccacctcccaggcaacgcgcggacgaaccgataggtcatccgtgaaaactcctgagactgtggtccctaccgcacccgaactacaggcctctgcaagcaccgatcagcccgttacaagcgagcccacatctagaacgacacgggggcggaagaatcgctcttccgtgaagacgccggagaccgtggtacccgccgctccagagctacagccctccacatcgacagaccagcccgtcacaccggaaccgacctcccgagctacccgcggcagaacgaaccggagctccgttaaaactcctgaaagcattgtccctatcgctccggaactacagccatcaacgtcccgcaaccagctggtgacgcctgaacctacctcacgcgccactcgttgccgaacaaatcgctcctcagttaaaactcctgaaccagtggtgcccaccgcccccgagccacaccccactacaagcacagatcaaccagttactcccaagctcacttccagagccaccagacggaaaaccaaccgctcctctgtgaagaccccgaaaccggtcgaaccagccgcatctgatctggaaccatttacacccacagaccagagtgtgacaccagaggcaatcgctcaaggcggccaatctaagaccttgcggtcctcaaccgtccgcgccatgccagtaccaacaacacccgaattccagtctcccgtgaccaccgatcagcccatcagccccgagcccatcacacaaccgtcatgcatcaagaggcaaagagctgccggaaatcctggtagcttagctgcccccatcgaccataaaccttgctctgcgccgttggaaccaaagtctcaggcctcaagaaatcagcggtggggggccgttcgggcagccgaatctttgaccgctataccagagcccgcctccccgcagctgttggaaacgccaatacatgctagtcagatacagaaggtggagcccgctggacggtccagatttacccccgagttgcaacccaaggcttctcagtcccggaaacgtagtcttgcaaccatggatagccctccccatcagaaacagccgcaaaggggtgaagtcagccagaagaccgtaattattaaggaagaagaggaagatactgccgagaagcctggcaaagaagaggacgttgttactccaaagcctggtaaacgcaagcgcgaccaggccgaggaggaaccaaaccggatcccatctcggtcactccgaagaacgaagctcaaccaagagtccaccgccccgaaagttttgtttaccggtgtggtagatgcaaggggagaacgcgccgtgctggctcttggcgggtctctggccggcagtgctgcagaagcatcacatttggttacagacaggattagacggacagttaaatttctgtgtgccctcggacggggaatcccaatcttgtcgctcgattggctgcaccagtccaggaaagctggcttttttctgccaccagacgagtacgtggtcaccgacccagagcaagaaaagaattttggattctccctgcaggacgccctctcccgtgctcgggaaagacggctgttggagggatacgagatctatgttacccctggtgtgcagccaccgcctcctcagatgggtgaaatcatctcatgttgcggcggcacttatctgccctccatgccccgatcatataaaccacagagggttgtcatcacctgtcctcaggacttcccacactgctccattccactgagggtgggcttgcctctgcttagcccagagtttcttcttaccggagtcctgaaacaggaagccaagccggaggcattcgtgctctcccccctcgagatgtcctcaacttag

SEQ ID NO: 269665 - DNA, 5478 bp, Artificial Sequence
  derived and/or modified sequence
atggaagacacacaggcaatcgactgggatgtcgaggaggaagaagagaccgagcagtcaagtgaaagcctgcggtgtaacgtggagccggttggccggctccacattttctctggcgcccacgggcccgaaaaagatttcccactccacctcggcaaaaatgtggtcggcagaatgcctgattgttcagtagcccttccctttccaagtatctcaaagcagcacgctgagattgagatcctcgcatgggataaggctccaattctcagggactgcggttccctcaacggaacccagattctccggccccccaaggttctctcccctggtgtctcccataggctaagggatcaggaacttatcctattcgctgatctactctgtcaatatcaccggctggacgtcagtctccccttcgtatccagaggacccctaacagtcgaggagacccctcgcgtgcaaggtgaaacccagcctcaacgcctattgcttgctgaggatagcgaagaagaggtggacttcctttccgagcggcggatggttaagaaaagtcgcaccacatcctcttccgttattgtgcctgagtccgatgaggaaggccattctccagtcctgggcggcctggggccacctttcgctttcaacctcaatagcgatactgacgtggaggagggacagcaacctgctaccgaagaggccagctccgccgcacgcaggggtgctaccgtggaggctaagcagtcagaggccgaagtggtgactgaaattcagctggaaaaggaccagccactcgtgaaagaacgtgacaacgataccaaggtcaagcgcggggccggcaatggcgtcgttcctgctggggttatccttgagagaagccagccccccggggaggactccgataccgatgtagacgacgacagtcggcctccaggacgacccgcagaggtgcatttggaacgggcccaaccctttgggtttattgactctgacacagatgctgaagaagaaaggatcccagccacacctgttgtgattccaatgaaaaaacgaaaaatctttcatggcgtgggtaccaggggtccaggcgcaccgggcttggcccacttgcaggagagccaggcgggaagtgacacagacgtggaggaaggcaaagccccgcaagccgtcccgctggagaagagtcaggcttccatggtgatcaatagtgacactgatgacgaagaagaagtgtccgccgctctcactttggcccatttgaaggagtctcagcctgcaatttggaatagagatgctgaagaagatatgccccaacgtgtcgtcctgctgcaaagatcacagacaactaccgaaagagactccgatacagatgttgaggaagaggagctacccgtggagaatagggaggctgtgctgaaggaccataccaagatccgggcgctggtccgcgcccactcagagaaagatcagcctccgtttggcgactctgatgactcagttgaggccgataagtcctcccccgggatccacctggagagatcgcaggcttccacaactgttgatattaatacacaggttgagaaagaggtgccccccggttcagctatcatacacatcaaaaagcaccaggtttctgtggagggaaccaaccaaacggatgtgaaagccgtagggggccctgcaaaactcttagtggtctcccttgaggaagcttggccactccacggggactgcgagacagacgccgaagaaggtacttccctgacagcctccgtggtagcggatgttaggaagtctcagctccccgcagagggagacgcaggcgcggagtgggcggctgcagtcctgaaacaagagcgagcgcatgaagtcggagctcaaggcggcccgcccgtcgcgcaagtggaacaggacctgcctatttcgagggagaatttaacagatcttgtggtggatactgacaccctgggagagtctacacagccccagcgggagggcgcccaggtcccaaccggccgagagagagaacagcatgtgggtggaactaaggattccgaagacaactacggggacagcgaagacttggatcttcaggctacacagtgtttcctagagaatcaggggcttgaggccgtccagtctatggaagacgaacctacacaggcctttatgttgactccaccacaggaactgggcccgagccactgcagtttccaaaccacagggctgctcaattgtaagatgccccccgcggagaaagccagccggataagggctgcagaaaaagtatcacggggcgatcaggagagccccgatgcctgtcttccccctactgtgccagaagctccagcgccccctcagaagccactgaactctcagtcccaaaaacacctcgcccctcctccgctcttatcgcccctgctccctagcatcaagcccacagtacggaaaactcggcaggatgggtcccaggaagcccccgaggccccattatcttccgagctggaacctttccaccctaaaccaaagatcaggacaaggaagtcaagtcggatgacccccttccccgccactagcgctgccccagagccgcacccttccacctccacggctcagccagtcaccccgaaacccactagtcaggccacccgatcaagaacgaacagaagtagtgtcaaaacacccgaaccagtagtcccaaccgccccagaattgcagccttcaacgtcaaccgaccaacccgtgacaagcgaacccacatcacaggtaacaagggggaggaagtctagaagcagcgtgaagaccccagagacggttgtccccactgcgctggaactccagccatctacgagcactgacaggcccgtcacatctgagcccactagccaggctacacggggtcggaaaaataggtctagtgtcaaaaccccagagcctgttgtacccacagctccagaactgcaaccttccactagcactgatcagcccgtgacaagcgagcccacctatcaggctacgcggggccgaaaaaatcgcagctcagtgaaaaccccagagccggtggtgcccaccgcccccgagctgaggccaagcacatctactgaccggcccgtgacacccaagccgacatcccggacaacgcggtcacggacaaatatgagttcagtgaagactcccgagactgtcgtgcccacagctccagagttgcagatctctactagtactgatcagccagttacccctaagcctacctcacggacgactcggtcacgaaccaacatgagcagcgtgaaaaaccctgaatccactgtcccgatcgcccccgagctgccaccgtctacctccaccgagcagccggtgacccccgaacctacttcgcgagcgacacgcgggaggaaaaaccggtctagcggcaagacccctgagaccctcgttcctaccgctccaaagctcgaaccctcaactagcactgaccaaccggtaacccccgagcctacgtcccaggcaacaaggggaagaacgaaccgttcctcagtgaagacacctgagacggtggtcccgacagctcctgaacttcagccatctacatcaacggatcaaccagtaacacccgaacccacatcgcaggcgacaagaggccgaacagataggagcagcgtgaagacacctgagacagtagtacccactgcccccgaactacaagcttccgcatctaccgatcagccggtgacaagcgagcctacaagtcgtaccacaagaggacgtaaaaatagatcaagcgtgaagacgccagaaactgtcgttccagctgctcctgaactgcagccctcaacgtccacagaccagcccgttacgcccgaacccacatctcgggcaacacggggtaggacgaatcgcagctcggtgaagacccctgagtctatcgtgcccatcgcaccagaattacaaccttccacttctcggaatcagctggtgaccccggagccgacttcccgggccaccaggtgtcgcacaaataggtcaagcgtcaaaactcccgagccggtggtgcctacagcgcccgagcctcacccgactacatcaaccgatcagccagtcacccccaagctgacgtcgagggccaccagacgaaagactaatagatcctccgtcaagacaccaaaaccagtcgaacctgccgcctcggatttagagcccttcaccccgactgatcagtcagtgactccagaagcaattgcacagggaggtcagagcaagacactgcgaagtagtaccgtgcgagcgatgccagtgcctacaacacccgagttccagtctcctgttactactgatcagcctatcagccccgagccaattactcagccatcctgcataaagagacagcgggcggctggcaatccaggttctctggcggctccgatcgaccataagccatgctcagcgccactcgaaccaaagtctcaggcctcaagaaatcaaagatggggggccgtccgagccgctgagagcctgactgctatacccgaaccggctagcccccagctactggagacaccaatccacgccagtcagatacagaaggtcgagccagcggggagatcaagattcacaccagaacttcagcccaaggctagtcagtcacgcaaacgcagcttagcgacaatggactcgccgccacaccagaagcagccccaaaggggagaagtgagtcagaagactgtaatcatcaaagaggaagaggaggatacagccgaaaaaccaggcaaggaggaggatgttgtcaccccaaagccaggcaaaaggaaaagagaccaagcagaagaagaacctaaccggatcccttctcgatcactgcggcgcacaaagcttaatcaagaaagtactgcccctaaagtgctattcaccggggttgtggacgctcggggtgaaagagccgtcctcgctttgggcggttcactggcaggaagcgccgctgaagcctcccacctagtgacggatcggatacgaagaaccgtgaagttcctgtgcgcactgggaaggggcatcccaatactttccctcgattggttgcaccaatcccgcaaggccgggttttttctgcctcccgacgaatacgtcgtcactgatccagagcaggagaaaaattttggattttcattgcaagacgctcttagtcgagctagggagagaaggctcctagaaggttatgagatctacgtcacccccggagtccaacccccaccaccgcaaatgggggaaatcatctcctgttgtggtgggacgtacctcccatcaatgccccggagttacaagccacagcgggtggtgattacgtgcccgcaggatttcccacactgctccatcccgttgagggttggcctgcctctactgtcccccgagttccttttaaccggagtgctcaaacaggaggccaaacctgaggctttcgtgttgtcgccactggagatgtccagcacttag

SEQ ID NO: 269666 - DNA, 4968 bp, Artificial Sequence
  derived and/or modified sequence
atgtatcataggcttgacgtcagcctcccctttgtttcccgcgggcccttgactgtggaagagaccccccgcgtgcagggagagacccagccccagcgccttctgttagctgaggactccgaggaagaagtcgatttcctgagtgaaagacggatggtaaaaaaaagccggacaactagcagcagtgtgattgtaccggaatcagacgaggaaggtcactctccggttctcggcggcctgggccccccttttgcctttaacctgaactccgatactgacgtggaggaaggccagcagcctgccaccgaagaggcgtcttctgctgcccgacgcggcgctaccgtcgaagctaagcagagcgaagctgaagttgtgaccgaaattcagttggagaaggatcagcctctggtaaaggaacgcgacaacgacaccaaggtgaaacgcggcgccggaaacggcgtcgttcccgcaggagtgattcttgagcgcagccagccccctggagaggactcagacacggatgttgacgacgatagcaggccacccggccgtcctgcagaggtgcacctcgaacgggcccagccattcgggtttatcgacagtgacacagacgccgaggaagagcggatcccagctacgccagtggtgatccccatgaagaagcgtaaaatattccacggtgtcggcaccaggggcccgggcgcccctggacttgcacatctacaggagagccaagcgggctctgacactgacgtggaagagggtaaagcgcctcaggccgtgcctttagaaaagtcgcaagcaagtatggtcattaattctgatacagatgacgaagaggaggtgtcagccgccctgactttggcccaccttaaagagtcacagccagctatatggaacagagatgccgaagaagatatgccccagcgagtggtcttgttacagcggtctcagaccacgactgaaagagattccgacacagacgtcgaggaggaagagctgccggtagagaaccgggaggcagttctgaaggatcacaccaaaatacgcgccttggtgagagcacacagcgaaaaggatcagcccccatttggcgactcggatgactcagtcgaggctgacaagagctcacccggcattcacctggagaggagtcaagccagcacgaccgtcgatatcaatacacaggtggaaaaggaggtgcctccagggtccgcgatcattcacatcaagaagcatcaggtaagcgtcgaaggcactaaccagacggacgtgaaggctgttggcggccctgccaagctattagtggtgtcacttgaagaagcttggccactgcatggcgattgtgagacagacgccgaggaaggcacttctctgacagccagcgtcgtggccgacgtccgcaagagccagctgccagcagagggagatgccggtgccgaatgggctgctgcagtactgaagcaggaacgcgcccacgaggtgggggcacaggggggacctcccgtcgctcaggtagagcaggatcttccgatctcccgcgaaaatctcaccgacctggttgtcgacactgacactctcggcgagagcacccaaccacaacgagaaggagcccaagtgcccactggaagagagagggagcagcatgtggggggtaccaaggactctgaagataattatggcgattcggaggatctggatctgcaggcaacccaatgcttcctggagaatcagggtctggaggtgcagtcgatggaagacgagccgactcaggccttcatgttaactccccctcaggaacttgggccctcccattgctccttccaaactacgggcctcttgaactgcaaaatgccgccggccgagaaggcatcaaggattcgagctgccgagaaagtttcccggggcgaccaggagtcacctgacgcctgcctgcctcctacagtccccgaagctccggcgccccctcagaagcccttaaacagccagtctcagaaacacctggctcccccccccttgctaagtccactcctcccttcaataaagcctacagtcaggaaaacgaggcaagacggatcacaggaagcaccagaagcgccactctctagcgaactggagccatttcatccaaaacctaagatccgtactcgcaagtcctcgaggatgacacctttccccgcgacttccgccgcgccggagcctcacccgagcacatcaacagcccaaccggtgacccccaagccgacttcacaggctactagaagcagaaccaatagaagttccgtgaagaccccggaaccagtggtccctacagcgccagagctccagccttccacctctaccgatcagccagtgacctccgagcccaccagccaggttactcggggtcgcaaatctcggtccagcgttaagacaccagaaaccgtagtcccaacagctctcgaacttcagccctccacctctacggataggccagtgaccagtgagccgacttcccaggccactaggggcagaaaaaatcggtccagtgtaaaaacaccagagcctgtggtgcccaccgcacctgagctgcagccgagtacttcaactgatcaacctgtgacttctgagcctacctatcaggcaactagaggtaggaagaacaggtcttctgtgaaaacaccggagcccgtggtacctactgctcccgaactgagaccttccaccagtactgatcgccccgtgactccaaagccaacttcccggaccacacggtctaggaccaatatgtccagcgtgaaaaatccggagtccactgtgccgattgctccggaattgcctccaagcactagcaccgagcagccagtgacaccggagcccactagccgggctactagaggaagaaagaacagaagtagtggcaagacccccgagacccttgtgccaacagctccgaagctggagccgagcaccagtacagatcagcctgtaacccccgagcctaccagccaggccacccgcggccggaccaacagaagtagcgtgaaaacccccgaaacagtggttcccactgctccagaactccagccaagcacatcaacagaccagccagtgactccagaacccacgagccaggccactcggggccggacagataggagcagcgtaaagactcccgagactgtcgtgcccacagcgcctgaactgcaggcatctgcgagtacggaccagcctgtgacttccgagccaacgtctcggaccacacggggccgcaaaaatcgttccagtgtcaaaacccctgaaactgttgtcccagccgcccccgaactgcagccatcgactagcactgaccagcccgtgacaccggaacctacttccagggccacccggggtcgcacaaatagaagctctgttaaaacacctgaatccattgtgccaattgcaccggagttacagccatccacctcgcgtaaccagctggtgacgccagaaccaaccagcagagccacccgatgcagaacaaatcgatcatctgtgaaaacacctgaacccgttgtgccaactgcacccgaaccacacccaactacctctacggaccagccagttacgcccaaactgacctcccgggcgaccagaaggaaaacaaacagaagtagcgtgaaaactccaaagcctgttgagccagccgcctccgatctggagcctttcacacctactgaccagtcagtgactcctgaggccattgcccagggcggccagtcaaaaaccctgcgctcatccacagtaagggctatgcctgtgcctaccactcccgagttccagtcccccgttactaccgaccagccaatatcacctgaacccattacccagccctcatgcatcaaaagacagcgcgcagctggcaatcctggctctttggccgcccctatcgaccataaaccctgttccgcgcctctcgaaccaaaatctcaggcaagtaggaatcaacggtggggagcagtccgcgctgcagagtcgcttacagcgatccccgagcctgccagtcctcaacttctggaaacccccatacacgctagtcaaatccaaaaagttgagcccgccggtagaagccgattcactcctgagctgcagcctaaagcctcccagtctcgcaaaagatctcttgctactatggacagtcccccccaccaaaagcagcctcagcggggcgaggtgagccaaaagaccgtgattatcaaagaggaagaagaagacactgctgagaaacctggtaaggaggaggacgtcgtcactccgaagccgggcaaaaggaaaagggaccaggccgaggaggaacccaacaggataccatcacgaagtcttcgccgcactaagctcaatcaggagagcactgcacccaaagtgctcttcactggcgttgtggatgctcgaggcgaaagagccgttttggctcttggcggctccctagcaggctcagctgctgaggcatctcacctggtaaccgatcggatccgtcggaccgtgaagtttctgtgcgcattgggtcggggcatcccaattctgtccctggactggctccatcagagtcgcaaggcgggcttttttctgccgcccgatgagtacgtagtcactgacccagagcaagagaagaactttggtttttctctgcaggatgcactgtctcgggccagagaaagacgcttactagagggttacgagatatacgtgacacccggagttcagccacctccccctcagatgggcgaaatcatctcatgctgcgggggtacctatttgccaagcatgccacgttcttacaagccacagagggttgtaatcacctgtccgcaggactttcctcactgctctattcctctcagggtgggtctgccactgctcagcccagagttcttgctcacaggggtcctcaagcaagaagcaaagcctgaagccttcgtcctaagtccactggaaatgtctagcacttag

SEQ ID NO: 269667 - DNA, 4968 bp, Artificial Sequence
  derived and/or modified sequence
atgtatcacagactggacgtgagcctcccatttgtcagtcgagggccattgacagtggaggagacacctcgcgttcagggtgagacacagcctcagcgcctgttactcgctgaagacagcgaagaagaagtggacttcttgtcagaaaggaggatggtaaagaagagccgcaccacgtcatctagtgtaatcgtcccggagtccgatgaggagggacactcccctgttctgggcggtctaggaccccccttcgcttttaaccttaattccgataccgacgtggaggaaggccagcagccagctacagaagaagcttcctcggcagcccggcggggagcaaccgttgaagcaaaacaaagcgaagctgaggtggtcactgaaatccagttagagaaagaccagccgctcgtcaaagagagagacaatgacacaaaagtcaagcggggggctggtaatggggtagttcccgctggcgtcatcctggagaggtcacagccaccaggcgaggatagcgatacagacgttgatgatgactccaggccccctggaaggcccgcggaagtccaccttgagcgcgcccagccctttggcttcatcgatagtgacacggacgctgaagaggagcgcatacctgctaccccggttgtgatccccatgaagaaacgcaagatcttccacggggtgggcacacgcggcccaggagcccccggattagcacaccttcaggaaagccaggctggcagcgataccgatgttgaggaaggtaaggccccacaagcagttccgctcgagaagtcacaggcctctatggtgataaacagcgataccgacgatgaggaagaggtaagcgctgcacttacactcgcgcacctgaaggaatcccagcctgcaatctggaatagggatgcggaggaggatatgcctcaacgagtggtcttactacagagatctcagaccacaactgagcgggattccgacacagatgtggaagaagaggaactacccgtggaaaacagggaggcagtgctaaaagaccatacaaagataagggccctcgtgcgcgctcatagtgaaaaggatcaacccccatttggagattctgacgattctgttgaggctgataagagcagccccggaatccacctggagagatcccaggcctccacaacagtggatataaacacacaggtcgagaaggaagtccccccaggaagtgcaatcatccacattaaaaagcatcaggtctctgtggagggcaccaatcagactgacgtaaaggcagtcggagggccggctaagctgctggtcgtgagcctggaagaggcttggccgctgcacggggattgcgagactgacgccgaggaaggtacctccctgaccgcaagcgtcgtcgctgacgtgaggaagtcccaactgccagctgaaggggatgctggcgcggaatgggccgccgccgtgcttaaacaggaacgtgctcatgaggttggggcacagggcggtcctcctgtggcacaggttgagcaagacctgccaatttccagggagaatctgacagacctcgtggtcgacacagataccctgggtgagtcaacacaaccccaaagagagggggcacaagtgccgacaggccgggagcgagagcagcacgtcggcggaaccaaagactcagaggataactatggtgattcggaagacctggatctccaggctactcaatgttttctcgaaaaccaggggctggaggtccagagcatggaggatgagcccacacaagccttcatgctgactcctccccaggagctcgggccgtcgcattgctcctttcagaccactgggctcctaaattgtaagatgccaccagcagagaaagcgagcagaatacgtgcagctgagaaggtgagccggggtgaccaagaatctcccgacgcatgcctgccccccaccgtaccggaggctccagcgccaccacagaaaccgctcaatagtcagtcgcagaagcatttggcccctccccccttactaagcccacttttacctagcatcaaaccgactgtgcggaagacgagacaggatggatcacaagaggcacccgaagctccgctctcgtcagagctggagccgtttcacccgaaaccaaagatccgtacccggaagagttcaaggatgaccccatttccggccacaagcgctgcgcccgagccacacccctccacctctactgcccagcctgttacacctaagcccacctcccaggcaaccagatcccggaccaacaggagtagcgtgaaaaccccagaaccagtggtcccaacagcacccgaactccagccatcaacatcaacagatcagccagttaccagcgagcccacgtcccaggtgacccggggccggaaatccagatccagtgtcaagactcctgaaaccgtggtgccaaccgccttagaactgcagccctccacatccaccgaccgccctgttacatccgaaccgacaagtcaggccacacgcggacggaagaatcgttcatccgtgaaaacacccgagcccgtcgtgcctaccgctccggagttacaaccgtcaacatctacagatcagccggtcactagtgaacccacttaccaggccacccgcggaagaaaaaaccggtcctcggtgaaaacccccgagcccgttgtaccaacagcccccgaacttcggcctagtacgtccacagatcggccagtaacacccaagcccacttctcggactactaggtctaggaccaatatgagttcagtgaagaaccctgaatctacagtgccaatcgcacctgaactcccacctagcacatccaccgagcagcctgtaacacctgaaccaactagtcgcgccacacgtggaagaaagaacaggagttcgggtaaaactccagagactctagtgccaaccgccccaaagctggagccctccacatccacagaccagcctgtgacccctgagcctacatcgcaggccaccagagggagaacaaacagaagcagtgttaaaacacctgagactgtcgtcccgactgcccccgagctgcagccctcaaccagcaccgatcagccagttacccctgaaccaacctctcaggcaacgagagggcgaactgaccgatctagtgtgaagacacctgagaccgtggtgccaaccgcaccagaacttcaagccagcgcctcaacggaccaacctgttaccagcgagcccacatcaagaaccaccagaggtcggaaaaatagaagttcagttaaaaccccggagactgtcgttccggctgcacctgaattacagccatccacttccaccgaccagcccgttacccccgaacctacaagtagagcgacgaggggacgcaccaacaggagcagtgtaaagactccagagagtattgttccgattgccccagaattgcagcctagtacttctcgtaaccagctggtgaccccagaacccacctcccgagccacacgctgtcgcactaaccggtcctccgtaaagacccctgagccggtggtgcctacagcccccgaacctcatccaactacatccaccgatcagcctgtaacccccaaacttaccagccgagccacaagaaggaaaaccaaccgcagctcagttaagacccccaagcctgtggagccagcagcctccgacctggagcctttcacaccgaccgatcaaagcgtgacccctgaagccatcgcccaggggggccagtctaagacactcaggtcttctaccgtgcgggccatgcccgttcctacgactcccgagtttcagagtcctgtaacgaccgaccaaccaatcagcccagagccaatcactcagcccagttgtattaagaggcagagggccgctggtaatccaggcagtctggctgccccaattgaccataagccttgttcggccccactcgagcctaaatcacaggcatcaaggaaccagaggtggggtgcggtgcgggcagctgagtcactcactgccatcccagagccagcctctccacagcttcttgaaacacctatccatgcctcccaaattcagaaagtggaaccagcaggcaggtcaaggttcacaccagagctgcagcccaaggcctcccagtcacggaaacggagtcttgccaccatggattctcctccccatcagaagcaacctcagcgaggggaagtgtctcagaaaacggtgataattaaggaagaggaggaagacactgcagagaagccaggaaaggaagaggacgttgtcacccctaagcccggcaagcgtaaacgggaccaggccgaggaggaaccaaatagaattcctagccggagtctcaggcggactaaactaaaccaggagtcaacagctcctaaggtactattcaccggcgtagtggacgcacgaggcgagcgtgccgttttagccttgggcgggtcccttgctggctccgcagccgaggctagccatctggttactgacaggattagaaggacagtcaagttcttatgcgccttggggcgcggcattcccattctaagtctggactggttgcaccagagccgtaaggccggattcttcctgcccccggacgagtacgtggtcaccgacccagagcaagaaaagaactttggtttcagcctgcaggatgccttgtccagagcacgtgagagaaggctccttgaaggatatgagatatacgtgacccccggggtgcagccccctccgccccagatgggagaaataattagttgctgtggagggacatatctgcctagcatgccccgaagctacaagcctcagcgtgtcgttattacctgccctcaggatttccctcactgctcaattcccctcagggtcggactgcctctcctgtcccccgagtttctcctgacaggcgtgctgaagcaggaggccaaacctgaggcattcgtcctgtcgccgctggagatgagctctacatag

SEQ ID NO: 269668 - DNA, 4968 bp, Artificial Sequence
  derived and/or modified sequence
atgtatcaccgactcgatgtgagccttcccttcgtctcacggggtccactgacagtggaagagactccccgcgtccagggggagacacagccccagcgccttctcctcgctgaagactctgaagaagaggtagacttcttaagcgaaaggcggatggtgaagaaaagtaggacaaccagcagctccgttatcgtaccggagtccgacgaggaaggccattctcccgtgctaggcggcctgggcccacctttcgcattcaatttgaattctgatactgacgtggaggaagggcagcagccagccactgaggaggcttcttcagcagcacggaggggggccaccgtggaagctaaacaatccgaagcagaggtcgtgactgagatccagctagagaaagatcagcctcttgtgaaggaaagagataacgataccaaggtgaaacgcggggctgggaatggcgtggtgcccgccggtgtgatactagaacgcagccagccaccgggcgaggattccgatactgacgtagatgacgactctcgccctcccgggcggcccgcggaggtgcacctggagcgagcacaaccttttggatttatagacagcgacactgatgcagaagaagaaagaatccctgcaaccccagtcgtgatcccaatgaaaaagcgcaaaatttttcatggcgtgggaactcgaggcccaggtgcaccaggtctcgcacacttacaggaatcccaggctgggtccgatacagatgtcgaggaaggtaaagctcctcaggctgttcccttagagaagagtcaggcaagtatggtgatcaattctgacaccgatgatgaggaagaggtttctgccgcacttaccctggcccacttaaaggagtctcagccagcaatctggaatcgagatgccgaagaggatatgcctcaacgggttgttctgctgcagcgctctcagacaacaactgaaagagatagcgatacagacgtggaggaagaagagctccctgtggagaaccgggaggccgtgcttaaggaccatacaaagatccgagcactggttagggctcactctgaaaaagaccagcctccttttggcgactccgacgactctgtggaggcagataagagctcccctggcatacatctcgagaggtctcaggctagcacgacagtcgacatcaacactcaggttgaaaaggaagtcccacccggaagtgcgattattcatataaagaagcaccaggtgtctgtggagggtaccaatcaaaccgatgtgaaggctgtcggcggccctgctaagctcctcgtcgtgtctctggaagaggcctggccacttcacggcgattgtgagactgacgccgaggaagggacctcgctgactgcatcagtcgtggctgacgtcagaaagtcccagctgcctgcggagggggatgccggggcagagtgggcagctgctgtgctaaaacaagaaagagcccatgaagtcggggcccagggagggcctccagttgctcaagtagagcaggatctcccaatttcacgtgaaaatctgactgacctggtcgtggacaccgatactcttggtgagtccacccagccccaacgtgaaggggcacaggtaccaacaggtagggagagagaacagcatgtgggtgggaccaaagactctgaggataactacggggatagcgaagatctcgacctccaagcaacccagtgtttcctcgagaaccagggactcgaggtacagtcgatggaagatgagcctacccaggcttttatgctgacaccaccccaggaactaggtccgtcacactgttcttttcagacgacaggcctcttgaattgcaaaatgcctcccgccgagaaagcgagccggatacgggccgccgaaaaggtgtcgcgcggtgatcaagaatctcctgatgcatgcctaccccccactgtcccagaggcccctgcaccccctcagaagcctctcaactcgcagtcccaaaagcaccttgccccaccgcctctgttgagccctttgctgcctagtattaagccaactgtgcgaaagactagacaggacggcagtcaggaagcacccgaagcgccactcagttccgagcttgaaccgtttcatcccaagccgaaaattaggacgcgaaagagctcccgcatgaccccgtttccagcaacaagtgccgccccagagccacatccctcaacttctaccgcacaacccgtcacaccaaaacccacctcacaggccactcgtagcaggacaaatagaagttcggtcaagactcccgaacctgtcgtgccgactgccccggagctccaacctagtacatcaacagatcagcccgtgactagcgagcctacgtcacaggttactagaggccggaagtcacgtagcagtgttaagaccccagaaacggttgtgccaacagccctggagctccaaccttcgacttccactgacaggcctgtgacaagcgagcctacgagccaggcaaccaggggtcgtaaaaatcgcagctctgtcaagacgcctgaacctgtcgtccccactgccccagagctgcagccctccactagcacggatcagccagtaacaagtgagccgacataccaagcaacccgcggcagaaagaaccggtctagcgtgaagaccccagaacccgtcgtgcctacggctcccgaattacgccccagcacctccaccgatcgtccagtgacacctaaacccacttctagaaccaccagatccagaaccaacatgagttccgttaaaaacccagagagcacggttcccatagccccggaactgccaccttctacttccaccgagcagcccgtgacacctgaacccacatctagggccactcgagggcggaaaaatcggagttccgggaaaactccagagacattggtgccaacggcacctaagcttgagccgagcacaagcaccgaccagcccgtgacgcccgagcctactagccaggccactaggggtcgtaccaaccggtcaagtgttaagaccccagagacagtagttcctactgcgccggaactccaaccatccacaagtacagaccagccagtgactccagagccgacaagccaagcaacccggggacggacagatcgctcttcggtcaagacacccgagaccgttgtgcccaccgcacctgagttacaagcctctgcatctacagatcagccagttacatccgaaccaacttcgagaacaacccgtggaagaaagaatagaagcagcgtgaaaacacccgagactgttgtgccagccgcgcccgaactgcagccttccacctcaacagaccagccggtaactcccgagcccactagccgcgccacacgcggccgaactaaccggtcttcagtcaaaaccccagaatccattgtgcctatcgctccagaactgcagccctcaacttcaagaaaccagctggtcacacccgagcctacgtcacgtgccacaagatgcagaacgaatagatcttccgtaaagaccccagaacctgtggtccctacagcccccgagcctcaccccacgaccagcaccgaccagccagtaactcccaagctgactagcagagccacacggcgcaaaaccaatagatcgagtgttaaaacccctaagccggtagagcccgccgccagcgatctggagcctttcactcccactgaccagtcggtgacccctgaggctatcgcacagggtggccaatcgaagaccctgcggagcagcactgtcagggccatgcccgtccccaccacaccggagttccagtctccagttaccacggatcaaccaatctcccctgagccaatcactcaaccgtcctgtattaaaaggcaacgcgcagccggtaacccagggagcttagccgcaccaatcgatcacaagccttgttccgctcctctggagcctaaaagccaggcgtctcggaaccagagatggggggcggtgcgtgccgcagaaagtctgacagctataccggagcccgccagcccccagctgctggaaactcccatccatgctagccaaatacaaaaggtcgaaccagccggcaggtctcgcttcacgcccgagctgcaaccgaaagcgtcgcagtcccgcaaaagatccctggctacgatggactcccctccacatcagaaacagccccagagaggagaggtgtctcaaaaaactgtgatcatcaaagaagaggaagaagacaccgccgagaaacccggcaaagaggaggatgtggttacccctaagccagggaaaagaaaacgcgatcaggccgaggaagaacccaaccggataccgtccaggagcctgcggaggactaaactgaatcaagaatcgacagctcccaaggtgctctttacgggcgttgtggacgctcggggagagagggctgtactggctttaggaggttctctggcagggtctgcggcggaagcctctcacctggtgactgatcgcattagaagaacagtaaagttcctttgcgctctgggcaggggcattcccatattaagcctagattggctgcaccagtcccgcaaggcgggttttttcctgccgccagatgaatatgttgtcaccgacccagaacaggagaagaattttggcttttccctgcaagatgcactgtcccgagccagggaacggcggcttctcgaaggctatgaaatttatgtgacaccaggcgtgcaaccgcctccaccgcaaatgggagagattattagttgctgcgggggcacatatctcccctctatgcccaggagctataaacctcaacgggtagttatcacttgcccgcaagactttccacattgctccattccgctccgggtcggtctccccctgctgtcgcccgagttcctgctgacgggtgttctgaagcaggaggcaaagcccgaagcttttgtgcttagtcccctggaaatgagttccacatag

SEQ ID NO: 269669 - DNA, 5478 bp, Artificial Sequence
  derived and/or modified sequence
atggaggatacccaggcaatcgattgggatgtcgaggaggaggaggaaacagaacagtcttccgagtccctgcggtgtaatgtcgaaccagtgggtaggcttcatattttttccggtgcccacgggccagaaaaagactttcccctgcatcttggaaagaacgttgtgggcagaatgccggattgcagcgtcgccctgcccttcccgagtatatctaaacagcatgctgagatcgaaatcctggcatgggacaaggcccccatcttgcgcgattgtggctccctgaacgggacacaaatccttcgcccaccaaaggtactgagcccgggcgtgtcacacaggcttcgagatcaggaattaattctattcgcggatctactgtgtcagtaccatcggcttgatgtctctttgccttttgtgagtagaggccctctcacggtcgaggaaacgcctcgggtgcaaggagagacgcagccgcagaggctcctcctcgcggaggattctgaggaagaagttgatttcttgagcgagcgccgcatggtgaagaagtcgcgcaccacgagctcctcggtcatcgtgcccgaaagtgatgaggaggggcacagtccagtgttgggaggtctcggccccccgttcgcattcaacttaaatagtgacactgatgtagaagaggggcagcagccagcgacggaggaggcatctagtgcggcccgcagaggagcaactgtcgaagctaagcagtccgaggcagaggtagtgactgagatacagttggaaaaagatcagcctctagtgaaggaacgggacaacgacaccaaggtgaaacgcggagctggtaacggggtcgtaccagccggcgtcattctcgagaggagccagccgcctggagaggatagtgacactgatgtggatgacgactcccgcccccccggccgacctgcagaggtgcacttggagagagcccagccttttggatttattgacagcgacaccgacgcggaagaagagcggatacccgcgactcccgtggtcatacccatgaaaaaaagaaagatcttccacggagtgggtacacgtgggccaggggcaccgggactggcccacctgcaggagagccaggccggctccgataccgacgtcgaagagggcaaggctccacaggcagtgccacttgagaaatctcaggcttctatggtcataaatagcgataccgacgatgaagaagaggtctctgcagccctaactctggcccatctgaaggaaagccagcccgcaatctggaacagggacgcagaagaggatatgccccaacgtgtcgtcctccttcagcgtagccagaccaccacagagcgcgatagcgacaccgacgtagaggaggaggaactgcctgtcgaaaatcgggaggcagtcctgaaagatcacaccaagatcagggccctggtcagagctcactccgaaaaggaccagccgcccttcggcgactccgacgactccgtcgaggctgataaatcctcccccgggatacacctcgagcggtctcaggcaagtacaacagtggacatcaacactcaagtcgagaaggaggtcccccctggctcagcgatcattcacatcaagaaacaccaagtcagcgtcgaagggaccaatcagaccgacgtgaaagctgttggaggcccagctaaacttttggtggtctcactggaggaagcttggccactgcacggagattgtgagaccgatgccgaagagggaacatccctgacagcttctgttgtcgcagacgttagaaagagtcagctgcctgctgagggcgatgccggtgctgaatgggccgctgccgtgctgaaacaggagcgcgcccatgaagtgggcgcccaaggcggcccaccggtcgcgcaggtggagcaggatctgcccattagcagggaaaatctcactgatctggtcgttgatactgacaccctgggggaatccacccagcctcaaagggaaggcgcacaggttcccactggtagagaaagggagcagcacgtgggtggcacaaaggattctgaagataattacggggattcagaagatctggatttgcaggccactcaatgttttttagagaatcaggggcttgaagcagtccagtccatggaggatgagcctactcaggctttcatgctcacccccccacaggagctgggaccaagccactgctcttttcagactacagggttgctcaattgcaagatgccccccgctgagaaagcctcccgcatccgcgccgccgagaaggtgagcagaggcgaccaggagtcacccgacgcctgtcttcccccaaccgtgccagaggcaccagctcctccacagaagccactcaactcgcagtcccagaaacatctcgctccgcccccacttctcagtcctctcctgccttccatcaagcccactgtgaggaaaactcgccaggatggaagtcaggaggcgccagaagctccattatcatctgaactcgaaccgttccacccgaagccaaaaattcggaccaggaaaagctcccgcatgacgccgttcccagcaacatccgccgcccccgaacctcaccctagcacctcaaccgcccagcctgtaacgccaaagccaacctcccaggccactaggtctcgaacaaatagaagttccgtgaagacaccggaacctgtggtgcctacagctcctgagttacagccttctacctccacagatcagccagtgacatccgaacctacttcacaggtcacccgggggaggaaaagccgttccagtgtgaagactccagaaactgtggtccccactgccttggaactacagccctccacctctacagataggcccgtgacatcggagcccacgtcccaggccaccaggggacgcaaaaaccgctcatctgtgaagacgcccgagcccgtggtgccaacagcacctgagctgcagccctctacaagcaccgaccagcctgtgacttctgaaccaacctaccaggccaccagaggtagaaagaaccggtcctctgtcaagacgccagagcccgtggtgccgactgcccctgagctacggccttctacatccaccgatcgtcctgtgacaccaaaacctacatcccggactacacggtctcgcaccaatatgagcagcgttaagaccccggaaactgtcgttcccactgcaccggagttacaaatttctacctccaccgaccaacccgtcacgcctaagcccacctctcggaccacacggtctcgcaccaacatgtcaagtgtgaagaatcccgaatcaacagtgccaatcgccccggagctgcctccgtctacgtctaccgagcaacccgtcacgcctgaacctacgtctagggcgacaagagggcgcaaaaatagaagcagcggcaagacccccgagactcttgtccccacagctcccaaacttgagccaagcactagcactgaccagcctgtgacgcccgagcctacctcgcaggcaactcgcgggaggacgaacaggagctcagtgaaaactccagaaacagtcgtccctaccgccccagaattgcagcctagcacgtctacagaccaacctgtgacacccgaacccacctcccaggcaacccggggacggacagatcgcagcagcgtgaaaacaccagaaactgttgtgccaactgcccccgagctgcaggcgagcgcctcaactgatcaaccagtgacgtccgaaccaaccagccgcacaactcgcggtagaaaaaaccgctcatcagtgaaaactcccgaaacggtagtgcctgccgcccctgaactacagccttcaacctccactgaccagccggtgactcccgaacccacatcccgcgccaccaggggacgcactaaccgatctagtgttaagacccctgagagcatagtacctatcgctccggaattacaaccaagtacctctagaaaccaactagttaccccagagccaaccagcagagccacgagatgtagaacaaaccgctcaagtgttaaaacacccgagcctgtcgtcccaaccgcacctgagcctcatccaacgacttccaccgaccagccagtcacaccgaagctgacttcccgggctacccggcgcaaaacaaatcggtctagtgtaaaaactcctaaacctgtcgagcctgccgctagtgatctggagccattcacacctacagaccaatcagtgacgcccgaagccatcgctcaaggcggccagagtaaaacgctacggagcagcacagtccgcgccatgcctgttcctactacgcctgaattccagtcaccagtaacaaccgaccaacccatctctcctgagccgattacccaaccgtcttgtataaagcgacagagagcagcagggaaccccggaagcctggccgcgcctatcgatcacaaaccttgttcagccccattggagcctaaatcacaggccagcagaaaccagaggtggggcgccgtccgcgcggccgagtcactcacggccatacctgagcccgcttccccccagctgctggagactcctatccacgcatcacagatccagaaggtggagcccgccggccgcagtcgattcactccagaactgcagccaaaggcatcccagagccgaaaaaggagcttggccacaatggattcccctcctcaccagaaacagccgcagaggggcgaagtctctcagaagaccgtgattatcaaggaagaagaggaggatacagccgaaaaacctgggaaagaggaagacgtagtcacccccaaacccgggaagagaaagcgggaccaagcagaagaagaacctaaccgtatacccagccggtccctccggcggactaagctcaaccaggagtcaaccgccccgaaggttctatttactggcgtggtagacgcccggggcgagagggcagtattagcactgggggggagcctggccggttcagcagcagaggcctcccacttagtaaccgatcggatccgccggaccgttaagttcctatgtgcactgggacgcggaatacccatactgtcgctggactggctacaccagtcaaggaaggcagggttctttctgccacccgatgaatatgtggtcaccgaccccgaacaggagaagaattttggattctcactgcaggatgccctgtcccgagccagggagaggagattgcttgagggctacgaaatctacgtaacacccggcgtgcagccgcctcctcctcagatgggcgagatcatatcttgctgcggaggcacgtacctcccctcgatgcctcgctcatataaacctcagagagtggtgataacctgccctcaggacttcccccactgttctattcccctgcgggtgggactgccactgttatcacccgagttcctattgacaggggtactgaaacaagaagccaagcctgaagctttcgtactttcccccctggaaatgagttcaacctag

SEQ ID NO: 269670 - DNA, 5478 bp, Artificial Sequence
  derived and/or modified sequence
atggaggacacccaagccatcgactgggatgtagaggaggaggaggaaaccgaacagtccagcgagagcctgcggtgtaatgtggagcctgtgggacgattacacatcttctctggagcccatgggccagaaaaggacttcccactgcatctaggcaagaatgtggtcggacgaatgccagactgcagcgtggctctaccattcccatctattagcaagcagcacgcggaaatcgaaatactggcttgggacaaggcccccattctgagggattgtggctcactaaatggcacacaaatcctgcggcctccgaaggtcttgtctcctggggtgtctcatcgcctcagggaccaggaactgatcctcttcgccgacttgttatgtcaataccatcggttggacgtaagcttacctttcgtctccaggggcccactgaccgttgaagagaccccccgggtgcagggagaaacccagcctcagaggctgcttttggctgaagacagcgaagaggaagtagactttctgtccgaacgacgcatggtcaagaagtctaggaccacctccagcagtgtgattgtgcccgagtctgatgaggaaggccattcaccggtgctcggcgggctgggaccgccgttcgctttcaacctgaactctgacacggacgtcgaggaaggtcagcagcctgcgaccgaagaggcatcaagtgctgcacgcaggggcgctaccgtcgaggcaaaacagagcgaagcggaagtggtgacagaaattcaacttgagaaggaccagccgctggtcaaagaaagggacaacgacacaaaagtaaagcggggagcggggaacggggtggttccggctggggtaatcttggaacgaagtcagcctccaggcgaggatagcgatactgatgtggatgacgatagtaggccccccggtcgacctgccgaggtgcacttggaaagagctcagccttttggttttatcgactctgacacagacgccgaagaagaaaggatacccgccacaccagtggttatcccgatgaagaaaagaaaaattttccacggcgtcgggacacggggcccaggggcaccagggttggcccacctgcaagagagtcaggccgggtctgataccgacgtggaagaggggaaggcgccccaagccgttccactggaaaagtctcaggcttctatggtaataaactctgacactgacgacgaggaagaagtctccgccgccttgactctagctcacttgaaagagtctcagcccgccatctggaaccgcgatgccgaagaagatatgccccagcgtgtcgtcttgctgcaacggagccagacaaccaccgagagagattccgacaccgatgtggaggaggaggagctgccagttgagaatcgggaagctgtgctcaaagatcatactaagattagggctcttgtgcgcgcgcattcagaaaaggatcagcccccatttggggatagtgacgactctgtggaggccgacaagagcagccctggtatacacctcgagcgtagtcaagccagcacgacagtggacatcaatactcaagttgagaaggaagtgccaccaggcagcgcaataatccacattaagaagcaccaggtgtccgtggaggggacgaaccagaccgatgtgaaagctgtgggcggaccagcaaagttgctagtggtaagtcttgaggaggcctggcctctgcacggagattgtgaaactgacgcagaagaggggacctcacttacagctagcgtagttgccgacgtgaggaaatcacagttgcctgctgagggggacgccggcgctgagtgggctgccgctgtattgaagcaagagcgggcccatgaggttggcgcccaaggtggtccacccgtggcacaggttgagcaggatctcccgatctcccgagaaaacctgaccgatctcgttgtggacaccgatactctgggtgagtctacccagccccagagggaaggcgctcaagtgcccaccggtcgtgagagggaacagcacgttgggggtaccaaagattcggaggacaactacggagactctgaggatctggatctgcaggccacccagtgtttcctggagaaccaagggctggaagccgttcagagtatggaagacgaacccactcaggcctttatgctcactccaccgcaggaacttgggccttcacactgttcattccagacaacaggtctgttgaactgcaaaatgccacccgctgagaaagccagcagaatcagagctgctgagaaggttagcaggggagatcaggagtccccggatgcatgtctcccacccactgtacctgaagctccagctccgcctcagaagcccttgaatagccagagccagaaacaccttgcccctcctcccttgctcagcccactcctgccttcgatcaagccaaccgtgaggaagacccgccaagatggtagccaggaggcccctgaggcccctctctctagcgagctcgaaccctttcatccaaagccaaagatcagaactaggaagtcatcccggatgacacctttcccagcgacttccgccgccccggaaccacatccgagcactagtacagctcaacctgtcacccccaaacctacgtctcaggcgaccaggagtcgcactaatagaagcagtgtcaaaacgcctgagcccgttgtgcctaccgcgcccgaattacagcccagtacctccacagaccaaccggtgacctccgagccaacctcccaggtgacgcggggtcggaagagccgaagtagtgttaagaccccagagactgtcgttccaacagcgcttgaactgcagccatcaacctccacagatcgacccgtcacgagcgagcccacatcacaggctactagaggaaggaaaaaccgatcctccgtcaaaacacccgagcccgtcgtcccaacggccccagaattacagccgtccacgagtaccgaccagcccgtgaccagcgaaccgacataccaggccacgaggggcagaaagaatcgaagctcggtaaagacgccagagcccgtggtgcccacagcacctgagctgcgccccagcacgtcaacagataggccggtgacgcccaaacccactagtagaacaactaggtccaggacaaatatgtcaagcgttaaaacacctgaaaccgtcgtgccgactgctccggaattacagatttcaaccagtacagatcagccagtgacgcctaaacctacctcaaggaccacaagatcacgcaccaatatgtcctccgtgaaaaaccctgagagcactgtgccaatcgccccagagctccccccgtctacctcaaccgaacaaccagtcactccggagcccactagtagagctacacgcggccggaagaaccgttcaagcgggaagacccccgagacattggtccctactgccccaaagctggaaccgagcaccagcaccgaccaacctgtaactccagaacctaccagccaggctacaaggggtcgaactaaccgatcaagcgtgaaaactcctgagaccgtggttccaaccgcaccagagctccaaccaagtacttccacagaccagccagtgactcctgaaccgactagtcaggcaactcggggacgcacagataggtccagcgtaaagacccctgaaacagtagtccccactgcgcccgaacttcaggcatcagctagcaccgatcaaccagtgacttctgagcctacctctagaaccacgagaggcaggaagaatagatcaagcgttaagacccctgaaaccgtagtgcccgccgcgcctgaactgcagccatcgacctctaccgaccagccagtcacccctgagcccacgtcgagagctacgcgcggacggaccaaccgctcctcagtgaagacccctgagtctatcgttcccatcgcccctgaactgcagccttcaacgagccgcaaccagctggtgactcctgaacctactagccgcgcgacacggtgcagaaccaatcgctcgagtgtaaaaacgcctgagcctgtcgtgcccactgcaccggaaccccaccctacaacatccactgatcagccggtgacaccaaagctgacaagccgagcaacgaggcgaaaaacgaaccgatccagcgtcaagaccccaaagccagttgaaccagctgcctctgacctggaaccgtttactcccacggaccaaagtgtgacgccagaagccatagcgcaggggggtcagtcgaagacactgcgaagctctacagttagggctatgcctgtgccaaccacgcccgaatttcagtccccagtaacaacggatcaacctatttcccccgaaccaatcacgcagccatcttgcatcaaacgccaaagggccgctggtaaccctggttcactcgctgccccaattgaccacaagccatgttctgcgccgctggaaccaaagtctcaggcctctaggaatcaacgctggggtgccgtcagagctgctgagagtctgacggcaatccctgaacctgcatcaccccagctattggagacacctattcatgcctcccagattcaaaaggtcgaacctgcaggccgtagtcgctttactcccgagctacagccgaaggcctcgcagtctcgcaagaggagcctggctacaatggacagcccacctcaccagaagcaacctcagagaggggaagtgtctcaaaaaactgttatcataaaagaagaggaggaggataccgctgagaagccgggcaaggaggaagatgtcgtcactccaaaacctggtaagaggaaacgcgatcaggcagaagaggaacccaaccggattccaagtaggagtcttagacgcacaaagctgaatcaggaaagcaccgccccaaaggtcttgtttaccggcgtagtagatgcccgcggggaacgagcagttttggccctggggggcagcttggccggctccgctgctgaagcaagccacctggtgaccgaccgcatacgacgcaccgtgaagttcctgtgtgcccttggcagaggaatccccatcctcagcctggactggctgcatcaaagcagaaaagccgggttctttctgcctccggacgagtacgttgtgactgatcctgagcaggagaagaacttcgggttctctctgcaggacgcactttcaagagcccgggaacgccgactactcgaaggatacgaaatatacgtgacacccggcgtacaaccgcctccaccccaaatgggggagatcatctcctgctgcggaggaacttatctgccgagcatgcctagaagctacaagcctcagcgtgtcgtgataacctgcccccaggacttcccccactgctctataccactgcgtgtaggtttacctctgctgtctccggaattcttgttgaccggtgtcctcaaacaggaagctaagcccgaagccttcgtcctgagccccctcgagatgagctccacttag

SEQ ID NO: 269671 - DNA, 5478 bp, Artificial Sequence
  derived and/or modified sequence
atggaggacacccaggccatcgactgggatgtggaggaggaggaggagacagagcagagcagcgagagcctgcgctgcaatgtggagcctgtgggccgcctgcacatcttcagcggggcccacggccctgagaaggacttccccctgcacctgggcaagaatgtggtgggccgcatgccagactgcagcgtggccctgcccttccccagcatcagcaagcagcacgccgagattgagatcctggcctgggacaaggcccccatcctgcgggactgtggcagcctgaatggcacccagatcctgcggccccccaaggtgctgagccctggggtgagccaccggctgcgggaccaggagctgatcctgtttgctgacctgctgtgccagtaccaccggctggatgtgtccctgccctttgtgtcccggggccccctgactgtggaggagaccccccgggtgcagggcgagacccagccccagaggctgctgctggccgaggacagcgaggaggaggtggacttcctgtctgagaggaggatggtgaagaagagcaggaccaccagcagcagcgtcatcgtgcctgagagtgatgaggagggccacagccctgtgctgggcggcctgggccccccatttgccttcaacctgaacagcgacacagatgtggaggagggccagcagcctgccacagaggaggccagcagcgctgcccggcggggggccaccgtggaggccaagcagagcgaggccgaggtggtgacagagatccagctggagaaggaccagcccctggtgaaggagcgggacaatgacaccaaggtgaagagaggagctggaaatggagtggtgcctgctggggtcatcctggagaggagccagcccccaggagaagattctgacacagatgtggatgatgacagcaggcctcctggccggcctgctgaggtgcacctggagcgggcccagcccttcggcttcatcgacagcgacacagatgctgaggaggagcgcatcccagccacccctgtggtgatccccatgaagaagaggaagatcttccacggcgtgggcacccggggccctggggcccctggcctggcccacctgcaggagagccaggccggcagtgacacagatgtggaggagggcaaggccccccaggccgtgcccctggagaagagccaggcctccatggtgatcaacagcgacacagatgatgaggaggaggtgtctgctgccctgaccctggcccacctgaaggagagccagcctgccatctggaacagagatgctgaggaggacatgccccagagggtggtgctgctgcagaggagccagaccaccacagagcgggacagcgacacagatgtggaggaggaggagctgcctgtggagaaccgggaggccgtgctgaaggaccacaccaagatccgggccctggtgcgggcccacagcgagaaggaccagcccccatttggagacagtgatgacagcgtggaggccgacaagagcagccctggcatccacctggagaggagccaggccagcaccaccgtggacatcaacacccaggtggagaaggaggtgcccccaggcagcgccatcatccacatcaagaagcaccaggtgtctgtggagggcaccaaccagacagatgtgaaggctgtgggcggccctgccaagctgctggtggtgtccctggaggaggcctggcccctgcacggggactgtgaaacagatgctgaggagggcaccagcctgacagcctctgtggtggctgatgtgaggaagagccagctgcctgcagaaggagatgctggagctgagtgggccgctgctgtgctgaagcaggagcgggcccacgaggtgggcgcccagggcggcccccctgtggcccaggtggagcaggacctgcccatcagccgggagaacctgacagacctggtggtggacacagacaccctgggggagagcacccagccccagcgggagggcgcccaggtgcccaccggccgggagcgggagcagcacgtgggcggcaccaaggacagcgaggacaactacggggacagcgaggacctggacctgcaggccacccagtgcttcctggagaaccagggcctggaggccgtgcagagcatggaggatgagcccacccaggccttcatgctgaccccaccccaggagctgggccccagccactgcagcttccagaccaccggcctgctgaactgcaagatgcccccagctgagaaggccagccgcatccgggctgctgagaaggtgtccagaggagaccaggagagcccagatgcctgcctgcccccaacagtgcctgaggccccagccccaccccagaagcccctgaacagccagagccagaagcacctggcccccccacccctgctgagccccctgctgcccagcatcaagcccaccgtgaggaagacccggcaggacggcagccaggaggcccctgaggcccccctgagcagcgagctggagcccttccaccccaagcccaagatccgcaccaggaagagcagcaggatgacccccttccctgccaccagcgctgcccctgagccccaccccagcaccagcacagcccagcctgtgacccccaagcccaccagccaggccaccaggagcaggaccaacagaagctctgtgaagaccccagagcctgtggtgcccacagcccctgagctgcagcccagcaccagcacagaccagcctgtgaccagcgagcccaccagccaggtgacccggggcaggaagagccgcagctctgtgaagaccccagagaccgtggtgcccacagccctggagctgcagcccagcaccagcacagacaggcctgtgaccagcgagcccaccagccaggccacccggggcaggaagaacagaagctctgtgaagaccccagagcctgtggtgcccacagcccctgagctgcagcccagcaccagcacagaccagcctgtgaccagcgagcccacctaccaggccacccggggcaggaagaacagaagctctgtgaagaccccagagcctgtggtgcccacagcccctgagctgcggcccagcaccagcacagacaggcctgtgacccccaagcccaccagcaggaccaccaggagcaggaccaacatgagctctgtgaagaccccagagaccgtggtgcccacagcccctgagctgcagatcagcaccagcacagaccagcctgtgacccccaagcccaccagcaggaccaccaggagcaggaccaacatgagctctgtgaagaaccctgagagcacagtgcccatcgcccctgagctgccccccagcaccagcacagagcagcctgtgaccccagagcccaccagccgggccacccggggcaggaagaacagaagcagcggcaagaccccagagaccctggtgcccacagcccccaagctggagcccagcaccagcacagaccagcctgtgaccccagagcccaccagccaggccacccggggccgcaccaacagaagctctgtgaagaccccagagaccgtggtgcccacagcccctgagctgcagcccagcaccagcacagaccagcctgtgaccccagagcccaccagccaggccacccggggccgcacagacaggagctctgtgaagaccccagagaccgtggtgcccacagcccctgagctgcaggccagcgccagcacagaccagcctgtgaccagcgagcccaccagcaggaccacccggggcaggaagaacagaagctctgtgaagaccccagagaccgtggtgcctgctgcccctgagctgcagcccagcaccagcacagaccagcctgtgaccccagagcccaccagccgggccacccggggccgcaccaacagaagctctgtgaagaccccagagagcatcgtgcccatcgcccctgagctgcagcccagcaccagcaggaaccagctggtgaccccagagcccaccagccgggccacccgctgcaggaccaacagaagctctgtgaagaccccagagcctgtggtgcccacagcccctgagccccaccccaccaccagcacagaccagcctgtgacccccaagctgaccagccgggccaccaggaggaagaccaacagaagctctgtgaagacccccaagcctgtggagcctgctgccagtgacctggagcccttcacccccacagaccagagcgtgaccccagaggccatcgcccagggcggccagagcaagaccctgcggagcagcacagtgcgggccatgcctgtgcccaccaccccagagttccagagccctgtgaccacagaccagcccatcagccctgagcccatcacccagcccagctgcatcaagaggcagagagctgctggcaaccctggcagcctggccgcccccatcgaccacaagccctgcagcgcccccctggagcccaagagccaggccagcaggaaccagcgctggggcgctgtgcgggctgctgagagcctgacagccatccctgagcccgccagcccccagctgctggagacccccatccacgccagccagatccagaaggtggagcccgccggccgcagccgcttcaccccagagctgcagcccaaggccagccagagcaggaagaggagcctggccaccatggacagccccccccaccagaagcagccccagagaggagaggtgtcccagaagacagtcatcatcaaggaggaggaggaggacacagctgagaagccaggcaaggaggaggatgtggtgacccccaagccaggcaagaggaagagggaccaggccgaggaggagcccaaccgcatccccagccgcagcctgcggaggaccaagctgaaccaggagagcacagcccccaaggtgctcttcaccggggtggtggatgcccggggggagagagctgtgctggccctgggcggcagcctggccggcagcgctgctgaggccagccacctggtgacagaccgcatccggaggacagtgaagttcctgtgtgccctgggccggggcatccccatcctgagcctggactggctgcaccagagcaggaaggccggcttcttcctgcccccagatgaatatgtggtgacagatcctgagcaggagaagaactttggcttcagcctgcaggatgccctgagccgggcccgggagcggcggctgctggagggctatgagatctacgtgaccccaggagtgcagcccccaccaccccagatgggagagatcatcagctgctgcggcggcacctacctgcccagcatgcccaggagctacaagccccagagggtggtgatcacctgcccccaggacttcccccactgcagcatccccctgcgggtgggcctgcccctgctgagccctgagttcctgctgactggagtgctgaagcaggaggccaagccagaggcctttgtgctgagccccctggagatgagcagcacctag

SEQ ID NO: 269672 - DNA, 4968 bp, Artificial Sequence
  derived and/or modified sequence
atgtaccaccggctggatgtgtccctgccctttgtgtcccggggccccctgactgtggaggagaccccccgggtgcagggcgagacccagccccagaggctgctgctggccgaggacagcgaggaggaggtggacttcctgtctgagaggaggatggtgaagaagagcaggaccaccagcagcagcgtcatcgtgcctgagagtgatgaggagggccacagccctgtgctgggcggcctgggccccccatttgccttcaacctgaacagcgacacagatgtggaggagggccagcagcctgccacagaggaggccagcagcgctgcccggcggggggccaccgtggaggccaagcagagcgaggccgaggtggtgacagagatccagctggagaaggaccagcccctggtgaaggagcgggacaatgacaccaaggtgaagagaggagctggaaatggagtggtgcctgctggggtcatcctggagaggagccagcccccaggagaagattctgacacagatgtggatgatgacagcaggcctcctggccggcctgctgaggtgcacctggagcgggcccagcccttcggcttcatcgacagcgacacagatgctgaggaggagcgcatcccagccacccctgtggtgatccccatgaagaagaggaagatcttccacggcgtgggcacccggggccctggggcccctggcctggcccacctgcaggagagccaggccggcagtgacacagatgtggaggagggcaaggccccccaggccgtgcccctggagaagagccaggcctccatggtgatcaacagcgacacagatgatgaggaggaggtgtctgctgccctgaccctggcccacctgaaggagagccagcctgccatctggaacagagatgctgaggaggacatgccccagagggtggtgctgctgcagaggagccagaccaccacagagcgggacagcgacacagatgtggaggaggaggagctgcctgtggagaaccgggaggccgtgctgaaggaccacaccaagatccgggccctggtgcgggcccacagcgagaaggaccagcccccatttggagacagtgatgacagcgtggaggccgacaagagcagccctggcatccacctggagaggagccaggccagcaccaccgtggacatcaacacccaggtggagaaggaggtgcccccaggcagcgccatcatccacatcaagaagcaccaggtgtctgtggagggcaccaaccagacagatgtgaaggctgtgggcggccctgccaagctgctggtggtgtccctggaggaggcctggcccctgcacggggactgtgaaacagatgctgaggagggcaccagcctgacagcctctgtggtggctgatgtgaggaagagccagctgcctgcagaaggagatgctggagctgagtgggccgctgctgtgctgaagcaggagcgggcccacgaggtgggcgcccagggcggcccccctgtggcccaggtggagcaggacctgcccatcagccgggagaacctgacagacctggtggtggacacagacaccctgggggagagcacccagccccagcgggagggcgcccaggtgcccaccggccgggagcgggagcagcacgtgggcggcaccaaggacagcgaggacaactacggggacagcgaggacctggacctgcaggccacccagtgcttcctggagaaccagggcctggaggtgcagagcatggaggatgagcccacccaggccttcatgctgaccccaccccaggagctgggccccagccactgcagcttccagaccaccggcctgctgaactgcaagatgcctcctgctgagaaggccagccgcatccgggctgctgagaaggtgtccagaggagaccaggagagcccagatgcctgcctgccccccaccgtgcctgaggccccagccccaccccagaagcccctgaacagccagagccagaagcacctggcccccccacccctgctgagccccctgctgcccagcatcaagcccaccgtgaggaagacccggcaggacggcagccaggaggcccctgaggcccccctgagcagcgagctggagcccttccaccccaagcccaagatccgcaccaggaagagcagcaggatgacccccttccctgccaccagcgctgcccctgagccccaccccagcaccagcacagcccagcctgtgacccccaagcccaccagccaggccaccaggagcaggaccaacagaagctctgtgaagaccccagagcctgtggtgcccacagcccctgagctgcagcccagcaccagcacagaccagcctgtgaccagcgagcccaccagccaggtgacccggggcaggaagagccgcagctctgtgaagaccccagagaccgtggtgcccacagccctggagctgcagcccagcaccagcacagacaggcctgtgaccagcgagcccaccagccaggccacccggggcaggaagaacagaagctctgtgaagaccccagagcctgtggtgcccacagcccctgagctgcagcccagcaccagcacagaccagcctgtgaccagcgagcccacctaccaggccacccggggcaggaagaacagaagctctgtgaagaccccagagcctgtggtgcccacagcccctgagctgcggcccagcaccagcacagacaggcctgtgacccccaagcccaccagcaggaccaccaggagcaggaccaacatgagctctgtgaagaaccctgagagcacagtgcccatcgcccctgagctgccccccagcaccagcacagagcagcctgtgaccccagagcccaccagccgggccacccggggcaggaagaacagaagcagcggcaagaccccagagaccctggtgcccacagcccccaagctggagcccagcaccagcacagaccagcctgtgaccccagagcccaccagccaggccacccggggccgcaccaacagaagctctgtgaagaccccagagaccgtggtgcccacagcccctgagctgcagcccagcaccagcacagaccagcctgtgaccccagagcccaccagccaggccacccggggccgcacagacaggagctctgtgaagaccccagagaccgtggtgcccacagcccctgagctgcaggccagcgccagcacagaccagcctgtgaccagcgagcccaccagcaggaccacccggggcaggaagaacagaagctctgtgaagaccccagagaccgtggtgcctgctgcccctgagctgcagcccagcaccagcacagaccagcctgtgaccccagagcccaccagccgggccacccggggccgcaccaacagaagctctgtgaagaccccagagagcatcgtgcccatcgcccctgagctgcagcccagcaccagcaggaaccagctggtgaccccagagcccaccagccgggccacccgctgcaggaccaacagaagctctgtgaagaccccagagcctgtggtgcccacagcccctgagccccaccccaccaccagcacagaccagcctgtgacccccaagctgaccagccgggccaccaggaggaagaccaacagaagctctgtgaagacccccaagcctgtggagcctgctgccagtgacctggagcccttcacccccacagaccagagcgtgaccccagaggccatcgcccagggcggccagagcaagaccctgcggagcagcacagtgcgggccatgcctgtgcccaccaccccagagttccagagccctgtgaccacagaccagcccatcagccctgagcccatcacccagcccagctgcatcaagaggcagagagctgctggcaaccctggcagcctggccgcccccatcgaccacaagccctgcagcgcccccctggagcccaagagccaggccagcaggaaccagcgctggggcgctgtgcgggctgctgagagcctgacagccatccctgagcccgccagcccccagctgctggagacccccatccacgccagccagatccagaaggtggagcccgccggccgcagccgcttcaccccagagctgcagcccaaggccagccagagcaggaagaggagcctggccaccatggacagccccccccaccagaagcagccccagagaggagaggtgtcccagaagacagtcatcatcaaggaggaggaggaggacacagctgagaagccaggcaaggaggaggatgtggtgacccccaagccaggcaagaggaagagggaccaggccgaggaggagcccaaccgcatccccagccgcagcctgcggaggaccaagctgaaccaggagagcacagcccccaaggtgctcttcaccggggtggtggatgcccggggggagagagctgtgctggccctgggcggcagcctggccggcagcgctgctgaggccagccacctggtgacagaccgcatccggaggacagtgaagttcctgtgtgccctgggccggggcatccccatcctgagcctggactggctgcaccagagcaggaaggccggcttcttcctgcccccagatgaatatgtggtgacagatcctgagcaggagaagaactttggcttcagcctgcaggatgccctgagccgggcccgggagcggcggctgctggagggctatgagatctacgtgaccccaggagtgcagcccccaccaccccagatgggagagatcatcagctgctgcggcggcacctacctgcccagcatgcccaggagctacaagccccagagggtggtgatcacctgcccccaggacttcccccactgcagcatccccctgcgggtgggcctgcccctgctgagccctgagttcctgctgactggagtgctgaagcaggaggccaagccagaggcctttgtgctgagccccctggagatgagcagcacctag

SEQ ID NO: 269673 - DNA, 6575 bp, Artificial Sequence
  derived and/or modified sequence
caccatgtctaggaggaccgaggaaaggcgctctggccttaccagacacgtcggacgtctatgacacagcccctctatccgttgccggcagctggcgccagactctctggtcgcggtttggaactgcgcgggaagtgggtggtgggcgggcaagcggtagtgggttgtcccttggagctgcccaatcgacgtgcattattctgttggcgcacggcggccttcaattaccgtctcattaactgatctcagcagcctgggagacaccacctatttgaactctaagggggcggggctttgggtgtgcctccgctcgactggctgcggttgtgaaagacagcggcagaagccaatcagcaaataagctctttttcggcacacgcagtcgctccacctgggtcgcgaccgttactggtggcgcgcgcggggacttaaagtagatcatggaggacacccaggctattgactgggatgttgaagaagaggaggagacagagcaatccagtgaatccttgaggtgtaacgtggagccagtagggcggctacatatctttagtggtgcccatggaccagaaaaagatttcccactacacctcgggaagaatgtggtaggccgaatgcctgactgctctgtggccctgccctttccatctatctccaaacaacatgcagagattgaaatcttagcctgggacaaggcacctatcctccgagactgtgggagccttaatggtactcaaatcctgagacctcctaaggttttgagccctggggtgagtcaccgtctgagggaccaggaattgattctctttgctgacttgctctgccagtaccatcgcctggatgtctctctgccctttgtctcccggggccctctgacagtagaagagacacccagagtacagggagaaactcaaccccagaggcttctgttggctgaggactcggaggaggaagtagattttctttctgaaaggcgtatggtaaaaaaatcaaggaccacatcttcctctgtgatagttccagagagtgatgaagaggggcattccccggtcctgggcggccttgggccgccttttgccttcaatttgaacagtgacacagatgtggaagaaggtcagcaaccagccacagaggaggcctcctcagctgccagaagaggtgccactgtagaggcaaagcagtctgaagctgaagttgtaactgaaatccagcttgaaaaggatcagcctttagtgaaggagagggacaatgatacaaaagtcaagaggggtgcagggaatggggtggttccagctggggtgattctggagaggagccaacctcctggagaggacagtgacacagatgtggatgatgacagcaggcctcctggaaggccagctgaggtccatttggaaagggctcagccttttggcttcatcgacagcgacactgatgcggaagaagagaggatcccagcaaccccagttgtcattcctatgaagaagaggaagatcttccatggagtaggtacaaggggtcctggagcaccaggcctggcccatctgcaggagagccaggctggtagtgatacagatgtggaagaaggcaaggccccacaggctgtccctctggagaaaagccaagcttccatggttatcaacagcgatacagatgacgaggaagaagtctcagcagcgctgactttggcacatctgaaagagagccagcctgctatatggaacagagatgcagaagaggacatgccccaacgtgtggtccttctgcagcgaagccaaaccaccactgagagagacagtgacacagacgtggaggaggaagagctcccagtggaaaatagagaagctgtcctcaaggatcacacaaagattagagcccttgttagagcacattcagaaaaggaccaacctccttttggggacagtgatgacagtgtggaagcagataagagctcacctgggatccacctggagagaagccaagcctccaccacagtggacatcaacacacaagtggagaaggaagtcccgccagggtcagccattatacatataaagaagcatcaggtgtctgtggaggggacaaatcaaacagatgtgaaagcagttgggggaccagcaaagctgcttgtggtatctctagaggaagcctggcctctgcatggggactgtgaaacagatgcagaggagggcacctccctaacagcctcagtagttgcagatgtaagaaagagccagcttccagcagaaggggatgctggggcagagtgggctgcagctgttcttaagcaggagagagctcatgaggtgggggcccagggtgggccacctgtggcacaagtggagcaggacctccctatctcaagagagaacctcacagatctggtggtggacacagacactctaggggaatccacccagccacagagagagggagcccaggtccccacaggaagggagagagaacaacatgtgggtgggaccaaggactctgaagacaactatggtgattctgaagatctggacctacaagctacccagtgctttctggagaatcagggcctggaagcagtccagagcatggaggatgaacctacccaggccttcatgttgactccaccccaagagcttggcccttcccattgcagcttccagacaacaggcctcctgaattgcaagatgccacctgctgagaaggcttccaggatcagagctgctgagaaggtttccaggggcgatcaggaatctccagatgcttgtctgcctcctacagtacctgaagccccagccccaccccaaaagccccttaactctcagagccagaaacatcttgcacctccgccccttctttctccccttttaccttctatcaagccaaccgttcgtaagaccaggcaagatgggagtcaggaagctccagaggctcccttgtcctcagagctggagcctttccacccaaagcctaaaattagaactcggaagtcctccagaatgacaccctttccagctacctctgctgcccctgagccccacccttccacctccacagcccagccagtcactcccaagcccacatctcaggccactaggagcaggacaaataggtcctctgtcaagacccctgaaccagttgtccccacagcccctgagctccagccttccacctccacagaccagcctgtcacctctgagcccacatctcaggttactaggggaagaaaaagtagatcctctgtcaagacccctgaaacagttgtgcccacagcccttgagctccagccttccacctccaccgaccgacctgtcacctctgaacccacctctcaggctactaggggaagaaaaaatagatcctctgtcaagacccctgaaccagttgtccccacagcccctgagctccagccttccacctccacagaccagcctgtcacttctgagcccacatatcaggctactaggggaagaaaaaatagatcctctgtcaagacccctgaaccagttgtgcccacagcccctgagctccggccttccacctccacagaccgacctgtcacccccaagcccacatctcggaccactaggagcaggacaaatatgtcctctgtcaagacccctgaaacagttgtccccacagcccctgagctccagatttccacctccacagaccaacctgtcacccctaagcccacatctcggaccactaggagcaggacaaatatgtcctctgtgaagaaccctgaatcaactgtccctatagcccctgagctcccaccttccacctccacagagcagcctgtcacccctgagcccacatctcgggctactaggggaagaaaaaatagatcctctggcaagacccctgaaacacttgtccccacagcccctaagctcgagccttccacttccacagaccaacctgtcactcctgagcccacatctcaggccaccaggggcaggacaaataggtcctctgtgaagacccctgaaacagttgtccccacagcccctgagctccagccttccacctccacagaccagcctgttacccctgagcctacgtctcaggctactaggggaagaacagatagatcctctgtcaagactcctgaaacagttgtccccacagcccctgagctacaggcttccgcctccacagaccagcctgtcacctctgagcccacatctcggaccactaggggaagaaaaaatcggtcctctgtcaagacccctgaaacagttgtgcccgcagcccctgagctccagccttccacctccacagaccaacctgtcacccctgagcccacatctcgggccactaggggcaggacaaataggtcctctgtcaagacccctgaatcaattgtccctatagcccctgagcttcagccttccacctccagaaaccagcttgtcacccctgagcccacatctcgggccactaggtgcaggacaaataggtcctctgtcaagacccctgagccagttgtccccacagcccctgagccccatcctaccacctccacagaccagcctgtcacccccaagctcacatctagggccactaggagaaagacaaataggtcctctgtcaagactcccaaaccagttgaaccagcagcctctgatcttgagccttttacccccacagaccagtccgtcacccctgaggccatagctcagggtggtcagagcaaaacactgaggtcttccacagtaagagctatgccggttcctaccacccctgaattccaatctcctgtcaccacagaccagcctatttcccctgagcctattactcaacccagttgcatcaagaggcagagagccgctgggaaccctggctccctcgcagctcccattgaccataagccttgctctgcacccttggaacctaaatcccaggcctcaaggaaccaaagatggggagcagtgagagcagctgaatcccttacagccattcctgagcctgcctctccccagcttcttgagacaccaattcatgcctcccagatccaaaaggtggaaccagcaggtagatctaggttcaccccggagctccagcctaaggcctctcaaagccgcaagaggtctttagctaccatggattcaccaccacatcaaaaacagccccaaagaggggaagtctcccagaagacagtgattatcaaggaagaggaagaagatactgcagagaagccagggaaggaagaggatgtcgtgactccaaaaccaggcaagagaaagagagaccaggcagaggaggagcccaacagaataccaagccgcagcctccgacggaccaaacttaaccaagaatcaacagcccccaaagtgctcttcacaggagtggtggatgctcggggagagcgggctgtgctggcactggggggaagtctggctggttcagcggcagaggcttcccacctggtcactgatcgcatccgccggacagtcaagttcctgtgtgccctggggcggggaatccccattctgtccctggactggctgcatcagtcccgcaaggctggtttcttcttacccccggatgaatatgtggtgaccgaccctgagcaagagaagaactttggctttagccttcaagacgcactgagcagggctcgggagcgaaggctgctagagggctatgagatctatgtgacccctggagtccagccaccaccacctcagatgggagagattattagctgctgtggaggcacatacctacccagcatgcctcggtcctataagcctcagagagttgtgatcacatgccctcaggacttccctcattgctccattccactacgggttgggctgcccctcctctcgcctgagttcctgctgactggagtgctgaagcaggaagccaagccagaggcctttgtcctctcccctttggagatgtcatccacctgagaactccactacccttttccctcccagaccacgaattagaagatatgtggaagaaagaactcagggcgttagaaaggattggggtatattgatacaacttgtcctggaacatgggtgggaccagaaatctttatgaataaatgaaaagataagggatttggaagccacaggttgttttttgtttgtttgtttgtttttttaatggccattttattttatttgtatttatagttttttatttgtatagatttaggggatacaagatttcttacatgcatgtattaaatggccattttaaaattagctagtttcatgctcagatgtcataagtggcagctatctttagccagactgttgcagttattgctcgatgccactcatggtgtcctacctcctatttggaaaccatctctatttttttcttactgagattcttactttggggtcaggaacttgaagggatgcttggagtgagtagatttgagggtccagttatggagtgctactaaaacattttcttctctcctggcctctggaagcatctttagctttgactttgggcaagtctctgtacttttctggccagcttttccaggatttataaaattagagcttcggcttgacctctgtgataaataaatattcactctgtgcctt

SEQ ID NO: 269674 - DNA, 5648 bp, Artificial Sequence
  derived and/or modified sequence
ccacggctccccgggagccatcttggttcccccagaaggcgggaggggcgtaccttgggtgcgactgggcggaggtgacttggaagttcgcttctcggactgtaatactcatccttacctggcgccccgctccgagtttagatcatggaggacacccaggctattgactgggatgttgaagaagaggaggagacagagcaatccagtgaatccttgaggtgtaacgtggagccagtagggcggctacatatctttagtggtgcccatggaccagaaaaagatttcccactacacctcgggaagaatgtggtaggccgaatgcctgactgctctgtggccctgccctttccatctatctccaaacaacatgcagagattgaaatcttagcctgggacaaggcacctatcctccgagactgtgggagccttaatgtaccatcgcctggatgtctctctgccctttgtctcccggggccctctgacagtagaagagacacccagagtacagggagaaactcaaccccagaggcttctgttggctgaggactcggaggaggaagtagattttctttctgaaaggcgtatggtaaaaaaatcaaggaccacatcttcctctgtgatagttccagagagtgatgaagaggggcattccccggtcctgggcggccttgggccgccttttgccttcaatttgaacagtgacacagatgtggaagaaggtcagcaaccagccacagaggaggcctcctcagctgccagaagaggtgccactgtagaggcaaagcagtctgaagctgaagttgtaactgaaatccagcttgaaaaggatcagcctttagtgaaggagagggacaatgatacaaaagtcaagaggggtgcagggaatggggtggttccagctggggtgattctggagaggagccaacctcctggagaggacagtgacacagatgtggatgatgacagcaggcctcctggaaggccagctgaggtccatttggaaagggctcagccttttggcttcatcgacagcgacactgatgcggaagaagagaggatcccagcaaccccagttgtcattcctatgaagaagaggaagatcttccatggagtaggtacaaggggtcctggagcaccaggcctggcccatctgcaggagagccaggctggtagtgatacagatgtggaagaaggcaaggccccacaggctgtccctctggagaaaagccaagcttccatggttatcaacagcgatacagatgacgaggaagaagtctcagcagcgctgactttggcacatctgaaagagagccagcctgctatatggaacagagatgcagaagaggacatgccccaacgtgtggtccttctgcagcgaagccaaaccaccactgagagagacagtgacacagacgtggaggaggaagagctcccagtggaaaatagagaagctgtcctcaaggatcacacaaagattagagcccttgttagagcacattcagaaaaggaccaacctccttttggggacagtgatgacagtgtggaagcagataagagctcacctgggatccacctggagagaagccaagcctccaccacagtggacatcaacacacaagtggagaaggaagtcccgccagggtcagccattatacatataaagaagcatcaggtgtctgtggaggggacaaatcaaacagatgtgaaagcagttgggggaccagcaaagctgcttgtggtatctctagaggaagcctggcctctgcatggggactgtgaaacagatgcagaggagggcacctccctaacagcctcagtagttgcagatgtaagaaagagccagcttccagcagaaggggatgctggggcagagtgggctgcagctgttcttaagcaggagagagctcatgaggtgggggcccagggtgggccacctgtggcacaagtggagcaggacctccctatctcaagagagaacctcacagatctggtggtggacacagacactctaggggaatccacccagccacagagagagggagcccaggtccccacaggaagggagagagaacaacatgtgggtgggaccaaggactctgaagacaactatggtgattctgaagatctggacctacaagctacccagtgctttctggagaatcagggcctggaagtccagagcatggaggatgaacctacccaggccttcatgttgactccaccccaagagcttggcccttcccattgcagcttccagacaacaggcctcctgaattgcaagatgccacctgctgagaaggcttccaggatcagagctgctgagaaggtttccaggggcgatcaggaatctccagatgcttgtctgcctcctacagtacctgaagccccagccccaccccaaaagccccttaactctcagagccagaaacatcttgcacctccgccccttctttctccccttttaccttctatcaagccaaccgttcgtaagaccaggcaagatgggagtcaggaagctccagaggctcccttgtcctcagagctggagcctttccacccaaagcctaaaattagaactcggaagtcctccagaatgacaccctttccagctacctctgctgcccctgagccccacccttccacctccacagcccagccagtcactcccaagcccacatctcaggccactaggagcaggacaaataggtcctctgtcaagacccctgaaccagttgtccccacagcccctgagctccagccttccacctccacagaccagcctgtcacctctgagcccacatctcaggttactaggggaagaaaaagtagatcctctgtcaagacccctgaaacagttgtgcccacagcccttgagctccagccttccacctccaccgaccgacctgtcacctctgaacccacctctcaggctactaggggaagaaaaaatagatcctctgtcaagacccctgaaccagttgtccccacagcccctgagctccagccttccacctccacagaccagcctgtcacttctgagcccacatatcaggctactaggggaagaaaaaatagatcctctgtcaagacccctgaaccagttgtgcccacagcccctgagctccggccttccacctccacagaccgacctgtcacccctaagcccacatctcggaccactaggagcaggacaaatatgtcctctgtgaagaaccctgaatcaactgtccctatagcccctgagctcccaccttccacctccacagagcagcctgtcacccctgagcccacatctcgggctactaggggaagaaaaaatagatcctctggcaagacccctgaaacacttgtccccacagcccctaagctcgagccttccacttccacagaccaacctgtcactcctgagcccacatctcaggccaccaggggcaggacaaataggtcctctgtgaagacccctgaaacagttgtccccacagcccctgagctccagccttccacctccacagaccagcctgttacccctgagcctacgtctcaggctactaggggaagaacagatagatcctctgtcaagactcctgaaacagttgtccccacagcccctgagctacaggcttccgcctccacagaccagcctgtcacctctgagcccacatctcggaccactaggggaagaaaaaatcggtcctctgtcaagacccctgaaacagttgtgcccgcagcccctgagctccagccttccacctccacagaccaacctgtcacccctgagcccacatctcgggccactaggggcaggacaaataggtcctctgtcaagacccctgaatcaattgtccctatagcccctgagcttcagccttccacctccagaaaccagcttgtcacccctgagcccacatctcgggccactaggtgcaggacaaataggtcctctgtcaagacccctgagccagttgtccccacagcccctgagccccatcctaccacctccacagaccagcctgtcacccccaagctcacatctagggccactaggagaaagacaaataggtcctctgtcaagactcccaaaccagttgaaccagcagcctctgatcttgagccttttacccccacagaccagtccgtcacccctgaggccatagctcagggtggtcagagcaaaacactgaggtcttccacagtaagagctatgccggttcctaccacccctgaattccaatctcctgtcaccacagaccagcctatttcccctgagcctattactcaacccagttgcatcaagaggcagagagccgctgggaaccctggctccctcgcagctcccattgaccataagccttgctctgcacccttggaacctaaatcccaggcctcaaggaaccaaagatggggagcagtgagagcagctgaatcccttacagccattcctgagcctgcctctccccagcttcttgagacaccaattcatgcctcccagatccaaaaggtggaaccagcaggtagatctaggttcaccccggagctccagcctaaggcctctcaaagccgcaagaggtctttagctaccatggattcaccaccacatcaaaaacagccccaaagaggggaagtctcccagaagacagtgattatcaaggaagaggaagaagatactgcagagaagccagggaaggaagaggatgtcgtgactccaaaaccaggcaagagaaagagagaccaggcagaggaggagcccaacagaataccaagccgcagcctccgacggaccaaacttaaccaagaatcaacagcccccaaagtgctcttcacaggagtggtggatgctcggggagagcgggctgtgctggcactggggggaagtctggctggttcagcggcagaggcttcccacctggtcactgatcgcatccgccggacagtcaagttcctgtgtgccctggggcggggaatccccattctgtccctggactggctgcatcagtcccgcaaggctggtttcttcttacccccggatgaatatgtggtgaccgaccctgagcaagagaagaactttggctttagccttcaagacgcactgagcagggctcgggagcgaaggctgctagagggctatgagatctatgtgacccctggagtccagccaccaccacctcagatgggagagattattagctgctgtggaggcacatacctacccagcatgcctcggtcctataagcctcagagagttgtgatcacatgccctcaggacttccctcattgctccattccactacgggttgggctgcccctcctctcgcctgagttcctgctgactggagtgctgaagcaggaagccaagccagaggcctttgtcctctcccctttggagatgtcatccacctgagaactccactacccttttccctcccagaccacgaattagaagatatgtggaagaaagaactcagggcgttagaaaggattggggtatattgatacaacttgtcctggaacatgggtgggaccagaaatctttatgaataaatgaaaagataagggatttggaagccacaggttgttttttgtttgtttgtttgtttttttaatggccattttattttatttgtatttatagttttttatttgtatagatt

SEQ ID NO: 269675 - DNA, 1172 bp, Artificial Sequence
  derived and/or modified sequence
caccatgtctaggaggaccgaggaaaggcgctctggccttaccagacacgtcggacgtctatgacacagcccctctatccgttgccggcagctggcgccagactctctggtcgcggtttggaactgcgcgggaagtgggtggtgggcgggcaagcggtagtgggttgtcccttggagctgcccaatcgacgtgcattattctgttggcgcacggcggccttcaattaccgtctcattaactgatctcagcagcctgggagacaccacctatttgaactctaagggggcggggctttgggtgtgcctccgctcgactggctgcggttgtgaaagacagcggcagaagccaatcagcaaataagctctttttcggcacacgcagtcgctccacctgggtcgcgaccgttactggtggcgcgcgcggggacttaaagtagatcatggaggacacccaggctattgactgggatgttgaagaagaggaggagacagagcaatccagtgaatccttgaggtgtaacgtggagccagtagggcggctacatatctttagtggtgcccatggaccagaaaaagatttcccactacacctcgggaagaatgtggtaggccgaatgcctgactgctctgtggccctgccctttccatctatctccaaacaacatgcagagattgaaatcttagcctgggacaaggcacctatcctccgagactgtgggagccttaatggtactcaaatcctgagacctcctaaggttttgagccctggggtgagtcaccgtctgagggaccaggaattgattctctttgctgacttgctctgccagtaccatcgcctggatgtctctctgccctttgtctcccggggccctctgacagtagaagagacacccagagtacagggagaaactcaaccccagaggcttctgttggctgaggactcggaggaggaagtagattttctttctgaaaggcgtatggtaaaaaaatcaaggaccacatcttcctctgtgatagttccagagagtgatgaagaggggcattccccggtcctgggcggccttgggccgccttttgccttcaatttgaacagtgacacagatgtggaagaaggtcagcaaccacacagaggaggcctcctcagctgccagaagaggtgccactgtagaggc

SEQ ID NO: 269676 - DNA, 6575 bp, Artificial Sequence
  derived and/or modified sequence
caccatgtctaggaggaccgaggaaaggcgctctggccttaccagacacgtcggacgtctatgacacagcccctctatccgttgccggcagctggcgccagactctctggtcgcggtttggaactgcgcgggaagtgggtggtgggcgggcaagcggtagtgggttgtcccttggagctgcccaatcgacgtgcattattctgttggcgcacggcggccttcaattaccgtctcattaactgatctcagcagcctgggagacaccacctatttgaactctaagggggcggggctttgggtgtgcctccgctcgactggctgcggttgtgaaagacagcggcagaagccaatcagcaaataagctctttttcggcacacgcagtcgctccacccgggtcgcgaccgttactggtggcgcgcgcggggacttaaagtagatcatggaggacacccaggctattgactgggatgttgaagaagaggaggagacagagcaatccagtgaatccttgaggtgtaacgtggagccagtagggcggctacatatctttagtggtgcccatggaccagaaaaagatttcccactacacctcgggaagaatgtggtaggccgaatgcctgactgctctgtggccctgccctttccatctatctccaaacaacatgcagagattgaaatcttagcctgggacaaggcacctatcctccgagactgtgggagccttaatggtactcaaatcctgagacctcctaaggttttgagccctggggtgagtcaccgtctgagggaccaggaattgattctctttgctgacttgctctgccagtaccatcgcctggatgtctctctgccctttgtctcccggggccctctgacagtagaagagacacccagagtacagggagaaactcaaccccagaggcttctgttggctgaggactcggaggaggaagtagattttctttctgaaaggcgtatggtaaaaaaatcaaggaccacatcttcctctgtgatagttccagagagtgatgaagaggggcattccccggtcctgggcggccttgggccgccttttgccttcaatttgaacagtgacacagatgtggaagaaggtcagcaaccagccacagaggaggcctcctcagctgccagaagaggtgccactgtagaggcaaagcagtctgaagctgaagttgtaactgaaatccagcttgaaaaggatcagcctttagtgaaggagagggacaatgatacaaaagtcaagaggggtgcagggaatggggtggttccagctggggtgattctggagaggagccaacctcctggagaggacagtgacacagatgtggatgatgacagcaggcctcctggaaggccagctgaggtccatttggaaagggctcagccttttggcttcatcgacagcgacactgatgcggaagaagagaggatcccagcaaccccagttgtcattcctatgaagaagaggaagatcttccatggagtaggtacaaggggtcctggagcaccaggcctggcccatctgcaggagagccaggctggtagtgatacagatgtggaagaaggcaaggccccacaggctgtccctctggagaaaagccaagcttccatggttatcaacagcgatacagatgacgaggaagaagtctcagcagcgctgactttggcacatctgaaagagagccagcctgctatatggaacagagatgcagaagaggacatgccccaacgtgtggtccttctgcagcgaagccaaaccaccactgagagagacagtgacacagacgtggaggaggaagagctcccagtggaaaatagagaagctgtcctcaaggatcacacaaagattagagcccttgttagagcacattcagaaaaggaccaacctccttttggggacagtgatgacagtgtggaagcagataagagctcacctgggatccacctggagagaagccaagcctccaccacagtggacatcaacacacaagtggagaaggaagtcccgccagggtcagccattatacatataaagaagcatcaggtgtctgtggaggggacaaatcaaacagatgtgaaagcagttgggggaccagcaaagctgcttgtggtatctctagaggaagcctggcctctgcatggggactgtgaaacagatgcagaggagggcacctccctaacagcctcagtagttgcagatgtaagaaagagccagcttccagcagaaggggatgctggggcagagtgggctgcagctgttcttaagcaggagagagctcatgaggtgggggcccagggtgggccacctgtggcacaagtggagcaggacctccctatctcaagagagaacctcacagatctggtggtggacacagacactctaggggaatccacccagccacagagagagggagcccaggtccccacaggaagggagagagaacaacatgtgggtgggaccaaggactctgaagacaactatggtgattctgaagatctggacctacaagctacccagtgctttctggagaatcagggcctggaagcagtccagagcatggaggatgaacctacccaggccttcatgttgactccaccccaagagcttggcccttcccattgcagcttccagacaacaggcctcctgaattgcaagatgccacctgctgagaaggcttccaggatcagagctgctgagaaggtttccaggggcgatcaggaatctccagatgcttgtctgcctcctacagtacctgaagccccagccccaccccaaaagccccttaactctcagagccagaaacatcttgcacctccgccccttctttctccccttttaccttctatcaagccaaccgttcgtaagaccaggcaagatgggagtcaggaagctccagaggctcccttgtcctcagagctggagcctttccacccaaagcctaaaattagaactcggaagtcctccagaatgacaccctttccagctacctctgctgcccctgagccccacccttccacctccacagcccagccagtcactcccaagcccacatctcaggccactaggagcaggacaaataggtcctctgtcaagacccctgaaccagttgtccccacagcccctgagctccagccttccacctccacagaccagcctgtcacctctgagcccacatctcaggttactaggggaagaaaaagtagatcctctgtcaagacccctgaaacagttgtgcccacagcccttgagctccagccttccacctccaccgaccgacctgtcacctctgaacccacctctcaggctactaggggaagaaaaaatagatcctctgtcaagacccctgaaccagttgtccccacagcccctgagctccagccttccacctccacagaccagcctgtcacttctgagcccacatatcaggctactaggggaagaaaaaatagatcctctgtcaagacccctgaaccagttgtgcccacagcccctgagctccggccttccacctccacagaccgacctgtcacccccaagcccacatctcggaccactaggagcaggacaaatatgtcctctgtcaagacccctgaaacagttgtccccacagcccctgagctccagatttccacctccacagaccaacctgtcacccctaagcccacatctcggaccactaggagcaggacaaatatgtcctctgtgaagaaccctgaatcaactgtccctatagcccctgagctcccaccttccacctccacagagcagcctgtcacccctgagcccacatctcgggctactaggggaagaaaaaatagatcctctggcaagacccctgaaacacttgtccccacagcccctaagctcgagccttccacttccacagaccaacctgtcactcctgagcccacatctcaggccaccaggggcaggacaaataggtcctctgtgaagacccctgaaacagttgtccccacagcccctgagctccagccttccacctccacagaccagcctgttacccctgagcctacgtctcaggctactaggggaagaacagatagatcctctgtcaagactcctgaaacagttgtccccacagcccctgagctacaggcttccgcctccacagaccagcctgtcacctctgagcccacatctcggaccactaggggaagaaaaaatcggtcctctgtcaagacccctgaaacagttgtgcccgcagcccctgagctccagccttccacctccacagaccaacctgtcacccctgagcccacatctcgggccactaggggcaggacaaataggtcctctgtcaagacccctgaatcaattgtccctatagcccctgagcttcagccttccacctccagaaaccagcttgtcacccctgagcccacatctcgggccactaggtgcaggacaaataggtcctctgtcaagacccctgagccagttgtccccacagcccctgagccccatcctaccacctccacagaccagcctgtcacccccaagctcacatctagggccactaggagaaagacaaataggtcctctgtcaagactcccaaaccagttgaaccagcagcgtctgatcttgagccttttacccccacagaccagtccgtcacccctgaggccatagctcagggtggtcagagcaaaacactgaggtcttccacagtaagagctatgccggttcctaccacccctgaattccaatctcctgtcaccacagaccagcctatttcccctgagcctattactcaacccagttgcatcaagaggcagagagccgctgggaaccctggctccctcgcagctcccattgaccataagccttgctctgcacccttggaacctaaatcccaggcctcaaggaaccaaagatggggagcagtgagagcagctgaatcccttacagccattcctgagcctgcctctccccagcttcttgagacaccaattcatgcctcccagatccaaaaggtggaaccagcaggtagatctaggttcaccccggagctccagcctaaggcctctcaaagccgcaagaggtctttagctaccatggattcaccaccacatcaaaaacagccccaaagaggggaagtctcccagaagacagtgattatcaaggaagaggaagaagatactgcagagaagccagggaaggaagaggatgtcgtgactccaaaaccaggcaagagaaagagagaccaggcagaggaggagcccaacagaataccaagccgcagcctccgacggaccaaacttaaccaagaatcaacagcccccaaagtgctcttcacaggagtggtggatgctcggggagagcgggctgtgctggcactggggggaagtctggctggttcagcggcagaggcttcccacctggtcactgatcgcatccgccggacagtcaagttcctgtgtgccctggggcggggaatccccattctgtccctggactggctgcatcagtcccgcaaggctggtttcttcttacccccggatgaatatgtggtgaccgaccctgagcaagagaagaactttggctttagccttcaagacgcactgagcagggctcgggagcgaaggctgctagagggctatgagatctatgtgacccctggagtccagccaccaccacctcagatgggagagattattagctgctgtggaggcacatacctacccagcatgcctcggtcctataagcctcagagagttgtgatcacatgccctcaggacttccctcattgctccattccactacgggttgggctgcccctcctctcgcctgagttcctgctgactggagtgctgaagcaggaagccaagccagaggcctttgtcctctcccctttggagatgtcatccacctgagaactccactacccttttccctcccagaccacgaattagaagatatgtggaagaaagaactcagggcgttagaaaggattggggtatattgatacaacttgtcctggaacatgggtgggaccagaaatctttatgaataaatgaaaagataagggatttggaagccacaggttgttttttgtttgtttgtttgtttttttaatggccattttattttatttgtatttatagttttttatttgtatagatttaggggatacaagatttcttacatgcatgtattaaatggccattttaaaattagctagtttcatgctcagatgtcataagtggcagctatctttagccagactgttgcagttattgctcgatgccactcatggtgtcctacctcctatttggaaaccatctctatttttttcttactgagattcttactttggggtcaggaacttgaagggatgcttggagtgagtagatttgagggtccagttatggagtgctactaaaacattttcttctctcctggcctctggaagcatctttagctttgactttgggcaagtctctgtacttttctggccagcttttccaggatttataaaattagagcttcggcttgacctctgtgataaataaatattcactctgtgcctt

SEQ ID NO: 269677 - DNA, 6575 bp, Artificial Sequence
  derived and/or modified sequence
caccatgtctaggaggaccgaggaaaggcgctctggccttaccagacacgtcggacgtctatgacacagcccctctatccgttgccggcagctggcgccagactctctggtcgcggtttggaactgcgcgggaagtgggtggtgggcgggcaagcggtagtgggttgtcccttggagctgcccaatcgacgtgcattattctgttggcgcacggcggccttcaattaccgtctcattaactgatctcagcagcctgggagacaccacctatttgaactctaagggggcggggctttgggtgtgcctccgctcgactggctgcggttgtgaaagacagcggcagaagccaatcagcaaataagctctttttcggcacacgcagtcgctccacccgggtcgcgaccgttactggtggcgcgcgcggggacttaaagtagatcatggaggacacccaggctattgactgggatgttgaagaagaggaggagacagagcaatccagtgaatccttgaggtgtaacgtggagccagtagggcggctacatatctttagtggtgcccatggaccagaaaaagatttcccactacacctcgggaagaatgtggtaggccgaatgcctgactgctctgtggccctgccctttccatctatctccaaacaacatgcagagattgaaatcttagcctgggacaaggcacctatcctccgagactgtgggagccttaatggtactcaaatcctgagacctcctaaggttttgagccctggggtgagtcaccgtctgagggaccaggaattgattctctttgctgacttgctctgccagtaccatcgcctggatgtctctctgccctttgtctcccggggccctctgacagtagaagagacacccagagtacagggagaaactcaaccccagaggcttctgttggctgaggactcggaggaggaagtagattttctttctgaaaggcgtatggtaaaaaaatcaaggaccacatcttcctctgtgatagttccagagagtgatgaagaggggcattccccggtcctgggcggccttgggccgccttttgccttcaatttgaacagtgacacagatgtggaagaaggtcagcaaccagccacagaggaggcctcctcagctgccagaagaggtgccactgtagaggcaaagcagtctgaagctgaagttgtaactgaaatccagcttgaaaaggatcagcctttagtgaaggagagggacaatgatacaaaagtcaagaggggtgcagggaatggggtggttccagctggggtgattctggagaggagccaacctcctggagaggacagtgacacagatgtggatgatgacagcaggcctcctggaaggccagctgaggtccatttggaaagggctcagccttttggcttcatcgacagcgacactgatgcggaagaagagaggatcccagcaaccccagttgtcattcctatgaagaagaggaagatcttccatggagtaggtacaaggggtcctggagcaccaggcctggcccatctgcaggagagccaggctggtagtgatacagatgtggaagaaggcaaggccccacaggctgtccctctggagaaaagccaagcttccatggttatcaacagcgatacagatgacgaggaagaagtctcagcagcgctgactttggcacatctgaaagagagccagcctgctatatggaacagagatgcagaagaggacatgccccaacgtgtggtccttctgcagcgaagccaaaccaccactgagagagacagtgacacagacgtggaggaggaagagctcccagtggaaaatagagaagctgtcctcaaggatcacacaaagattagagcccttgttagagcacattcagaaaaggaccaacctccttttggggacagtgatgacagtgtggaagcagataagagctcacctgggatccacctggagagaagccaagcctccaccacagtggacatcaacacacaagtggagaaggaagtcccgccagggtcagccattatacatataaagaagcatcaggtgtctgtggaggggacaaatcaaacagatgtgaaagcagttgggggaccagcaaagctgcttgtggtatctctagaggaagcctggcctctgcatggggactgtgaaacagatgcagaggagggcacctccctaacagcctcagtagttgcagatgtaagaaagagccagcttccagcagaaggggatgctggggcagagtgggctgcagctgttcttaagcaggagagagctcatgaggtgggggcccagggtgggccacctgtggcacaagtggagcaggacctccctatctcaagagagaacctcacagatctggtggtggacacagacactctaggggaatccacccagccacagagagagggagcccaggtccccacaggaagggagagagaacaacatgtgggtgggaccaaggactctgaagacaactatggtgattctgaagatctggacctacaagctacccagtgctttctggagaatcagggcctggaagcagtccagagcatggaggatgaacctacccaggccttcatgttgactccaccccaagagcttggcccttcccattgcagcttccagacaacaggcctcctgaattgcaagatgccacctgctgagaaggcttccaggatcagagctgctgagaaggtttccaggggcgatcaggaatctccagatgcttgtctgcctcctacagtacctgaagccccagccccaccccaaaagccccttaactctcagagccagaaacatcttgcacctccgccccttctttctccccttttaccttctatcaagccaaccgttcgtaagaccaggcaagatgggagtcaggaagctccagaggctcccttgtcctcagagctggagcctttccacccaaagcctaaaattagaactcggaagtcctccagaatgacaccctttccagctacctctgctgcccctgagccccacccttccacctccacagcccagccagtcactcccaagcccacatctcaggccactaggagcaggacaaataggtcctctgtcaagacccctgaaccagttgtccccacagcccctgagctccagccttccacctccacagaccagcctgtcacctctgagcccacatctcaggttactaggggaagaaaaagtagatcctctgtcaagacccctgaaacagttgtgcccacagcccttgagctccagccttccacctccaccgaccgacctgtcacctctgaacccacctctcaggctactaggggaagaaaaaatagatcctctgtcaagacccctgaaccagttgtccccacagcccctgagctccagccttccacctccacagaccagcctgtcacttctgagcccacatatcaggctactaggggaagaaaaaatagatcctctgtcaagacccctgaaccagttgtgcccacagcccctgagctccggccttccacctccacagaccgacctgtcacccccaagcccacatctcggaccactaggagcaggacaaatatgtcctctgtcaagacccctgaaacagttgtccccacagcccctgagctccagatttccacctccacagaccaacctgtcacccctaagcccacatctcggaccactaggagcaggacaaatatgtcctctgtgaagaaccctgaatcaactgtccctatagcccctgagctcccaccttccacctccacagagcagcctgtcacccctgagcccacatctcgggctactaggggaagaaaaaatagatcctctggcaagacccctgaaacacttgtccccacagcccctaagctcgagccttccacttccacagaccaacctgtcactcctgagcccacatctcaggccaccaggggcaggacaaataggtcctctgtgaagacccctgaaacagttgtccccacagcccctgagctccagccttccacctccacagaccagcctgttacccctgagcctacgtctcaggctactaggggaagaacagatagatcctctgtcaagactcctgaaacagttgtccccacagcccctgagctacaggcttccgcctccacagaccagcctgtcacctctgagcccacatctcggaccactaggggaagaaaaaatcggtcctctgtcaagacccctgaaacagttgtgcccgcagcccctgagctccagccttccacctccacagaccaacctgtcacccctgagcccacatctcgggccactaggggcaggacaaataggtcctctgtcaagacccctgaatcaattgtccctatagcccctgagcttcagccttccacctccagaaaccagcttgtcacccctgagcccacatctcgggccactaggtgcaggacaaataggtcctctgtcaagacccctgagccagttgtccccacagcccctgagccccatcctaccacctccacagaccagcctgtcacccccaagctcacatctagggccactaggagaaagacaaataggtcctctgtcaagactcccaaaccagttgaaccagcagcctctgatcttgagccttttacccccacagaccagtccgtcacccctgaggccatagctcagggtggtcagagcaaaacactgaggtcttccacagtaagagctatgccggttcctaccacccctgaattccaatctcctgtcaccacagaccagcctatttcccctgagcctattactcaacccagttgcatcaagaggcagagagccgctgggaaccctggctccctcgcagctcccattgaccataagccttgctctgcacccttggaacctaaatcccaggcctcaaggaaccaaagatggggagcagtgagagcagctgaatcccttacagccattcctgagcctgcctctccccagcttcttgagacaccaattcatgcctcccagatccaaaaggtggaaccagcaggtagatctaggttcaccccggagctccagcctaaggcctctcaaagccgcaagaggtctttagctaccatggattcaccaccacatcaaaaacagccccaaagaggggaagtctcccagaagacagtgattatcaaggaagaggaagaagatactgcagagaagccagggaaggaagaggatgtcgtgactccaaaaccaggcaagagaaagagagaccaggcagaggaggagcccaacagaataccaagccgcagcctccgacggaccaaacttaaccaagaatcaacagcccccaaagtgctcttcacaggagtggtggatgctcggggagagcgggctgtgctggcactggggggaagtctggctggttcagcggcagaggcttcccacctggtcactgatcgcatccgccggacagtcaagttcctgtgtgccctggggcggggaatccccattctgtccctggactggctgcatcagtcccgcaaggctggtttcttcttacccccggatgaatatgtggtgaccgaccctgagcaagagaagaactttggctttagccttcaagacgcactgagcagggctcgggagcgaaggctgctagagggctatgagatctatgtgacccctggagtccagccaccaccacctcagatgggagagattattagctgctgtggaggcacatacctacccagcatgcctcggtcctataagcctcagagagttgtgatcacatgccctcaggacttccctcattgctccattccactacgggttgggctgcccctcctctcgcctgagttcctgctgactggagtgctgaagcaggaagccaagccagaggcctttgtcctctcccctttggagatgtcatccacctgagaactccactacccttttccctcccagaccacgaattagaagatatgtggaagaaagaactcagggcgttagaaaggattggggtatattgatacaacttgtcctggaacatgggtgggaccagaaatctttatgaataaatgaaaagataagggatttggaagccacaggttgttttttgtttgtttgtttgtttttttaatggccattttattttatttgtatttatagttttttatttgtatagatttaggggatacaagatttcttacatgcatgtattaaatggccattttaaaattagctagtttcatgctcagatgtcataagtggcagctatctttagccagactgttgcagttattgctcgatgccactcatggtgtcctacctcctatttggaaaccatctctatttttttcttactgagattcttactttggggtcaggaacttgaagggatgcttggagtgagtagatttgagggtccagttatggagtgctactaaaacattttcttctctcctggcctctggaagcatctttagctttgactttgggcaagtctctgtacttttctggccagcttttccaggatttataaaattagagcttcggcttgacctctgtgataaataaatattcactctgtgcctt

SEQ ID NO: 269678 - DNA, 5648 bp, Artificial Sequence
  derived and/or modified sequence
ccacggctccccgggagccatcttggttcccccagaaggcgggaggggcgtaccttgggtgcgactgggcggaggtgacttggaagttcgcttctcggactgtaatactcatccttacctggcgccccgctccgagtttagatcatggaggacacccaggctattgactgggatgttgaagaagaggaggagacagagcaatccagtgaatccttgaggtgtaacgtggagccagtagggcggctacatatctttagtggtgcccatggaccagaaaaagatttcccactacacctcgggaagaatgtggtaggccgaatgcctgactgctctgtggccctgccctttccatctatctccaaacaacatgcagagattgaaatcttagcctgggacaaggcacctatcctccgagactgtgggagccttaatgtaccatcgcctggatgtctctctgccctttgtctcccggggccctctgacagtagaagagacacccagagtacagggagaaactcaaccccagaggcttctgttggctgaggactcggaggaggaagtagattttctttctgaaaggcgtatggtaaaaaaatcaaggaccacatcttcctctgtgatagttccagagagtgatgaagaggggcattccccggtcctgggcggccttgggccgccttttgccttcaatttgaacagtgacacagatgtggaagaaggtcagcaaccagccacagaggaggcctcctcagctgccagaagaggtgccactgtagaggcaaagcagtctgaagctgaagttgtaactgaaatccagcttgaaaaggatcagcctttagtgaaggagagggacaatgatacaaaagtcaagaggggtgcagggaatggggtggttccagctggggtgattctggagaggagccaacctcctggagaggacagtgacacagatgtggatgatgacagcaggcctcctggaaggccagctgaggtccatttggaaagggctcagccttttggcttcatcgacagcgacactgatgcggaagaagagaggatcccagcaaccccagttgtcattcctatgaagaagaggaagatcttccatggagtaggtacaaggggtcctggagcaccaggcctggcccatctgcaggagagccaggctggtagtgatacagatgtggaagaaggcaaggccccacaggctgtccctctggagaaaagccaagcttccatggttatcaacagcgatacagatgacgaggaagaagtctcagcagcgctgactttggcacatctgaaagagagccagcctgctatatggaacagagatgcagaagaggacatgccccaacgtgtggtccttctgcagcgaagccaaaccaccactgagagagacagtgacacagacgtggaggaggaagagctcccagtggaaaatagagaagctgtcctcaaggatcacacaaagattagagcccttgttagagcacattcagaaaaggaccaacctccttttggggacagtgatgacagtgtggaagcagataagagctcacctgggatccacctggagagaagccaagcctccaccacagtggacatcaacacacaagtggagaaggaagtcccgccagggtcagccattatacatataaagaagcatcaggtgtctgtggaggggacaaatcaaacagatgtgaaagcagttgggggaccagcaaagctgcttgtggtatctctagaggaagcctggcctctgcatggggactgtgaaacagatgcagaggagggcacctccctaacagcctcagtagttgcagatgtaagaaagagccagcttccagcagaaggggatgctggggcagagtgggctgcagctgttcttaagcaggagagagctcatgaggtgggggcccagggtgggccacctgtggcacaagtggagcaggacctccctatctcaagagagaacctcacagatctggtggtggacacagacactctaggggaatccacccagccacagagagagggagcccaggtccccacaggaagggagagagaacaacatgtgggtgggaccaaggactctgaagacaactatggtgattctgaagatctggacctacaagctacccagtgctttctggagaatcagggcctggaagtccagagcatggaggatgaacctacccaggccttcatgttgactccaccccaagagcttggcccttcccattgcagcttccagacaacaggcctcctgaattgcaagatgccacctgctgagaaggcttccaggatcagagctgctgagaaggtttccaggggcgatcaggaatctccagatgcttgtctgcctcctacagtacctgaagccccagccccaccccaaaagccccttaactctcagagccagaaacatcttgcacctccgccccttctttctccccttttaccttctatcaagccaaccgttcgtaagaccaggcaagatgggagtcaggaagctccagaggctcccttgtcctcagagctggagcctttccacccaaagcctaaaattagaactcggaagtcctccagaatgacaccctttccagctacctctgctgcccctgagccccacccttccacctccacagcccagccagtcactcccaagcccacatctcaggccactaggagcaggacaaataggtcctctgtcaagacccctgaaccagttgtccccacagcccctgagctccagccttccacctccacagaccagcctgtcacctctgagcccacatctcaggttactaggggaagaaaaagtagatcctctgtcaagacccctgaaacagttgtgcccacagcccttgagctccagccttccacctccaccgaccgacctgtcacctctgaacccacctctcaggctactaggggaagaaaaaatagatcctctgtcaagacccctgaaccagttgtccccacagcccctgagctccagccttccacctccacagaccagcctgtcacttctgagcccacatatcaggctactaggggaagaaaaaatagatcctctgtcaagacccctgaaccagttgtgcccacagcccctgagctccggccttccacctccacagaccgacctgtcacccctaagcccacatctcggaccactaggagcaggacaaatatgtcctctgtgaagaaccctgaatcaactgtccctatagcccctgagctcccaccttccacctccacagagcagcctgtcacccctgagcccacatctcgggctactaggggaagaaaaaatagatcctctggcaagacccctgaaacacttgtccccacagcccctaagctcgagccttccacttccacagaccaacctgtcactcctgagcccacatctcaggccaccaggggcaggacaaataggtcctctgtgaagacccctgaaacagttgtccccacagcccctgagctccagccttccacctccacagaccagcctgttacccctgagcctacgtctcaggctactaggggaagaacagatagatcctctgtcaagactcctgaaacagttgtccccacagcccctgagctacaggcttccgcctccacagaccagcctgtcacctctgagcccacatctcggaccactaggggaagaaaaaatcggtcctctgtcaagacccctgaaacagttgtgcccgcagcccctgagctccagccttccacctccacagaccaacctgtcacccctgagcccacatctcgggccactaggggcaggacaaataggtcctctgtcaagacccctgaatcaattgtccctatagcccctgagcttcagccttccacctccagaaaccagcttgtcacccctgagcccacatctcgggccactaggtgcaggacaaataggtcctctgtcaagacccctgagccagttgtccccacagcccctgagccccatcctaccacctccacagaccagcctgtcacccccaagctcacatctagggccactaggagaaagacaaataggtcctctgtcaagactcccaaaccagttgaaccagcagcgtctgatcttgagccttttacccccacagaccagtccgtcacccctgaggccatagctcagggtggtcagagcaaaacactgaggtcttccacagtaagagctatgccggttcctaccacccctgaattccaatctcctgtcaccacagaccagcctatttcccctgagcctattactcaacccagttgcatcaagaggcagagagccgctgggaaccctggctccctcgcagctcccattgaccataagccttgctctgcacccttggaacctaaatcccaggcctcaaggaaccaaagatggggagcagtgagagcagctgaatcccttacagccattcctgagcctgcctctccccagcttcttgagacaccaattcatgcctcccagatccaaaaggtggaaccagcaggtagatctaggttcaccccggagctccagcctaaggcctctcaaagccgcaagaggtctttagctaccatggattcaccaccacatcaaaaacagccccaaagaggggaagtctcccagaagacagtgattatcaaggaagaggaagaagatactgcagagaagccagggaaggaagaggatgtcgtgactccaaaaccaggcaagagaaagagagaccaggcagaggaggagcccaacagaataccaagccgcagcctccgacggaccaaacttaaccaagaatcaacagcccccaaagtgctcttcacaggagtggtggatgctcggggagagcgggctgtgctggcactggggggaagtctggctggttcagcggcagaggcttcccacctggtcactgatcgcatccgccggacagtcaagttcctgtgtgccctggggcggggaatccccattctgtccctggactggctgcatcagtcccgcaaggctggtttcttcttacccccggatgaatatgtggtgaccgaccctgagcaagagaagaactttggctttagccttcaagacgcactgagcagggctcgggagcgaaggctgctagagggctatgagatctatgtgacccctggagtccagccaccaccacctcagatgggagagattattagctgctgtggaggcacatacctacccagcatgcctcggtcctataagcctcagagagttgtgatcacatgccctcaggacttccctcattgctccattccactacgggttgggctgcccctcctctcgcctgagttcctgctgactggagtgctgaagcaggaagccaagccagaggcctttgtcctctcccctttggagatgtcatccacctgagaactccactacccttttccctcccagaccacgaattagaagatatgtggaagaaagaactcagggcgttagaaaggattggggtatattgatacaacttgtcctggaacatgggtgggaccagaaatctttatgaataaatgaaaagataagggatttggaagccacaggttgttttttgtttgtttgtttgtttttttaatggccattttattttatttgtatttatagttttttatttgtatagatt

SEQ ID NO: 269679 - DNA, 5478 bp, Artificial Sequence
  derived and/or modified sequence
atggaggacacccaggccatcgactgggacgtggaggaggaggaggagactgaacaatccagcgagtctttaagatgcaatgtggaacccgtgggaagattacacatcttcagtggtgcacatggccctgaaaaagacttcccattacacctgggaaagaacgtggtcgggagaatgccggattgctctgtggcactaccttttccgagcatttcaaagcagcacgcagagatcgagattctggcctgggacaaggctcccattttgcgggattgcgggtctctgaacggcacccaaattctgcgacctccaaaggtcctctcacccggcgtatcgcaccggctgcgagatcaagagctgattttgttcgccgatttgctttgccagtatcacaggctcgatgtctcactcccctttgtaagtcgcgggcccctcacagtcgaggagaccccaagggttcaaggggaaacacagcctcagcgtttactgcttgcagaggacagcgaggaagaagtcgatttcctcagtgagaggcggatggtgaagaaatctcggactaccagctcctccgtaatcgttccagagagcgatgaagaaggacatagcccagtcctaggcgggctgggacccccctttgctttcaacctaaattccgacaccgacgtggaggaggggcagcaacccgccactgaagaagccagctcggccgcccgccgtggcgccacagtggaggcgaaacagagcgaagccgaggtcgttactgagattcagctcgagaaggaccagcccctggttaaggaacgagacaacgataccaaggtcaagaggggggctgggaacggagtggtgcccgctggcgttatcctggagcgttcacagccccctggcgaggattctgatactgacgtcgacgacgactcccgccctcccgggcgacccgcagaagtacacttagaaagagcccagccgttcggattcatagactcagataccgacgctgaagaggaacgtatcccagcaacacccgtggtcatccccatgaagaagcgtaaaatcttccacggggtcggcacacgaggacccggggccccgggtttggcccacctacaggagtcacaggccggttccgatactgacgttgaggaaggaaaagcacctcaggctgtccccctggaaaagtctcaggcgtctatggttataaacagcgacactgacgacgaggaggaggtgagtgccgccctgacactggcccaccttaaagaatctcagcccgctatttggaatagagatgcagaggaagacatgcctcaacgcgttgtgctcctccagcgctcacagaccaccaccgagagggacagtgatacagacgtggaggaggaggagctccctgtggagaaccgtgaagccgtgttaaaggaccataccaaaattagggccctggtgcgcgcgcacagtgagaaggaccagcccccattcggggatagcgatgacagcgtggaagctgacaaaagttcacccggtatacacttagaacgatcacaggcatctacaacggttgatataaatacccaggtggagaaggaggtgcccccggggtccgcaatcattcatattaaaaagcaccaggtctccgttgagggaacaaatcagacagacgtaaaggccgtcggcggccccgccaagctgctcgtggtcagtctcgaagaagcttggcccctgcatggcgactgcgagaccgacgctgaagaaggaacctcgctgacggcctcagtggtcgctgacgttaggaaatcacagctacctgctgaaggagatgccggagctgagtgggccgcagccgtacttaagcaggaaagggctcacgaagtcggagcccagggcggtccccccgtcgcccaggtcgagcaagatctacctatctccagggagaacctcacggacctggtagtcgatacagacacactgggggagtctactcaaccccagagggaaggagcccaagttcctacaggacgggagagagagcagcacgtgggcgggactaaggatagtgaagataactatggagacagcgaggacctcgacctgcaggccacccagtgcttccttgaaaaccagggcttggaggctgttcaatccatggaggacgaacctacccaagcatttatgctgactccgccccaggagttaggccccagtcactgcagttttcagaccaccggccttcttaactgcaaaatgccccccgccgagaaggcttcacggattagagctgccgaaaaagttagtcgaggagatcaagagagcccggacgcctgtctgcctcccacagtccctgaggctcccgctccccctcagaagcccttgaacagccagtcgcagaaacacctggccccgcccccgcttctgtcacccctgctcccgagcattaaaccgacagtccgcaagactagacaagacggcagtcaggaagcacccgaagcccctttgagctccgagttggaaccattccacccaaagcccaaaattcggacacgcaagtctagcagaatgacaccgttccctgccacctcagcagctcccgagccccacccttctacctccaccgctcaacctgtcacccctaaaccaaccagccaggcaacacgaagccgaacaaacaggtcatccgtgaaaacccctgaaccggttgtccctaccgcccctgaactccagccatctacttccaccgaccagccagtcacatctgagccgacatctcaggtgacgcgcggaaggaagtcccgctcttcagtgaagactcctgaaactgttgtgccaactgctttggagctacagcccagcacatctactgaccgtcctgtgacaagcgaaccgacctcacaagctactcgcggaaggaagaacagaagctcggtcaagacccctgagccagtcgtccctacagctcctgaattgcaacctagcacatctacagatcagccagtgacatctgaacctacgtatcaagccaccagggggcgcaagaatcgaagcagcgtaaaaaccccagagcccgtggtgccaacagcaccagaattgagaccgtctactagcaccgaccgaccagtcacccccaaaccaactagtagaaccactcgttctaggaccaacatgtcatccgtcaaaacacctgaaacggtcgtgcctacagcccctgagctgcagatctcaacctctacggatcagcctgtcactccaaaaccaacctcaaggaccacaagatcaaggacgaatatgtctagcgttaaaaaccccgagtccacagttcctattgctcctgagctgcctccctctaccagcacggagcagccggtaaccccagaacccacatcccgtgcaacgaggggtaggaagaacagatcttcaggcaaaaccccagagacgctggtgcctactgcccctaagctggagcctagtacatcaactgaccaacccgtgactccagagccgacctcacaggccacacggggaagaacgaacagatcaagcgtgaaaactcctgagaccgttgttcccaccgctcccgagttacagccttccacctctacggaccaacctgtcacacccgagcccacgtctcaagctactcgtggaagaactgaccggtcctcagtcaaaactcctgaaacagtggtacctaccgcgccagagctccaagcctcggccagcaccgaccagccagttacctcagaacctacaagtcggacaacaagaggccggaaaaataggtcttctgtgaagacccctgaaacggtggttccagctgccccggaactccagcccagtacgagcactgatcagcccgttacccctgagccaacatcgcgcgctacgagggggcgcacgaaccgaagctcagtgaagactccagagtcaattgtgcccatcgcaccagagttgcagccgagcacctcaaggaatcaactggtgaccccagagcctacctcaagggccacgaggtgccgaaccaatcggtctagtgtgaaaacacctgaacctgtggtgccaacagcacctgaaccccatccgaccacaagtaccgaccagccagtcacaccaaagctgacctctcgcgctacccgacggaaaaccaatcggtccagtgtcaagactcccaagccggtggagcccgcagcttctgatctcgaaccattcactcctaccgaccagagcgtcacccctgaggccatcgcccaaggtggtcagtccaagaccctgcgctcttccacggtgagagccatgcccgtccctacaacaccggaattccagagtcctgttaccaccgatcagccgatttcccccgaaccaatcacacagccctcttgtattaaacgccagagggctgctgggaatcccgggtcacttgctgcccccatagaccacaagccttgctccgccccacttgaaccgaaatctcaggcaagtagaaatcagaggtggggtgccgtcagagctgccgagtccctcactgccatccccgaacccgcatcccctcagctgttggagacacccatccacgcctcgcaaattcaaaaggtggaacctgctggtaggtcccgttttacacccgagctgcaacctaaggccagccagagccgaaaacgttccctggctaccatggacagtccaccacaccagaagcagcctcagcggggcgaggtgtctcagaagactgtgatcattaaagaggaagaggaggataccgccgaaaaacccgggaaggaagaagacgtggtgacacctaaaccaggaaaaaggaagagggatcaggccgaggaagaacctaaccgtataccgagtaggagtctgcggaggactaaactgaatcaagaaagcacagcacccaaagtgctgtttaccggcgtagttgatgctaggggcgaacgtgctgtgctggctctcggcggcagtctggcgggatctgcggctgaggcttctcacttggttaccgaccggatcagaaggacagtgaagttcctgtgtgcgctcggacgaggaattcccatcttaagcctggattggctgcaccagagtaggaaggccgggttctttctacccccagacgaatacgtggtgactgacccggagcaagagaagaattttgggtttagtttgcaggacgcactatcacgcgcgcgcgagcgcaggctgctggagggatacgaaatctatgtgacacctggcgttcagccaccacccccacagatgggggaaatcatatcctgttgtggggggacatacctgccctctatgcccaggtcatataagccgcagagagtggttataacatgcccccaagacttccctcactgtagcatacctctcagagttggcctgcccctcttgtctccagagtttctgctgactggtgtccttaagcaggaggccaaacccgaggcctttgttctgagcccactggagatgtcctctacatag

SEQ ID NO: 269680 - DNA, 4968 bp, Artificial Sequence
  derived and/or modified sequence
atgtaccaccggctggacgtgagcctgcccttcgtgagccggggccccctgactgtagaagagacccccagggtgcaaggcgagactcagcctcaaaggctgttattggccgaggattctgaagaagaggtggacttcctgagcgaaagacgtatggtgaagaagtctcgaaccacttcctcatcagtaattgtgccagaaagtgatgaagagggccactcccccgttctgggcggcctcggtcctccctttgcctttaatcttaatagcgatactgatgtcgaggaaggacagcagcccgccaccgaagaagctagctctgcggctagacgaggagctaccgtcgaggctaaacagtctgaggcagaagtcgtgactgagatccagttggagaaggatcagccactcgtgaaagagcgcgataacgacactaaagtgaagcggggggctggtaatggtgtggtgcctgcaggcgtgatccttgaaaggagccagccaccaggggaagatagtgatacggatgttgacgacgactccaggcctcctggacggccagccgaggtccatctggagcgcgctcagccatttgggttcatagattccgatactgatgcagaggaagaacgcatacccgccacccctgtagtgatccctatgaagaaaaggaaaatctttcacggagtcggaacccgcgggcctggcgcacctggtctcgcgcacctgcaggaaagccaggccggaagcgacacagacgtggaggaagggaaagcaccccaagctgtgccactagaaaagtctcaggcatcaatggttattaacagcgacactgacgatgaggaagaagtcagtgctgcgcttaccctcgctcacctcaaggagagccagcctgccatttggaatcgagacgcggaagaggacatgccacagcgggtggtgcttctgcagcggtcccaaactactacagagagggacagtgatacagacgtggaggaagaggagctccccgtggagaatcgggaggctgtcctgaaggaccatacaaagatcagggcattggtacgagctcattctgaaaaagaccagcctccctttggggacagcgatgattctgtcgaagcagacaagtcctcacccggcattcatctggagagaagccaggccagcactacagtcgatattaacacacaggtggaaaaagaggtgccaccagggtcggccattatccatataaagaagcatcaagtgtccgttgagggtaccaatcagactgatgttaaggccgtcggaggcccagcaaagctgctggtggtgagtttagaggaagcttggccactgcatggcgactgcgagacagatgccgaggaggggaccagcctgaccgcaagcgtcgtggccgatgtgagaaagagtcaactgccagccgagggcgacgcgggcgctgaatgggccgcagcagtgttgaagcaagagcgagctcatgaggtcggcgcccagggcggccctcctgttgcacaagttgagcaggacctgccaatctcccgcgaaaatctcaccgatctagtggtggacactgatacattgggagaatcaacccaaccccaacgagagggggcacaggttcctacgggccgggagagagagcagcatgtcgggggaaccaaggacagcgaagacaactatggggatagtgaagatttggacctccaggcgacacagtgttttctcgaaaaccagggactggaagtccagtctatggaagacgagcctacacaggccttcatgctgacccctccacaagagttgggaccttcccactgcagctttcaaacaaccgggctgcttaattgcaagatgccgcccgctgagaaggcctcacgcatacgagccgccgaaaaagtgtcacggggggatcaggaatccccagacgcttgtctaccccctactgtccccgaggcaccggctcctcctcagaaaccgctgaattctcagagccaaaagcacctggccccccctccactcctgagtcccctcttaccgtccatcaaacccaccgtgagaaaaactaggcaggacggaagtcaggaggccccagaagccccgctgtcatccgaactggagccattccatcctaaacccaaaatacggacccgcaaatcaagtcggatgaccccctttcctgccaccagtgccgcccccgagccacacccatcaacgagcaccgcacagcccgtgacccctaaacccacctcgcaggcgacgaggtcgcggaccaatcgaagcagtgttaagaccccagaacccgtggtgcccacagctcccgagctccagccctctaccagcacagatcagcctgttacctctgaacccacatcacaggtaactcgcgggcgaaaatccaggtctagcgtaaaaacccccgaaactgtcgtacccactgccctggagctgcagccctcaacctctacggatcggcccgttacatccgaacccaccagccaagcaacaagggggaggaaaaatcgctccagcgttaagacccccgagcccgtggtgcctactgctcccgaactgcagccctctacaagcacggaccaaccggtgacaagcgagcctacgtaccaggctacgaggggacgaaagaatcgcagcagcgtaaaaacaccagagcctgtcgtgcccaccgctccggagctgagaccctcaaccagcaccgacagaccagttacgccgaagccaacaagtcgcacgacccgatcccgtaccaatatgtccagtgtcaagaatccggagtcaaccgtgcccatcgcacccgaactgccgccatccacatctacagaacagccagtgacccccgaaccaacctccagagctactaggggcaggaaaaatcgctcatccggcaagactcctgagactttagttcctactgcccccaagttagagccatccacaagtaccgaccagcctgttactcccgagcctacatctcaggccacccgaggcagaacaaaccgtagcagcgttaagactccagagactgtggtgccgactgcacctgaactacaaccatctacaagcactgaccagccagtgactccagaacctaccagtcaagccacacgaggtcgcacagatcgcagcagcgtaaaaacccccgagacggttgttccgacagcaccagagctgcaggcctccgcttccacagatcaacccgtgacatccgagcctacaagccggaccacacggggacgtaagaatcgctcatccgtcaagacaccagagacggttgtgccggccgccccagagctgcagccttccacttcaacagaccaacctgtgacccctgagcccaccagcagggccactcgaggccggactaaccggtccagcgtcaagacgcctgaatcaatagtgccgatcgccccggagttgcaaccctccacatcccgtaaccaactagtgactcccgagcccacctcccgtgctacaaggtgtaggaccaaccgttctagcgtgaagactccagagcctgttgtccccacagccccagaaccgcaccccacgacatctaccgatcagcccgtgaccccaaagctgacgtccagagccacccggcggaaaactaatcgatcaagtgtcaagacccccaaacccgtagagccagctgccagtgatctcgaaccgtttactccaaccgatcagagcgtcacccctgaggcgattgcccagggcggccagagcaagactctccgttcgagcactgtgcgtgccatgcctgtgccaacaacaccagaattccaaagtcctgtgactacggatcagcccatttcccctgaacctattactcaaccatcctgcattaaaaggcagagggccgcaggcaacccgggcagtctcgccgccccaatcgatcacaagccgtgctccgccccgctggaacctaagagccaagcaagtagaaaccagcggtggggtgcagttagggctgccgagtcactcacagccatccccgagccagcctctcctcagctgttggagacacctatccacgcttcgcagatccagaaggttgaacccgccgggcggtcaaggtttacaccagaattgcagcctaaagcctctcagagtcgcaagagatcccttgcaaccatggactcacctccccaccagaaacaaccacagcgaggcgaagtgtcccagaaaactgtgataatcaaggaagaggaggaagacacagcagagaaacccggaaaggaagaggatgtggtcaccccaaagccagggaagagaaaacgagatcaagccgaggaggaaccgaacaggataccgtcgcgaagtctgcgaagaactaaactgaaccaggagtcaaccgcccccaaagttctctttactggtgttgtcgacgcacgcggagagcgcgccgtgcttgcactgggcgggtccctggctggaagcgccgccgaggcttcgcatctggtgacagatcgaattcgacgcacagtgaagtttttgtgtgctcttgggcgcgggattcctatactgagcctggactggctacatcaatcacgaaaagccgggttttttcttcctccagatgagtacgtggtgactgatcccgaacaggaaaagaacttcgggttcagcctgcaagacgcgctgtcgcgcgccagagaacggagacttctggaaggttacgagatttacgtcaccccaggagtacagccacctccaccacagatgggggaaatcattagctgctgtggtggtacataccttccatcgatgccaagaagctacaaaccacaacgggtggtcataacttgtccacaagattttccccattgctccattcccttaagagttgggcttcctcttctttcacctgagtttctgcttacaggggtactcaagcaggaagcaaagccagaggcatttgtgctgtcccctttagaaatgtcatccacttag

SEQ ID NO: 269681 - DNA, 5478 bp, Artificial Sequence
  derived and/or modified sequence
atggaggacacccaggccatcgactgggacgtggaggaggaggaggaaactgagcagtcctctgaatctctacggtgcaatgtggagccagtgggccgtctccacattttttcaggagcacatggcccagagaaggatttcccacttcatctgggaaagaatgtggtgggaagaatgcccgactgcagcgtggccttgccattcccatcaatatccaagcaacatgctgaaattgaaatattggcatgggacaaggccccaatcttgcgcgactgtgggagtctgaacggaacacagatcttacggccaccaaaggtcctctctccgggggtgagccacaggctcagagatcaggagctgatcctcttcgccgatctcctgtgccagtatcacagactggatgtgagcctcccttttgtgagccgcggtcccttgactgtcgaagaaacacccagggttcagggagaaacccagccgcagaggcttcttctggctgaggattcggaagaggaggtcgactttctgtcagaaagaagaatggtaaaaaaaagcaggaccacttcctcaagtgtgatagttccggagagtgacgaggaagggcactctccggtgctcggaggcctcggccctccctttgccttcaacctgaattcagacaccgatgtagaggagggacagcagccagcaacggaggaagcatcaagcgctgcccgccggggcgcaaccgtcgaagccaaacagagcgaagccgaggtggttaccgaaatccaactcgaaaaggaccagcctctggtcaaggaaagagacaacgacacgaaagtgaaacggggagctggtaatggtgtcgtgcctgcgggcgtgatccttgagcgaagccaacctcctggagaggattccgacactgacgtcgacgatgattccagacctcctggcagacccgccgaggtgcatctcgagcgagcccagccatttggcttcatcgacagtgacactgatgcggaggaggagcgtatcccagctacaccagtggtgatccccatgaagaaacggaagatattccatggcgttggcacccgtggtcccggcgcgccgggtctggcacatctgcaggagagccaggccggttccgacactgatgtggaggagggaaaggccccacaggcggtgcccctcgagaagtctcaggcatctatggtgatcaacagcgatactgacgacgaggaagaagtcagtgctgcactgactctagcccatttaaaggagagccagccagctatctggaaccgggacgctgaagaggacatgccccagcgggtcgtactgctgcagaggtcgcagacgacgacggagcgcgatagcgatacagacgtcgaggaggaagagctccccgtggagaacagagaggccgtgttgaaagatcacactaagatccgcgctctggtgcgagctcacagcgagaaggaccagcctccatttggagattctgacgacagcgtcgaagcagataagagttcccccggtatccatcttgagcggagtcaagcttcgacgaccgtggatattaacacacaagtagagaaagaggtgccccccggctctgccataattcacattaagaaacaccaagtcagcgtggaaggtactaatcagaccgatgtcaaggcagtcgggggaccggctaagttactggtggttagcttggaggaagcttggccactccacggagattgtgagactgatgccgaggaaggcacctcactaaccgcatctgtcgtcgcggacgtgagaaagtcacagttgcctgcagaaggcgacgcgggggctgagtgggcagccgcagtgctgaagcaggaacgcgcacatgaagtgggcgctcagggaggaccaccagtagcccaggtcgagcaggatctccccattagtcgggagaatcttaccgacctcgtggtggacacagatacactcggcgagtctacacagcctcaaagagaaggcgctcaagtgcccaccggtagagaacgggagcaacacgtcggggggaccaaagattccgaggacaactacggagacagtgaggacctggatctacaagcgacacagtgctttctggaaaatcagggactcgaggcagtccagtcaatggaggatgaacctactcaagccttcatgctgacacctcctcaagaactgggaccctcccactgctcttttcagactaccgggcttctcaattgcaagatgcctccagcggaaaaggcctcacgaatcagggctgccgaaaaagtatcgcgtggtgaccaagaatcacccgatgcctgtctaccccctaccgtaccggaggcccctgctccgcctcagaagccactgaactcgcagtcccagaaacatcttgcaccacctcccttgctcagtccgctgctcccaagtatcaagcccaccgtcaggaagaccagacaggacggatctcaggaggcccctgaggcacctctgtcctccgaactagaacccttccaccctaaaccaaagattcgtactcggaaatcctccaggatgactccgttccctgcgacatccgcagccccggagccccaccccagtacctcaaccgctcagccggtcaccccaaagccaaccagccaagccactagaagccgcactaacagatcctccgttaagactcctgagcctgtggtacctacagctccagagctacaacccagcacttctacagaccaacccgtcacctccgaacccacatcccaggttaccagaggcaggaagagtcggagctccgtaaaaacaccggaaaccgtggtccccaccgccctagagttgcagccgtctaccagtaccgatcgacccgttacatctgaacccacctcccaagcgacccgtggcaggaagaatcggtccagtgtcaagactcctgaaccagttgttccgactgcacccgagctgcaaccttccacttctaccgaccagccagtgaccagtgagccaacttatcaggcaacgaggggtaggaagaaccggagcagcgttaaaactcccgagcccgtggtgcccacagctcctgagctgaggccttccactagcaccgacagacccgtgacccctaagccaactagtcggaccactcgatctcgcactaatatgagttctgtcaagaccccagagaccgtggttcccacagctccagagttgcagatcagcacatccacagaccagcctgtcacgcctaagccaacctcccgcaccactcggtctaggaccaacatgagttccgtgaaaaacccagaaagtaccgtgcccattgcgccagaactgccaccttcaacgtcaaccgagcagccagttaccccagagcccacttctagggccactaggggtaggaagaaccgctcatctggaaaaacgcctgagactctcgtgcccaccgcccctaaactggagccaagcacatctacggatcagccagtaactccagaacccacgtctcaagctacaagaggccggacgaatagaagttccgtcaaaacaccagaaaccgtcgtgcctacagctccggagctgcaacccagcacctctacagaccagcctgtgactccagaacctactagccaggcaacacgtggtaggactgaccggtcgtcagttaaaactcctgaaacggtggtgccaaccgcacctgaactgcaggcaagtgcatccaccgaccaaccggtgacatcagagcccacctcacggactactcgcgggagaaaaaataggagcagcgtcaagacacccgagacggtggtgcctgcggctcctgagctgcagccatccacctcgaccgatcagccggtcactcccgagccaactagccgagcaacaagaggcagaaccaataggtcctctgtgaagacccctgagtcaatagttcccattgcccccgagttacagcctagcaccagccgcaaccagcttgtgaccccagagcccaccagtcgagccaccagatgcaggactaacaggagcagcgttaaaacacccgagccggtcgtccctaccgcaccagagccccacccgaccacatctacggatcagcctgttaccccaaagctgactagcagggctactcggagaaaaacaaatcgctccagtgtgaaaactccaaagcctgtcgaacccgccgcttccgacctcgaaccttttaccccaactgaccagtcagtgacaccggaggcgattgcccagggaggccagtccaaaactctgaggtcctccaccgtgcgtgcgatgcctgtaccaacaacccccgaatttcagtcccccgtgactacagaccaacctatctccccagagccaattacgcaaccttcttgcattaaacgccagcgagccgccggcaatcccgggtcgctcgccgcccctatcgaccacaagccctgttccgcaccgctggagccaaagagtcaggcctcaaggaatcagagatggggcgcagttcgggccgcggagtctctgacagccatccccgagcccgctagtccacagctcctggagacacccattcacgcatctcagatccaaaaagtggaacctgctggccgttctagatttacacctgagctgcagcccaaggcctctcagagccgaaagcgatctctcgccacaatggactctccacctcatcaaaagcagccccagaggggtgaggtgagtcagaagaccgtcatcataaaggaagaagaagaggatacagccgagaagccggggaaagaggaagacgtggttaccccaaagcctggaaagaggaagcgagaccaagcagaggaagagccaaatcgcatccctagccggtcgcttcgccgcaccaagctaaatcaggagtctacggcgcccaaggttttattcacgggcgtggtggatgctcggggggaacgagctgtattggcactcggcggatctttagcaggctctgctgcagaagccagccacttggtgaccgacaggattcggaggacggtgaaattcctgtgcgcactggggcgcgggatcccgatcctgtctttggattggttacatcagagcagaaaagcagggttttttctacctcctgatgaatatgtggtgactgaccccgagcaggaaaagaatttcgggttctccctccaggacgccctctctcgcgctagggaacgaagactgctggaggggtacgaaatttatgtcacccctggtgtgcagccaccgccgcctcaaatgggggaaatcatttcctgctgcgggggcacgtatctaccctcaatgccccggagctacaaaccacagagggtggtaattacctgcccccaggactttcctcactgtagcatcccactgcgcgttggtctgccgctcctaagtcctgaattcttgttgaccggggtattgaaacaggaagccaagcccgaagctttcgtgctgtcccctttggagatgtcaagcacctag

SEQ ID NO: 269682 - DNA, 5478 bp, Artificial Sequence
  derived and/or modified sequence
atggaggacacccaggccatcgactgggacgtggaggaggaggaggaaaccgagcagagtagcgagagcctccgttgcaatgtagagcccgtaggccggctgcatatcttctcaggcgcccatggccctgagaaggacttccctctgcacctggggaaaaatgtagtaggacgcatgccagactgctccgtagccttaccctttccaagcatctcaaaacagcatgcagagatcgaaatcttggcatgggataaggcccctatcctgcgcgactgtggctcactgaatggcactcagattctccgcccaccgaaagtgctgtcccctggcgtgtctcatcgactgagagaccaggagctgattctctttgcagacctgctctgccagtatcaccgccttgatgtttcactcccattcgtgtcccggggcccacttaccgtggaggagacacctcgcgtgcagggggagacccagcctcagcggttgttgttggcggaagattctgaagaagaggtcgacttcctgagtgagcggagaatggtgaagaaaagtagaacgacatcatcttcagtaatcgttccagagtccgacgaagaggggcacagccccgtgctaggtggtctcggtccacccttcgctttcaatttgaattcagatacggatgtcgaagaaggccagcagccagccaccgaggaggccagtagtgccgcaagacgtggcgcaacagtggaggctaagcagagtgaggctgaggtagtgacagagatacagctggaaaaggaccagccgctcgtgaaagaacgggataacgacacaaaagttaagaggggagccggcaacggggtcgtgcctgccggggtcattctggaacggtcccagccccctggtgaagactctgatactgacgttgatgacgactcaagaccaccgggtcgtccggccgaagttcaccttgaacgggcgcagccgtttggcttcatcgatagtgacaccgatgctgaggaggagcgtatacctgcaactcccgtggtgatacctatgaagaagcgcaagattttccacggtgtggggactaggggcccgggagcacctggactggctcacctgcaagagagccaggctgggagtgatacggacgtagaggaggggaaggcacctcaggccgtgcccctcgagaagtcacaggcgagcatggtaataaactcagacactgatgacgaggaggaggtgtccgcagcccttactctggcccacctgaaggagtcccaacccgccatctggaatcgcgacgccgaggaggatatgcctcagcgggtggtcttactgcagcgttctcaaacgacaacagaacgggacagcgacacagacgtggaggaggaggaactccccgtcgaaaatagagaagctgtccttaaagaccacacaaagatcagggccttggtgcgtgcccactccgagaaggaccagcccccatttggtgactctgatgactcggtagaggcagacaagagttcgcctggaattcacttagagagatcacaggccagcaccacagtcgacatcaacacccaggtcgagaaggaagtgcccccaggcagcgccattatccacatcaaaaagcatcaggtaagtgtggaggggacgaatcagactgacgtcaaggccgtgggaggccccgcgaaacttcttgtagtcagtctggaggaggcatggcctttgcacggtgactgcgagacagatgccgaagagggaactagtcttaccgctagcgtggtagcagacgtcaggaagagccaacttccagcggaaggtgatgctggtgcagagtgggccgcggccgtgttaaaacaggaacgagcgcacgaagtgggcgcacagggcggacctcccgttgctcaggtagagcaagacctgccaattagtcgcgagaaccttactgacctggtggtagatactgatactctcggcgagtccactcagccacagcgagagggcgcacaagtgccaactggtcgggagcgggagcagcatgtgggaggaactaaagacagcgaagacaactacggcgactccgaggatctcgacctccaggctactcaatgcttcctggagaaccagggcctcgaagcagtgcagtccatggaggacgagcccacccaggccttcatgctgaccccaccacaggaattgggaccttcccactgctcattccagacaactgggctcctgaattgcaagatgcctcctgcggagaaagcaagtcgtattagggctgctgagaaagtatcacgaggggatcaggagagcccagatgcttgcttgcctccaaccgtgcccgaagccccagcacctccacagaaaccgctgaactcccagtcccagaagcatctggccccgccacctctacttagccccctccttccaagtattaagcccacagtacgtaaaacgcgccaggacggctcacaggaagctcctgaagctcccctgagctcagagcttgagccttttcaccctaagcctaaaattagaacgcgcaagtctagtcgcatgacccccttccctgcaacctctgctgcacccgagccgcacccatccacaagcactgcccaaccagtgactccaaaaccgacatcgcaggccacgaggtcgcggacaaacaggagtagtgtcaagaccccagagccagtggtgcccactgcccctgaactccaaccctctacctcaactgatcagccggttacctccgagccaacttctcaggtgactcgcggcaggaaaagccgctcttccgtaaagactccagaaacagtagtgcctaccgcattagagctccaacccagcacttccacagatcgacccgttactagcgagccaacctcacaagctacccgcgggcgcaaaaaccgctcctctgtgaagacccccgagccagtggtcccgaccgccccggaactccagccatccacatccacagaccagcccgtcacaagtgagcccacgtaccaggccaccagaggacgaaagaaccgatcctctgtgaaaacaccagagccagtggtacctacagccccagaactgcgcccatcaacgagtacagatcggcctgttacccctaagcccacatccagaaccactcggtcaagaaccaacatgtcctcggtgaaaacccccgaaaccgtcgtgcctactgcgccagagcttcagatctcgaccagcaccgatcagcccgtgacccctaagcctacttcaagaacgactagatctcgcactaacatgagcagcgtgaagaaccctgaatccacggtgcctatcgcacctgagctgccaccgtccacgagtacagaacaaccagtcaccccggagccgacctctcgcgcaacaaggggtcgcaagaacaggagttctgggaagacaccagaaacacttgtgccaactgcccctaagttggaaccctccacgagcaccgaccagcccgtcactccagaacccaccagtcaggctactcggggcagaacaaaccggtcatcagttaaaacacctgagacggttgtgcccacggcccctgagctccagcctagcaccagcaccgaccagccagtcactccagagccaacgtcccaagccacgcgcggtcggacagatcggtcatctgtgaagacaccagagaccgtggtgcctaccgccccagaactgcaagcttccgccagtacagaccaacccgtgacctcagaacccacctcaaggaccacaagggggcgtaaaaatagatcctccgtgaaaacaccggagactgtggtgccagcagcaccagagttgcagccgtccacgagtacggaccagccagtgacaccagaacccacatccagagctacacggggacgcaccaaccggagtagcgtgaagacccctgaatcaattgtccccattgccccagaactgcaaccctccaccagtcggaatcaactggttactcccgaaccaacctcacgcgcaacgcgctgcagaaccaacagatcgagcgtgaaaactcctgagccagtggttcccaccgcacctgagcctcaccctaccacctccactgatcagccagtcactccgaagctgaccagtcgcgcgacccgaaggaaaaccaaccgttcctccgtgaagacacctaaacctgtggagccagcagctagtgacctggagccatttactcctacagaccagtcagttacgcccgaggcaatcgcccagggcggccagagcaagacacttagatccagcaccgtgcgcgccatgcccgtacccaccaccccagaatttcagtcccctgtcactacagatcagcccatctccccagagccaatcacacaaccctcatgcattaagaggcagcgcgcagcaggtaatcccgggtctctggccgctcccattgaccataagccttgctcggcaccattggagcccaagtcccaggcatctcggaaccagagatggggcgcagtccgggctgcagagtctctcacagccatccccgaaccagcctccccccagctgctcgagacgccaatccacgcatcccaaattcagaaggtagagcccgccgggcggtcccggtttactccagaattgcaacccaaagctagccaatcccggaagcgatcgcttgctacaatggactctccaccacatcagaaacagcctcagagaggggaggtgtcacagaagacagtgatcattaaggaggaggaggaggacacggcagaaaagccgggtaaggaagaggacgtggtgacaccaaagcccggcaaacgaaagagggatcaggctgaggaggagcctaaccggattcctagccggagccttcgccgcacaaaacttaatcaggaatccaccgctccaaaagtcttgtttacaggggtagtggatgcccggggcgaacgggccgtactggccttgggcggttccctggccggctcggccgctgaagcctctcaccttgtgactgatcgtattcgaaggactgtgaagtttttatgtgcactggggagggggatccctattctgagcctagattggctccaccagtcaaggaaggccgggttttttttgcctccagatgagtacgtggtgacagacccagagcaagaaaaaaactttgggttctcccttcaggatgctctaagcagagctagggagcgccgactgttggaggggtatgaaatttatgtgacccctggcgtacagccaccacccccacagatgggcgagataatttcttgttgcggaggcacctacctgccttcaatgccaagaagctataaaccccagagagtagttatcacatgtcctcaggatttccctcactgcagtatccctctgcgggtcggcttgcccctgctcagtccggagttcctcttgaccggggtactcaagcaggaagccaagccggaggcattcgtgctctccccactggagatgtctagcacttag

SEQ ID NO: 269683 - DNA, 4968 bp, Artificial Sequence
  derived and/or modified sequence
atgtaccaccggctggacgtgagcctgcccttcgtgagccggggccccctgactgtcgaagaaaccccccgggtacagggggagacccaacctcagcggctcctattagcagaagattctgaggaggaggtagattttctctcagagagacgcatggtgaaaaagtcacggactacaagcagctcggtgatcgtgcccgagagtgatgaagagggacattcacccgttctcggaggattgggtccaccatttgcctttaatctcaattcagatactgatgtcgaagaaggacagcagccagctacagaggaagcttcaagcgcggcccgtcggggggccactgtggaggcaaaacagtccgaagctgaggtggtgaccgaaattcagttggagaaggatcagccccttgtgaaagagcgcgataacgacaccaaagttaagagaggcgccgggaatggggttgttccagccggagtaattctcgagagatcccagcctccgggggaggacagtgacactgacgttgatgacgatagcagaccacctggacggccggccgaggtccacctggagagggcacagcctttcggcttcatcgatagcgacacagacgccgaagaggaacgaattcctgccacacctgttgtgattccaatgaaaaagcgcaagatcttccacggcgtaggtacccgggggcccggcgccccgggcttggcacacctgcaggaaagtcaggctggttcagataccgatgtcgaggagggaaaggcccctcaggcggtgcctctggagaagtcgcaggcttctatggtcataaactccgatacagatgatgaggaagaagtgagtgccgctctgacgttggctcatttgaaggagtcgcagcctgccatctggaatcgagacgcggaggaagacatgcctcagagagtggtgctcctgcaacgctctcagacaactacggaaagagactcggataccgacgtcgaggaagaggagctccctgtcgaaaatcgagaggccgtgctgaaagaccatacaaagattcgcgccctcgtccgcgctcattccgaaaaagatcagcccccattcggggatagtgacgactctgtagaggccgacaaaagcagccccgggatccatctggagcggagccaggcgagtactaccgtggatattaatactcaagtagagaaggaggtaccaccaggctccgcgatcatacatattaagaaacaccaggtatcagttgaaggtacaaatcaaaccgatgttaaggccgtgggcggacccgccaagttactagtcgtcagcttggaggaggcatggcctttacatggggactgcgaaaccgacgcggaagagggcacctcactaaccgcaagcgttgtggccgatgtccggaaatcccagcttccagctgagggagacgctggcgcagagtgggcagccgcagtgctgaagcaggaacgggcccatgaggtcggggcgcagggtggacctcccgtggctcaagtcgagcaagacctccccatctccagggagaatcttacagacctagtggtggacacagatactctgggcgaaagcacacagccccagcgcgaaggcgcacaggtgccgaccggtcgtgagcgcgagcagcacgtaggcgggactaaagattctgaagacaactacggcgatagtgaggacctggacttgcaggctacccaatgtttcctggagaaccaggggctcgaagtacagtctatggaggatgaacctacacaagccttcatgctcaccccccctcaagagctaggcccgtctcactgctcgttccaaacaacagggctcttaaactgtaagatgcctccagccgagaaggctagccggatcagggctgccgaaaaggtatcccgcggcgatcaggagagccccgacgcatgcttgccacccacagtccccgaggcccccgcccctcctcagaagcctctcaattctcagagccagaaacatctggcacccccacccctgttgtctccattactgccctcaatcaaaccgacagtgaggaagactcgccaggacggaagccaagaagccccagaggcaccactgtccagtgagttggagccgttccatccgaaacccaaaatccggacccgcaaaagttcacgaatgaccccattccccgctacctccgcggctccagaacctcatccgagcacttcgacagcccagcctgttacacctaagcccacctcccaggctacgagatcgcgcacaaatagatccagtgtgaagacaccggagccggtggtccccaccgcaccagagttacagcccagtacaagcaccgaccaacccgtcacaagcgaacccacttctcaggtgacccgaggtcggaaaagtaggagttccgtgaaaactcccgaaacagtggttccaaccgcattagaactccagccgtctacctccacggatcggccagtaactagcgaacctacttctcaggccacaaggggacggaaaaataggtccagcgtcaagacacccgagccggttgtgccaacagcaccagaactgcaaccaagtacgtcaactgatcagcccgtgacttcagagccgacgtatcaggccactaggggaaggaagaatcggtcttcggttaagaccccggaacctgtcgtccctaccgcccccgaactccgccccagcaccagcacagacaggcccgtgacgcccaagccaacatccagaactactagaagccgtactaatatgtcaagcgttaaaaaccccgaatcgaccgtccctatagcccctgaactgcctccgtctacgtcaaccgaacagccggtgactcccgagccaacttctagggctacacggggcagaaagaatagaagctccggcaaaactccggaaaccctggtacctacagcccccaagcttgagccttccacatctactgatcagccagttactccggaacctaccagtcaggcaacgaggggacgtacaaatagatctagcgtgaaaacacctgaaacggtggtccctaccgcccccgagcttcagccctcgacttcaaccgatcagcccgtgactcccgagccaacaagtcaggctactaggggcagaactgatcgaagcagcgttaagacaccagagactgtggttccgacggcgcctgagctgcaagctagtgcttcaacagaccagccagtcacatccgagcccaccagtcggaccacccgagggcgaaagaataggtcttcagttaaaactccggagacggtggtgcctgccgcacccgagctccagcccagcactagtacagatcaacctgtgacccccgagccaacgagtcgcgccactaggggaaggacaaatcggtctagtgtgaagacgccagaaagcatcgtcccaatcgctccggagttacagccctctacatccagaaatcagcttgtgactcctgagcctactagtagggccacccgctgtcggacgaacagatcctctgtaaagactccagagccagtagtgccgacagcgcccgaaccacatcccaccacatcaacagatcagcctgttacgccgaagcttacctcccgtgctacaaggcggaagacgaaccgctcgagtgtcaagacacccaagccagtagaacccgcggcttctgatctggagcctttcactcccactgaccagtcagtcaccccggaagcaattgctcagggaggtcaaagcaagaccttgagatcctcaaccgtgcgggccatgccggtgcccaccacccccgagtttcaatctccggtgactacagaccagcctatctctcctgagcctattactcaaccgtcctgtatcaaacgccaacgcgccgccgggaaccctggtagcctggcggccccaatagaccataaaccatgttctgccccccttgaacccaagtctcaggcgtccagaaatcagcggtggggagcggttagagcagcagagtcactcacagctattccagagcctgccagccctcaattactcgagacgcctattcacgcatcgcagatccaaaaggtggaacctgctggccgcagtcggtttaccccagagctgcagcccaaagcatcccaatcccggaaacgcagccttgcaactatggattcacctccacaccagaaacaaccacagagaggggaggtcagccaaaagaccgtcatcattaaggaagaggaggaagacaccgccgagaagcccggaaaggaggaggacgtggtaacacccaaacctggaaagaggaagagagatcaggccgaggaggagccaaataggatacctagtagaagcctgcggagaaccaagttgaaccaggagagcacggccccaaaagtgctgttcacaggggtcgtggatgcgagaggagagcgagccgttttggccttgggagggagcctggctggcagtgccgccgaggccagtcacctagttacagacaggatcagacgaaccgtaaagtttctttgcgctctgggcaggggaattcctattctgtcactagattggctgcatcaaagcagaaaggccggattctttctgccccctgacgaatacgtagtgaccgatcctgagcaggagaaaaatttcggattttctctgcaggacgcattgtctcgtgccagagagaggaggttgctggaaggctacgaaatttacgttactcccggtgtgcaacccccccctccacagatgggcgagattatcagctgttgcggcggtacttaccttccgtccatgcccagatcgtacaaacctcagcgtgtcgtaataacctgcccccaggacttcccccattgctcgatccctctgagggttggactgcctttactatctccagaattcctcctcactggcgtcctgaaacaggaagccaaaccagaggccttcgtgctgtccccacttgagatgagttccacatag

SEQ ID NO: 269684 - DNA, 4968 bp, Artificial Sequence
  derived and/or modified sequence
atgtaccaccggctggacgtgagcctgcccttcgtgagccggggcccactgactgtggaggaaacaccgagggtgcagggggagacccagcctcagaggctgctcctcgccgaagatagcgaggaggaggtggacttcctgagcgagcgtaggatggtaaagaaatcaaggaccaccagcagtagtgtgatcgtgcccgagagcgacgaggaaggccattccccagtgcttggaggcctaggtcccccatttgctttcaacctgaactccgatactgatgttgaggagggtcaacagcccgctactgaggaggctagctccgccgcacgaagaggtgccactgtcgaggccaaacagagtgaggcagaagtggttactgaaatccagctcgaaaaagatcagccgctagtgaaagagagggacaatgatacgaaggtcaaaaggggagccggcaacggagtcgttcctgccggagttattttagaacgcagtcagcctcccggtgaggactccgataccgatgtcgacgatgatagccgtccgcctgggaggccagccgaggtccatctagagagagcccagcccttcggatttatcgacagcgacactgacgccgaggaggagcggatccctgctacgcctgtcgtgatccctatgaagaaaagaaagatctttcacggggtcggcacacgaggtcccggggcgcctggtctggcccacctccaggaatcacaggctggctccgacactgatgtcgaagaaggaaaggcacctcaagcagtgccattagagaagagccaagcaagtatggtaattaatagtgatacagacgacgaggaagaggttagcgcggccctcactctggctcaccttaaagagagtcagcccgccatctggaatagggatgccgaggaagatatgccacaacgggtggtgttgttgcagcggagccagaccacaacagagagagatagcgacaccgacgttgaggaggaggaactgccagtggagaacagggaagctgtgcttaaggatcatacaaaaatcagagccctcgtcagagcgcactccgagaaggatcaacctcccttcggggactctgatgactccgtggaagcagacaagtcttctcctggtattcatttagaaaggtctcaagcttccaccacggtggatatcaacacccaggtggagaaagaagtaccacccggctctgccatcattcatatcaagaaacaccaagtctctgttgagggcacgaatcagaccgacgttaaagccgtggggggtcccgcaaaactccttgtggtgagcctggaagaggcttggcccctgcacggagattgtgaaactgatgcagaggagggcacctccttaactgcctccgtcgtagcggatgtcagaaagagccagctgccagcagagggtgacgcaggcgctgagtgggccgccgccgtgctcaagcaggaaagagctcatgaggtcggagcccagggaggcccacccgtagcccaggtggaacaggatctgcctatatctagagagaatctgacagacttagtcgtagacacagacacattaggggagagcacacagccacagcgcgagggggcccaggtccccaccgggcgagagcgggagcagcacgtgggtggcaccaaggattccgaggacaactatggggattctgaagaccttgatcttcaagctacacagtgtttcttagaaaaccagggcctggaggtacagtcaatggaggatgaacccacccaggccttcatgcttacacccccccaggagctcgggccatctcattgctcattccaaacaaccggactcctcaactgcaaaatgcccccagccgagaaggcgagtcgtatccgggcggcagagaaggtttctcggggtgaccaggagagcccagatgcatgtctgccacctacagttcccgaggcccccgcacctcctcagaaacccctcaatagccagagccagaagcacttggctccacccccgctgctgtccccactccttccatcaattaaacctaccgtgcgcaaaacaaggcaggacggatcacaggaggctcccgaagcccccctcagctctgagcttgaaccatttcatcccaaacccaagatccgcacccgcaaaagcagcagaatgacccccttccccgccacatcggctgcccctgagcctcatcccagcacctcaaccgcccagcctgttactccaaagccgacctcacaggcaacccggtcacgaacgaacagatcctctgttaagacacccgagccagtcgttcccaccgcaccagagctccagccaagtacatccactgatcaacccgtgaccagcgagcctacatcccaggtcacgcgaggcagaaagagcaggtcctccgtcaagacacctgaaaccgtggttccgaccgctctagagctgcagcctagcacatctactgatcggcctgttacctccgagcccacaagccaggccactcgaggaaggaagaatcgatcatccgtaaagactcccgaacccgtggtgcccaccgcccctgagcttcagcctagtacttctactgatcagcctgtgactagcgagccaacatatcaggctacaagagggcgcaagaaccgctcttcagtcaagacacccgaacctgtagtgcctactgcccccgagctgagaccctcgaccagcaccgataggccagtaacacctaaacctacttcacggacaacgagaagcaggaccaacatgagctcggttaagaatcccgaatctaccgtgccaatcgcccccgagctcccaccttccacctccactgaacagcctgtgacgcccgagcctaccagtcgagccacccgagggagaaaaaataggagttccggaaaaacccctgagaccctggtgcctaccgcccctaagcttgagccctcaacgtcgaccgaccagccagtgacgcctgagcccacctctcaagcaaccaggggcaggactaacaggtcatcagtcaaaacaccagagaccgtggtccccaccgcgcctgaactgcagccctccacatccacagaccaacccgtcacacccgagccaacttcccaggcaacacgtggacggacagatcggtcttccgtgaagacccctgagactgttgttccaactgcccctgaactacaggcatccgcaagcacagaccaacctgtcacgagtgaacctacgagcaggaccaccaggggccgcaaaaacagatcctccgtgaaaacacctgaaacggtggtcccagccgccccggagctgcagccatctaccagcaccgaccaaccagtgacccctgagccaacgagcagggccacacgtggcaggaccaatcggtcctctgtgaagacaccagagagcatagtccccattgcacctgagctccaaccctcaactagccggaatcagctggtaacccctgagcccacttcccgggcgacgcgctgccgtaccaaccgatcatcagtaaaaaccccggagccagtggtccctaccgcgcctgagccacacccaactacgtctacagatcagccggtgactccaaaactgacatcaagggccactaggagaaagaccaaccgaagttcagttaaaacccctaaacccgtggaaccggcagctagcgacctagagcccttcacacctacagaccaaagcgtcaccccagaggctatcgcccagggaggccagtcaaaaacgctgagatcttcaacagtccgcgctatgcccgttcctaccacccccgagtttcagtcccccgtgacaaccgaccagccaatatcacccgagcctattacgcaaccctcctgtatcaaaaggcagagggccgccggcaacccagggtctctcgctgcgcccatagaccataaaccctgttcagcaccacttgaacccaaaagtcaggccagcagaaaccaacgctggggtgctgtgagagccgctgagtcactcacggcaatcccagagccggcctcgccgcaactcctcgaaactcccatacacgcttcccagattcagaaagtggaaccagcgggcaggtctaggttcaccccagaactccaacccaaagcctcccagagcagaaaacgcagtcttgccaccatggattcaccaccccaccaaaagcagccccaaaggggtgaggtgtcccaaaaaacggttataatcaaggaagaggaggaggatactgccgagaaacctggcaaagaggaagatgtggtgaccccaaaaccaggcaagcgcaaacgtgaccaagcagaagaggagcctaacaggattccgagtcgatccttgcgacgcacaaaacttaatcaggaaagcacagcccctaaggtgctctttaccggagtggttgatgcccggggcgagagggccgtcctggctcttgggggcagcctggccggctctgcagccgaagcttctcacctggtgactgaccgtattagaaggacagtcaagttcctgtgcgccctggggagggggatccctatcctttcattggactggttgcatcagagccgcaaggcaggtttttttttgccccccgatgagtacgtggtgaccgatccagagcaggagaaaaactttggcttctccctgcaggacgccctctctcgggcccgggaaaggaggctattggagggctacgagatctatgtgacccccggcgttcagccgcctccaccgcaaatgggggaaattatatcctgttgtggagggacctatcttccatcgatgccaagatcctacaagccgcagagggtggtgataacttgcccacaggacttccctcactgcagtatccccctgcgggtcgggctgcctttactgtccccggagtttctcctaaccggcgtgctcaagcaggaagctaagcccgaagctttcgtcttgtcccccctggagatgagctcaacatag

SEQ ID NO: 269685 - DNA, 5478 bp, Artificial Sequence
  derived and/or modified sequence
atggaggacacccaggccatcgactgggacgtggaggaggaggaggaaactgaacaaagtagcgagtctcttcgatgcaatgttgagcccgtgggccgcttgcatatctttagtggcgcccacggtcccgagaaagactttccgctccacctgggcaaaaacgtcgttgggaggatgccggattgttcagtcgctctgcccttccccagcatatccaagcaacacgctgagattgagattctggcgtgggacaaggcacccattctgcgggattgcgggtcactgaatgggacccagatcctccggccacctaaggttttgtctcccggcgtgtctcacaggctgcgggaccaggagttaattcttttcgccgatttactttgtcagtaccacaggttggacgtgagcctcccctttgtatctagggggccactgacggttgaagagacacctcgggtgcaaggtgaaacacagccccagcgccttttgctggcagaagattctgaggaggaggtagacttcttgagcgagaggcgcatggtgaaaaagagccgaaccacaagcagttcggtcatagtacctgaatcggacgaggaaggccacagtcccgtcctgggaggactgggccctcccttcgcgttcaacctgaattccgacacggatgtggaagagggccagcagccagcaactgaagaggccagctctgctgccagacgcggagcgactgtcgaggctaagcagtcagaggctgaggtggtcacagagattcagctggagaaggaccaaccactggttaaggagcgagataacgatacaaaagtgaagcggggtgcagggaatggagttgtcccagccggcgtgatccttgagaggtcccagccccctggggaggacagcgacactgacgtcgacgacgattccaggccacctggccgcccagcggaggttcacctggagagggctcaaccctttggattcattgactccgacacagacgccgaagaggaaaggattccagctaccccggtagtgattccaatgaagaaacgcaagatatttcatggggtgggcacacgcggtcccggcgcccccggacttgcacacctgcaagaatcccaagctggtagtgatacagacgtggaggagggcaaagcacctcaggccgtgcctctggaaaaatcacaggctagcatggtcattaacagcgacaccgatgatgaagaggaagtgtccgccgctctgacactagcccatttaaaagagagccagccagccatctggaaccgtgacgcagaggaggacatgccccaaagggttgtgctgttacagcggagccaaactacaacggagcgtgattccgacaccgacgttgaagaggaggagttgcccgttgagaatagagaggcggtcctcaaggatcataccaagatcagggcactggtacgcgcacattcagaaaaggaccagccaccttttggggactccgacgactcggtagaggctgacaagtcttcccctggcatccacctagagcgcagccaggcctctaccaccgtggatatcaatactcaggtcgaaaaggaagtgccccccgggtcagcaatcatacatattaaaaagcaccaagtgtccgttgaagggaccaaccagacagacgtgaaagctgtggggggtcctgcaaagttgctggtcgtatctttggaggaagcttggcctctgcatggggattgcgaaactgacgccgaggagggaacatccttgactgcctccgtagttgcagacgttcgcaaaagtcagttgccagccgaaggagacgcaggtgctgagtgggccgccgcagtcttaaaacaggaaagagctcatgaagtcggtgcccagggggggccgcctgtggcccaggtcgaacaagacctcccaatttcgcgggaaaacttgaccgacttagtcgtcgacacggatactctgggggagagtacacagccgcaaagggaaggtgcacaggtccctactggcagagagcgggaacagcatgttggcggtacaaaggacagcgaggacaactacggagacagtgaagacttggatcttcaagcaacacaatgctttttggagaaccagggccttgaagccgtgcaatccatggaggacgaacccacacaagcttttatgttgactccccctcaggaactcggcccgtcacactgtagcttccaaactaccggactccttaactgtaaaatgccacccgcggagaaagcgtccaggatcagggcagcagagaaggtgagccggggggatcaggagagtcctgacgcttgcttaccgcccaccgtgcctgaggcgccagcgccaccacagaaacccttaaacagccagtcccagaagcacctggccccacctcccctgttgtccccattgctgcccagcatcaagcctaccgtccgcaagactcgccaggatggcagccaggaggctcccgaagctccactctcatctgagctggaacccttccaccccaaaccaaaaatcagaacacggaagagctccaggatgactccttttcccgctacatccgccgcaccagaacctcatccatccacatcaacggcccagcccgtaacaccaaaacctacgtcacaggctacgagaagcagaactaacagatcatccgtgaagacccccgagccagtggttccaacagcccccgaactgcagccttccaccagtacagaccaaccggtgacctctgaaccgaccagccaggttacacggggccgaaagagccgttcttccgtcaaaacgccagaaactgtggtgcctaccgcccttgaactgcagccatctacatcaaccgatcgaccagtcactagtgagccgaccagccaggccaccaggggacgcaagaataggtcatcggtgaaaaccccggagccagttgtccctactgcacccgaactacagccaagcacatcgacagaccaacctgtgacatccgagcccacctaccaggcgacccgtggacgaaagaatagatcttccgtcaagacccctgagcctgtcgtgccaacggcccccgagctgcggcccagcacatctactgatagacctgtgacccctaagccaacttcaaggactactagaagtcgtactaatatgtccagcgtgaagacacctgagacggtggttcctacagccccagaactccaaatctccacttcaacagaccagccagtcacccctaagcccacgagcaggacgacacgtagccgaaccaatatgtcttccgtgaagaaccctgaatctaccgtcccgattgcaccagagctgccaccttcgacatctactgaacagcctgtgactccagagccaactagcagggccacaagggggcgcaagaatcgtagctctggcaaaaccccagagacactagtgcccactgcccccaagctggagccctctacctccaccgatcagcctgtcacccctgaacccacaagccaggctacaagggggaggactaaccgctcttccgtcaagactcctgaaaccgtcgttcccaccgcccccgagttgcagccatctactagcactgaccagccggttaccccagaacccaccagtcaagcaaccaggggccgcaccgaccgttcatccgtgaaaactccagagaccgtggtgccgaccgcacccgagcttcaagcgtctgcttcaacagatcagcccgtgacatcagagcctacatcaaggaccactcggggacggaagaacagatcttccgtgaagacccctgagaccgtggtgccagccgcacccgagctgcagccgtctacttctactgatcaacctgttacgcctgagcctaccagcagagctacaagaggacgaactaatcggtcttcagtcaagacgcccgaatcaattgtgccaattgcacccgagctgcagccatctacatccaggaaccagctcgtcactcctgagccgacctcccgagctactcggtgtcgcactaataggagttcagtgaagaccccggagcccgtcgtgcctactgccccagagccacaccctactacttccacggaccagccagtgacgcccaagttgactagcagggcaactcgtcgcaaaacaaataggtcaagcgtgaagacaccaaagccagtggaaccagccgcttctgacctggagccctttacaccaacggaccagtccgttacccctgaagctattgcacagggcggccagagcaagaccctccggagctctacggtgcgcgctatgccggttcctaccacacctgagttccagagtcctgttacaacagaccagcctatttcccccgaaccaattactcaaccgagctgcataaaacggcagcgagcagctgggaatcctggttccctggccgcgcccattgatcataaaccatgttctgccccactggaacccaagtcccaagctagtagaaatcagagatggggcgcggtacgcgccgctgagagcctgactgccatcccagaacctgcgtcgccccagctgttggagacccccattcatgcaagtcagattcagaaggtggaacctgcgggccgcagcagatttacacctgaactgcagccaaaagctagtcagagccgaaagagaagcctggccactatggattcgcctcctcaccagaagcagccccaaagaggggaagtgtcccagaaaaccgtgattataaaagaggaagaggaagatacggctgaaaaacccggcaaggaagaagatgtcgttacacccaagcctggtaagcgcaagcgtgaccaagctgaggaagaacctaacaggatcccctctagaagtttgcgtaggacaaaactcaatcaggagtctaccgcaccaaaggtgctgttcaccggggtcgtggatgccagaggggaacgggccgtcctggcactcggcggctcactcgccgggagcgcggctgaagctagtcacctggtcacagaccggatccgacgcacggtgaagttcttgtgtgccctgggacggggcatccccatactgtccttggattggctccatcagtcacgcaaggccggcttttttcttcctccggatgaatatgttgtcaccgatcccgagcaagaaaagaatttcggattttctttacaggatgcactctctcgtgcaagggaacgaaggctgctggaaggttacgagatttacgtcacccccggtgttcaaccacctccaccccagatgggtgagatcatcagctgttgtggagggacatatcttccttccatgccccgaagttataagccccaaagagtggtgatcacttgccctcaggacttcccacattgtagtattcctctgcgtgtgggccttccattgctgtcccctgagttcctgctgacgggcgtcctaaagcaagaagccaaacctgaggctttcgttctgagcccacttgaaatgagctcaacctag

SEQ ID NO: 269686 - DNA, 4968 bp, Artificial Sequence
  derived and/or modified sequence
atgtaccaccggctggacgtgagcctgcccttcgtgagccggggccccctgaccgtcgaggaaactcctcgcgtccagggcgaaacccaacctcagcgcctgctgcttgcagaagattccgaggaggaggtcgacttcctgagtgaacgccgcatggtgaaaaagtctagaactactagtagcagtgtcattgtcccagagtcggacgaggaggggcattctccagtcctggggggtctcggaccgccctttgcgttcaatctgaacagcgatactgacgtcgaagaaggtcagcaacctgcaacagaagaagcttcctccgcagcccgtcggggggctaccgtggaggccaagcagtctgaggcggaggttgtgaccgagatccagctggagaaggaccaacctttagtgaaggagcgggacaatgacaccaaagtcaaacgaggggccggcaatggcgtcgtgcctgcgggagtgatcttggagcgttcccagccgccaggagaggattcagacacagatgtcgacgacgactcccgcccccccggtcgccctgctgaggtgcacctggaacgagcacaaccattcggcttcatcgattcagacaccgatgccgaggaagaacgcatccctgctacccctgtggttatcccaatgaaaaaacgaaagatattccacggtgtcggcactagggggcccggtgctcccggcctggcccatctacaggagagtcaggctgggtcagataccgacgtggaagagggcaaagccccccaggcggttcccctggagaagtcacaggcgtctatggtcattaacagtgatacggacgacgaagaggaggtatctgctgctctaacgctcgcccacctgaaagaatcccagcctgctatttggaatagagacgcagaagaagatatgcctcagcgtgtggtactcctacaaaggtcccagaccacaacagaaagagatagcgataccgatgtggaggaggaggagctccctgtggagaatagggaagccgttctgaaggatcacactaagatcagggccctggtgagggcccattcagagaaggatcagcctcccttcggcgactcagacgacagcgtggaagcggacaagtcctcaccaggaatccacctcgagagatctcaggccagcactaccgttgacattaacacccaggtggaaaaggaggtcccacccggcagcgccataatccacatcaagaagcaccaggtctcagtggaaggtacaaaccagactgatgtgaaagcagttggtgggccagccaagctgttggtagtatcccttgaggaggcatggccactgcatggcgattgtgaaaccgatgcagaggagggcacatcgttaaccgcttccgtcgtcgcagacgtcaggaaaagtcagctccccgccgagggcgatgcaggcgcagagtgggcggccgcagtgctgaaacaggagagggcccatgaggtgggtgcccaggggggaccccccgtggctcaggtagagcaggatctgcccattagtcgtgagaacttgaccgacctggtcgtggataccgataccttgggtgaaagcacacagccacagcgtgaaggagcccaggtgccaacgggacgcgagagggagcagcacgtcgggggaactaaggacagcgaggataattacggagatagcgaggacctggacttgcaggccacccaatgttttctggaaaaccagggactggaggtccaatctatggaggacgagcctacccaggcctttatgctcaccccccctcaggaactagggccctcccactgcagcttccagaccactggcctcttgaactgtaagatgcctccagcggaaaaggccagccgtattcgagctgcagaaaaggtcagccgtggcgaccaagagagccctgacgcctgtctcccgcccaccgtcccagaggcccccgcccctcctcagaagccacttaatagccaatcccaaaagcatttggcccccccaccactcttgagtcctcttctgccttctattaaaccaactgtgaggaaaacccgccaagacgggagccaagaagccccggaggcaccattgtcctctgagctggagccatttcaccctaagcctaagattagaacacgcaagagtagcagaatgacaccctttccagccacctcggctgcccctgaacctcacccaagcacatccactgcacagccagttactcccaaaccaacatcacaggcaacaaggtcgaggacgaaccgatcatccgtcaagacaccagaacctgtggttcctacggcacccgaactccagcccagtacaagcaccgatcaaccagtgactagcgagccaacttcccaagtcaccaggggacgcaaatctcggtcatctgtcaaaacaccagagacagtggtgcctactgctctggagttacagccctcaacaagcactgatcggccggttacaagtgaacctacttcccaagctactaggggcagaaaaaataggtcctcagtgaagactcccgagcctgtggtgcccactgctcctgagctgcagccttccacatcgactgatcagcctgtgacgtcagaacccacataccaagctacccgtggcagaaagaacagatcttcagttaaaaccccagagcctgtcgtacccactgcccccgaactgaggccctctacatccactgatcgccctgttacaccgaaacccacttctcgcacaaccagatctaggaccaatatgtcatcagtaaagaatcccgagagcaccgtaccaatcgcccccgaattgcccccctccacctctactgaacaacccgttactcccgaaccaactagccgtgcaacccgcggtcgaaagaatcggtctagtggaaaaacgcccgaaaccctggtccctaccgctcccaagctcgaacctagtactagcaccgatcagcccgtgactcccgagcccacttcacaagctaccagggggcgaaccaacaggagcagtgtaaaaacacctgagaccgtcgtaccgactgctcctgagttgcagccatcaacaagcaccgaccaaccggtaaccccggaaccgacttcacaggccacacgtggccggactgatcggtcatctgtgaagacgccagagaccgtggttcctactgctcctgagctgcaggcgtcagcatccaccgatcagccggtgacctctgagccgaccagccgcacaacacgtggtaggaagaaccgttcatctgttaagacccctgaaacagtggttcccgccgcacccgagctccagccatcaacctcgactgatcagcccgtaacaccggagccaaccagccgcgccactcgcggcagaactaacagaagctcggtaaagactcctgagtctattgtgccaatagcgcctgagctccaaccttctacctcccgcaaccaactggttacccctgagccaacaagcagagcgactaggtgtagaacaaataggtcatccgtgaagaccccagagcccgtggtcccaactgcccctgagccacacccaaccactagtaccgatcaacccgtgactcctaagctgacttccagggctacaagacgcaaaaccaaccgatcgtctgtgaagacaccaaaacctgtggagccggcagcttcagacttagagcctttcacgcctaccgatcagtcagtgaccccagaagcgatcgcacaaggagggcagagtaaaactctgaggagcagtacagtacgcgccatgcccgtgcctacaacgccggagttccagagtccagtaacaacagaccaacctatttccccagaacccatcacacagccatcatgcattaaaagacagcgcgcggccggtaatccgggtagccttgctgcacccatcgatcacaagccctgttctgcccccttagagcctaaatcacaggctagccgaaatcagcgatggggtgccgtgcgcgcagctgagagcttgacagccatcccagagcctgcatctcctcagttacttgagacgcccatccatgcaagccagattcagaaggtggagcccgccgggcggtcccgctttacgcccgaactccaacccaaagccagtcagtcacgcaagcgcagccttgctaccatggacagccccccacaccagaagcagcctcagaggggggaggtgtcgcagaagacagtcatcatcaaagaagaagaggaggacaccgccgagaagccaggaaaagaggaggacgtggtcactcctaagcccggcaaacgcaagcgggaccaggccgaagaagaacccaacaggattcccagtaggtcacttcggcggaccaaattgaaccaggagagcacagcacctaaggttttgtttaccggggtggtggacgctcgtggcgagcgcgcagtgctcgccctgggcggaagtctggctggcagcgcagccgaggcaagtcacctcgtcactgatcgaatccgtcgtactgtgaaattcttatgcgctctgggccgtggcatcccgattctcagtctggattggctgcaccagtcacgcaaagccggcttttttttacctccagatgagtacgtcgtcactgaccccgagcaagagaagaactttgggttttccctgcaggatgctctgtcccgagctagggagcgaaggctcctcgagggatacgagatctacgtaacacctggggttcagccacccccaccacaaatgggtgagataatttcttgctgcggcgggacttatttgccaagcatgcctcgctcatacaagccgcagcgggtagttattacatgtcctcaagattttccccactgcagcatccccctcagggttggcctgcccctgctaagccctgaatttttgttaaccggggtactcaaacaggaagcgaaaccagaagcatttgtcctctccccattagagatgagcagtacttag

SEQ ID NO: 269687 - DNA, 4968 bp, Artificial Sequence
  derived and/or modified sequence
atgtaccaccggctggacgtgagcctgcccttcgtgagccggggccctctcactgtggaggaaacccccagagtgcagggtgagacacagcctcagcgcttgctccttgccgaggacagcgaagaggaggtggacttccttagcgaacgcagaatggtgaaaaaatcccgaaccacctctagctcagtcattgtgccagagagcgacgaagaagggcacagtcccgttctgggcgggctggggccccctttcgcatttaacctgaattccgataccgatgtggaagagggtcagcagccagccaccgaagaggcttcttcggccgccaggaggggcgctaccgtggaagcaaaacagagcgaggccgaggtcgtcactgagattcagctggagaaagaccagccactcgtcaaagagagggacaacgacacaaaggtgaaaagaggtgctggcaatggagtcgtcccggccggggtgatcctggaacgaagtcagccgcccggcgaagactccgatacagacgtggacgacgattctcggccccccgggaggcctgcagaagttcacctggaacgggcccagcccttcggtttcattgacagcgacacagacgcagaagaggaacgaatcccggccacccccgttgtaatccctatgaagaaaagaaagattttccatggcgtagggaccagagggcctggcgcccctggcctggctcatttacaagaatcacaggccggaagcgacacggacgtggaggaggggaaggctccgcaagccgtgccactagagaaatcacaagcaagcatggttatcaatagcgataccgacgatgaggaggaggtgtccgccgcactgactcttgcacacctgaaggagtctcagccggccatttggaatagggatgccgaagaagacatgccacaaagggttgtcctcctccaacgttcccagaccactaccgagagggattcggacactgatgtggaagaggaggaactgcccgtcgaaaatcgtgaggccgtgctgaaggatcataccaagatccgtgcccttgtcagagcacacagcgagaaggatcagccaccatttggtgattccgatgatagtgtggaggcagacaaaagttctccaggtatccacctggaacggtctcaggcttctacaacagtcgacatcaatacacaggtcgagaaggaggttccgcccggaagtgccatcatccacatcaaaaagcatcaggtgagtgttgaaggcaccaaccaaactgacgtcaaggcagtgggcggccctgccaagctccttgtcgtcagtcttgaagaggcctggccactgcacggcgactgtgaaactgatgcagaggaaggcacatccctgaccgcatcagtcgtcgctgacgtgaggaaaagccaactgcctgcagaaggagatgctggggccgagtgggctgcggccgtgctaaaacaggagagggcccatgaggttggcgcccagggcggaccgccggtggctcaggtcgaacaggatttaccaatctcacgggagaatctgaccgacctggtggtggataccgacacactgggtgagtctactcagccacagagagagggtgcacaggtgccaaccgggcgggagagggagcaacatgtcggcggtacaaaagattccgaggacaactatggggatagcgaagatttggacttacaagcaactcaatgtttccttgaaaatcaaggcctggaggtacagtcaatggaggatgagcccacacaggcgttcatgctgactcccccgcaagagctcggtcctagccactgcagttttcagacaaccgggcttcttaactgtaagatgccacccgcagaaaaggcatctcggatccgagcagcagaaaaggtgtcacgcggggatcaagaaagcccagacgcctgcctcccacctaccgtcccagaagcacccgctcctccgcagaagccactgaattcccagagccagaaacatctggcaccccccccactcctgagtccccttctgccttccattaaacccactgtgaggaaaacaagacaggacggcagtcaggaggcccctgaggcaccactgtcctccgagttggaaccgttccaccctaagcctaagatacgcacccggaaatcctcgcgaatgacgccgtttcccgcaacatccgccgcaccagagcctcatcccagtacatctacagcacaaccagtgaccccaaagcctacttcccaggcgacccggagtaggactaataggagctctgttaagacccctgaacccgtggtgcccacagcacctgaactgcagcctagcacgagcaccgaccagcctgtcacgtctgagcccacatcccaggtgactcggggtagaaagagcaggtcatcagtgaaaacgcccgagacagtggttcccaccgccctggaacttcagcccagcactagcaccgaccgccccgtaacgtccgagccaacgagccaagcgacccgaggccgaaagaatcgtagctctgtcaaaactcctgagccagtggtcccaactgcacctgagttgcagcctagcactagcacagaccaaccagtgacatctgaacctacttaccaggcaacgagaggccgaaagaatcggtcctctgtgaaaactccagaacccgttgtgccgaccgccccagagctgagaccctccacgagcaccgaccgcccagtgaccccgaaacccacgtctaggactacaaggtcccgaactaacatgtcatccgtaaagaacccagaatccacagtaccaattgccccagagctcccgccaagcacctcaactgagcagcctgtgaccccagagcctacttccagggccacacgaggaaggaaaaatcgtagctctggtaaaactccagagactctagtcccaaccgcgccaaagcttgagccaagcacaagcactgatcagcctgtaacgcctgagccgacttcacaggctacgcggggcaggacgaaccggagctccgtgaagacaccagaaacggtggtcccaactgcaccagaactccagccctccacatccactgaccaacccgtcactcctgaaccaaccagtcaagcaacacggggaaggacagaccgttcaagtgtgaagacccccgaaacagttgtgcctacagctcctgaactacaggccagcgcgtccacggatcagcctgtgacttccgagcctacctcaagaacaaccagaggcaggaaaaatcggtccagtgttaagaccccggagaccgtggtgccagctgctcccgagctgcaacctagtacctctaccgaccagccagttactcctgagcccactagcagagcgaccagaggtcgaacgaaccgatccagcgtgaagactccagagtctatcgtgcccatcgctcctgagcttcagccgtctacctcacggaatcagctcgtgacacccgagcctactagtcgcgccacacgctgtcgcacaaatcggtctagcgtgaaaaccccggagccggtggtgccaaccgcacccgagccccatccaacaacctcgacagaccagcctgtcactcctaaattaaccagccgggcaacccggcgcaaaacaaaccgctctagcgttaaaacaccgaagcctgtcgagccggcggcttctgacctcgaacctttcactccgacagatcagtccgtgacgcccgaggctatagcccagggaggtcagtcaaaaaccctgaggtctagtaccgtccgggcaatgccggttcctaccactccagagtttcagtctcctgttacgaccgatcagccgattagccccgaacccataacacagccttcctgcataaagcgccaacgggcggctgggaatcctggttcgcttgccgcaccgattgatcacaaaccttgttcagctccacttgagcccaagtcccaggcgtccagaaaccaaagatggggagccgttagagcagctgaaagcctcactgcaattcccgaaccagcctcccctcagcttctagaaaccccgattcatgcgtcccagatccagaaggtggaacccgctggccggtcccgtttcacgccagaacttcaacctaaggcctcccagtctagaaaaagaagtctggccaccatggactccccaccgcatcagaaacaaccgcagcgcggggaggtatcccagaagactgtgattatcaaggaagaggaggaagacacggcggagaaaccaggcaaggaagaggatgtcgtgacacctaaacctggtaaaaggaagagagaccaggcagaagaggaaccgaaccgtatcccaagccgctcccttcggaggaccaagctgaatcaggagagcacggcacctaaggttctgttcaccggggtggtcgatgctaggggggaacgagccgtcctggcacttggaggctctctggccgggtcagcggccgaggctagccatttagtgactgaccggatcagacgtacagttaagtttctatgcgcactagggaggggcataccaattttgagtctcgattggcttcatcagtctcgcaaggccggctttttcctaccccctgacgaatatgtcgtgactgaccccgaacaagagaagaatttcggtttctctctgcaggacgccttgtcccgagcgcgggagcgccgcttgctcgaagggtacgaaatatatgtaaccccaggtgtgcaaccccctcctccccagatgggggaaataatcagctgttgtggcggcacctatctgcctagtatgccgcgctcatacaagccccaaagggtagtcatcacatgccctcaggactttcctcactgctcaattcctctcagggtcggcctcccactgctctcacctgagttcctgctgaccggcgttttgaaacaggaggccaaacccgaggcttttgtcctttcccctctggaaatgtcttcaacctag

SEQ ID NO: 269688 - DNA, 4968 bp, Artificial Sequence
  derived and/or modified sequence
atgtaccaccggctggacgtgagcctgcccttcgtgagccggggcccacttactgtcgaagagacaccacgggtccagggcgagacacagccgcagagactcctgcttgccgaggatagtgaggaggaggtagacttcctgtcagaaaggcgaatggtaaaaaagtcccggaccacctcttcatcagtcatcgttcctgaatccgatgaggaggggcactcacccgtgctgggcgggctgggccctcctttcgcctttaaccttaacagcgataccgacgttgaggagggtcaacagccggcgactgaagaggccagctccgccgcccggcggggagctacagtggaagccaaacagtccgaagcagaagtggtcactgagatacagctggaaaaagaccagcccctggttaaagaacgggataacgataccaaagtgaaaagaggcgcaggcaacggagtggtgcccgccggtgttattctggaaagatctcaacccccaggcgaggactcggatactgacgtagatgacgactccagaccacccggcaggcctgctgaggtgcatctggagagggctcagccattcggctttatcgacagcgacacagatgccgaagaagaaaggattccagccacgcccgtggtcatcccaatgaaaaaacggaaaatctttcacggcgtaggtacaagaggcccaggcgctcccggcctcgcccatcttcaggagtcccaggcgggttccgataccgacgtggaggagggcaaggcaccgcaggctgtccccctggagaaatcccaggcttcgatggtcatcaactctgatacagatgatgaagaagaagtcagtgctgctttgacgctggcacacctcaaagagtcacagccagctatatggaatagggacgccgaggaagacatgcctcagcgagttgtgctactgcagagaagccaaacgaccacagaacgcgacagtgacaccgatgtggaagaggaggaactacccgttgagaatcgagaggccgtcctcaaggatcacaccaagataagggcactagtaagagcccatagtgagaaggatcaacccccatttggcgattcggacgactccgtcgaagctgacaaatccagtcctggcatccacttagagcgctctcaggccagtactactgtagacataaatacacaggtcgagaaggaggtccctccaggtagcgctataatacacatcaaaaaacatcaggtcagtgtggagggcaccaatcagactgatgtgaaggctgtgggtggtcccgcgaagctgctagtcgtaagcttagaggaagcttggcctctccacggagactgcgagaccgacgccgaagagggaaccagccttacggcctctgttgtggctgatgttcgaaagagccagctgccagcagagggtgacgccggcgcggaatgggcagcggccgtcctcaaacaggagcgggcccacgaagttggggcccagggaggacccccagtggcacaggtggagcaagacctacctattagtcgagagaacctgactgacctagtggtggatacagatacactgggggaatcaacacaaccacagagggaaggagcccaggtgccgaccggaagagagagggagcaacacgttggcgggaccaaagactccgaagataactacggagactctgaagatcttgatctacaagcgactcagtgtttcttagaaaatcaggggctggaagtccagtccatggaggacgaacccacccaggcttttatgctgacgcccccccaggaattaggaccaagtcattgctcttttcagacaacgggcctgctaaactgcaaaatgcctcctgctgagaaggcttctagaatccgagccgccgagaaagttagccgaggagatcaagagagtcccgatgcatgtctcccaccgacagtccccgaggctcccgcgcctccgcagaagcccctgaatagtcagagccaaaaacaccttgcaccgccaccattactgtcgcccctactgccctcaattaagccaaccgtccggaagacacggcaggacggatcccaagaggccccagaggctcctttaagcagcgaactggagcccttccaccccaaaccaaagatccgtactcgaaaatcttccagaatgactccattccccgcaacatcggccgcccccgagccacacccgtcaacctccactgcgcagccggtgacgccaaagccaaccagccaggcgacccgctcacgaactaaccgatcttcagtgaaaacccccgaacccgttgtccccacagcgcctgaacttcagccatccacttctacggaccaaccagtgacgtcggaacctactagccaagttacccgcggccggaaatcgcgaagctctgtgaagacacccgagacagtggtgcccactgcactagaacttcagccatctacatcaacagatagacccgttaccagtgaaccaacgtcccaggctacccggggtaggaaaaaccgctcttctgtgaaaacacccgaaccagtcgtccctaccgctcccgagttgcagccttccacgagtactgaccagcctgtaacatccgagccgacctatcaagcgaccagaggccggaagaaccggtcttccgttaaaacccccgagcccgtggttcccacagccccagaacttagaccctcaacatccactgaccgcccagttaccccaaagcccacttcccgaaccacacggagccggacgaacatgtcaagtgtgaaaaatcccgagagcactgtccctattgcacccgagctgccaccctccacttctacagaacagcccgtgacgcctgagcccacgtctagagccacccgcggtcggaagaatcgcagcagcggcaaaacccccgaaaccctggttccgacagcgcccaagttagaaccttccacatctactgaccaaccggtgacgccagagcccaccagtcaggcgaccaggggccggacaaacaggtcatccgtcaaaacgccagagaccgtggtccccaccgctcctgaactgcaaccttctacctcaacagatcagcccgttaccccagagcccaccagtcaggcaactcggggcaggacagataggtcttcagtcaaaacccccgaaaccgtggtcccaaccgctccagagctccaggccagtgccagcaccgaccagccagtgacctctgaacccacatctagaaccactcggggtaggaagaatagaagttccgtgaagacacccgagacggtcgtgccagctgccccagaactgcagccgtctacaagcacagaccagcccgtgaccccggagcccacttcaagggcaactaggggaaggacaaataggagcagcgtgaagacacccgagtccatcgtcccaattgcaccagagctgcagccaagtacctcacggaaccagctggtcaccccggagcctacctcacgggccacccgctgcagaaccaaccgctcatccgtgaagacaccagagccagtggttcctactgcgcccgagccacacccgactacatctaccgaccagccagtcacccccaaattgactagtcgtgccacgcgcagaaaaaccaatcgcagtagcgtaaagacgccgaagccagtggagccggcggcctctgatctggaaccattcacaccaacagatcagagcgttacccctgaagctattgcacaggggggtcagtcaaagactttacggtcttctaccgtcagggccatgcctgtgcctacaacacctgagtttcaatctcctgtcacaacagatcagcctatctccccagagccgatcacccagccctcgtgcatcaagcgccagcgggccgccggtaatcccgggtcccttgcggctccaattgaccacaaaccctgtagcgccccattggaacctaagagccaggccagcagaaaccaaaggtggggagccgtaagagcagcggagagtttaacagctatcccagagccagctagtccacagctgctcgagaccccaatccacgcttcccaaatccaaaaagtggaacccgcaggcaggtcacgctttacaccagagctgcagcctaaggcttcacagagtagaaaacggtccttggctaccatggatagtcctccacatcagaagcagccacaaaggggggaggtcagtcagaaaacagtcataatcaaggaggaggaggaggatactgccgagaagcctgggaaagaggaagacgtcgttaccccaaaacctggaaaacgcaagcgggatcaagccgaagaggaacctaatcggatcccatccagatctctgcggaggacaaaattgaaccaagagtctacagcaccgaaagtgttgtttacaggcgttgttgatgcccggggtgagcgcgccgtcctagccctgggcggatcgctggccggttcggccgcagaagcctcacatctcgtgactgatcggatcaggcgaactgttaagtttttatgcgccctcggtagagggatccctatcctgagcctggactggctgcatcaaagccgcaaggctggcttttttctaccccctgacgagtatgtggtgacagaccctgagcaggaaaagaatttcggattcagcttacaggacgccctgagtcgcgcaagggaacgtaggctgctggagggctatgaaatttacgttactcctggggtccagcctcccccaccccagatgggagaaatcataagctgctgcggcgggacgtacctcccgtcaatgcccaggtcgtataaacctcaaagggtcgttattacctgtccacaagatttcccccactgttctattccactccgagtagggctgcctctactctccccagagtttctgctgacgggagtgttaaaacaggaagctaagccagaagcgtttgtgctgagcccattggaaatgagtagcacctag

SEQ ID NO: 269689 - DNA, 5478 bp, Artificial Sequence
  derived and/or modified sequence
atggaggacacccaggccatcgactgggacgtggaggaggaggaggaaacagaacagagcagcgagagcctcagatgcaacgttgagcctgttggaagactgcacatcttctctggagctcatggtcctgagaaagactttccactgcacctggggaaaaatgtggtgggcagaatgccggattgcagcgtggccctgccgttcccctcgatatccaagcagcatgccgagatcgagattctagcttgggataaggcaccaatcctcagagactgcggctcactgaatggaacacagatcctgcgtcctcctaaggtgctgtctcctggtgtgagccaccgtctgagggatcaggaactcattctgtttgcagacctcttgtgtcagtaccatcgactggacgttagcctgcccttcgtctctcgaggccccctcaccgtggaggagacgccgcgcgtacagggtgagacacagccacagagattgttactggctgaggattccgaagaggaggtcgatttcttgtcggagcgcaggatggtgaagaagtcgaggaccacatcttctagtgtgatagtaccagaatccgacgaagaagggcactcaccggttcttggcggcctgggcccaccttttgcctttaacttgaatagcgacacagatgtcgaagaaggccagcagcctgctaccgaggaggcatccagtgcagcgcgcaggggggccactgtagaggccaaacagagcgaggctgaggtggtcacagagattcagctggaaaaagaccagcccttggtcaaggagcgtgataacgacactaaagtgaagagaggcgcgggcaacggcgttgttccggctggggtgatactggagcggtctcaacccccaggtgaagactctgatactgacgttgatgacgactccagaccgcctggaaggcctgcagaggtccacctggagcgggcgcagccatttgggtttatagacagcgataccgacgcggaagaggaaaggatccccgccactccagtagtgattcctatgaaaaaacggaaaatatttcatggcgttggaactagaggccctggcgcccccggccttgcacacctgcaggaaagtcaagccggcagcgacaccgatgttgaggaggggaaagctcctcaagccgtgcccctcgagaaatcccaggcatctatggtgatcaatagtgatactgacgacgaagaggaagtatcagccgccctcaccctggctcatctgaaagaaagtcaacctgccatctggaatagagatgccgaggaggacatgcctcagagggtcgtcctgttgcagcggagccagacgacgactgagcgggattcagacaccgacgtcgaagaggaagagctgcccgttgagaatagggaggcagtgctgaaggaccatacaaagatcagagcgctggtgagagcccacagcgaaaaagatcagccccctttcggcgattctgatgactctgtcgaagcggacaagtcatcaccgggcatacacttggaaaggtcccaggctagtaccacagtcgatatcaatacccaggttgagaaagaagtcccacccggctccgcgatcatacacatcaaaaagcaccaggtttcagtcgagggcaccaaccagactgacgtaaaggccgttggtggccccgccaagctcttagtggtgagccttgaggaggcctggccccttcatggagactgcgagaccgatgccgaggagggcacttcccttaccgcctccgtagtggccgatgtgagaaagagtcagttacctgcagaaggggacgcgggcgccgaatgggcggcagccgtgttgaagcaagaacgagctcacgaggtgggggcacagggaggccctcccgtggctcaagtggagcaagatctgcccattagtcgcgagaacctaacggatctggtggtggacacagatacattgggggagagtacgcagccacagcgggagggagctcaggtcccaaccgggagagaaagggaacagcatgttggtgggacaaaggacagtgaggataactacggagactccgaggaccttgatctacaggctacacaatgtttcttagaaaatcagggtctggaggcagtgcagagcatggaagatgagcccacccaggcattcatgcttaccccgccacaggaattggggcccagccattgcagctttcagacaactggattgctgaattgcaaaatgcctcctgccgaaaaagcatcgcgaatccgtgccgccgagaaagtctctcgcggagaccaggagtctcctgacgcctgcttgcccccaactgtgcccgaggcacccgcccctccacagaaaccactcaattctcaaagccagaaacacctggctccgcccccactgctttctcctttgttgcctagcattaagcctactgtcagaaaaactcgacaggacggctcacaggaggcacctgaagcacccctaagctctgagctcgagccctttcatccaaagccgaagatcaggacccgcaagtcatccaggatgacccccttccctgccacatcagccgctcctgagccacacccaagcacttccacagcacagcccgtcacacccaaacccacatctcaggccaccagatccaggaccaatcggagcagcgtcaagactccagaacctgtcgtaccgactgcaccagaacttcagccatcaacatccacagaccaacctgttacatcagagccaacctcgcaggttaccaggggtcgcaagagtcgatcaagtgtcaaaacacctgagacagtcgttccgaccgctctggagctgcaaccatcaacctctacagatcggccagtcaccagtgaacccacttcacaagccacccggggcagaaaaaacaggtccagcgtgaagacacccgagccagtggtacctactgcacctgagctacagccgagcacttctaccgaccaacctgtgacatctgaacccacctatcaggccacacggggcagaaagaaccgatcttccgtgaagacaccagagcctgtggtgccaaccgcacctgaattacgtccttccacttccaccgatcggcccgttacccccaaacccacctcacgcaccacccggtctagaaccaatatgtcctcagtcaagacaccagagactgtagtaccaacagctccagaattacagataagcacgagcacggatcagccagtcactcctaagccgacctccaggacaacgagaagccgaaccaacatgtcttccgtgaagaaccccgagagcaccgttccaattgcaccagagctccccccttctacgagcacagaacagcctgtcaccccagagccaacctcaagggcaacccgcggccgcaaaaatcggtccagtggcaagacgcccgaaaccctggtgcccactgcccctaagctggaaccctcaactagcacggaccaaccagtcacacctgagcccacctcccaggccacccgcggacggactaaccgttcttctgtgaagacacccgagacagttgtacccacagccccagagctgcaaccaagcacctcaactgatcagcccgtcacaccggaaccaacctcacaggcaacgagggggagaactgaccgctcaagcgtgaaaacgcccgaaactgtcgtgccgaccgcacctgagcttcaggcatccgcatcaactgatcagcccgtcacatccgagcccacttcacggaccacacggggcaggaaaaatagaagctcggttaaaacccctgaaacggttgtcccagcagcacctgaactgcagccaagcaccagcaccgaccagcccgtcacccctgaacccactagccgggccacaagagggcggacgaatagatcatcagtaaaaactcctgaatctatcgtgccaattgcgccagagctccagccctccacaagcaggaaccagttagtgactcctgagcctaccagtcgggcgacgcgatgccggaccaaccgcagctctgtaaaaacccccgaaccagtggtacctactgctcccgagccacatccgacaactagcacagatcagccagtgactccaaagttgacctcccgcgccaccaggaggaaaactaatcgcagcagcgtcaagactcccaagccggttgagccagcggccagtgatctggaaccctttactccaaccgatcagtcagtcactccggaagccatcgcacagggcgggcagtccaaaaccctgcggagctccactgtacgagccatgcccgtgcctacaacacccgagttccagtccccagtaacaaccgaccagccaatttccccagaacccattacccaaccaagctgcatcaaacggcagcgtgccgccggcaaccccggatcccttgcagcccccattgatcataagccctgttcggcccccctggagcctaagtcacaggcttcaaggaaccagcggtggggcgccgtacgagctgcggagtccctgacagcaatccctgagcccgcctcaccccaactgcttgaaactccaattcacgccagtcagatccagaaagtcgagcctgccgggcgctctagattcacccccgagctgcaaccaaaagcctctcagtcacgtaagaggtctttggcgactatggacagcccacctcatcaaaaacagccccagcgcggtgaagtctctcagaagaccgtgatcattaaggaggaggaggaggataccgccgaaaagcccggcaaggaggaggatgttgttactcccaaacccgggaaaaggaagagggaccaggcagaggaagaacctaataggattcccagtcggagcttacgccgcactaagcttaatcaggaatcaacggcacctaaagtgctctttactggggtcgttgacgccagaggggagcgcgcagtactcgctttgggcggaagcctggccggctccgctgctgaagccagccacctggttaccgaccgcattagacgcaccgttaagttcctttgcgccctgggacgaggaatccccatactgtcactggactggctgcaccaaagccgtaaagctggcttcttcttacctcccgacgaatacgttgtcaccgaccctgagcaggagaaaaacttcggtttctccctgcaggacgctctgagcagggcccgtgagagaaggctcctggagggttacgagatttacgttacacccggagttcagccgccacctccccagatgggcgagatcatatcttgttgtggaggcacctatctgccttccatgcctagatcatataagccacagcgggtcgttatcacttgcccacaggacttccctcactgttcaatccctttaagagtgggcctcccactcctatcacccgagtttctcttgaccggagtgctgaaacaggaggcgaagccagaggcctttgttctgtcccccttggagatgagctctacctag

SEQ ID NO: 269690 - DNA, 5478 bp, Artificial Sequence
  derived and/or modified sequence
atggaggacacccaggccatcgactgggacgtggaggaggaggaggaaaccgaacaatctagcgagtccctaagatgcaatgtcgagccggttgggcggctccatatttttagtggagcccatggtcctgaaaaagactttcctctgcatctcggcaaaaatgtggtaggtcgtatgccagattgttcggtggctctgccattcccgtcaattagcaagcagcacgctgaaattgagattctcgcatgggacaaggcgcctatcctgcgcgattgcggcagtctcaatgggacgcaaatactgaggcctccaaaagtactctctcccggggtgagtcacaggttacgggatcaagagcttatactgttcgcagacttgctgtgtcagtaccatcggctagatgtgagcctgccctttgtgagtcgaggacctctgaccgtagaggagactccgagagtgcagggtgaaacccaacctcaaaggctgctgctcgctgaggactctgaagaggaggtggatttccttagtgagaggagaatggttaagaagagcaggaccacctccagttcggttatagtgccagagtccgacgaggagggtcactcgcctgtgctgggcggcctgggcccgcccttcgcgttcaaccttaacagcgacactgacgttgaggagggacagcagcctgctaccgaagaagccagttctgccgcgaggaggggggcaactgtggaagcaaagcagagtgaagccgaagtggtgactgagatccagcttgagaaggaccagcctttagtcaaagagagagataacgataccaaggtaaaacgcggagcaggcaatggagtcgtacccgccggagtgattcttgaaagaagccagcctccaggagaggactctgataccgacgtcgacgatgactcgagaccacctggccggccagcagaagttcacctggaacgagcccagcccttcggcttcattgactctgacactgatgcagaagaggaacgtataccagcgacaccagttgtgatcccgatgaaaaagcgcaagatattccacggagtcggaactcgcggaccaggggcgccggggcttgcccacctccaggagagtcaggcaggcagtgacacggatgttgaggagggtaaggctccccaggccgttcccctagagaagagtcaggcaagtatggtgatcaactcagatacggacgatgaggaggaagtgtcggcagccctgactctcgcgcacctaaaggagagccagccagctatatggaaccgggacgcggaggaggacatgccacagagggtggtgctcctgcaacggtctcagaccaccaccgaacgggactctgatacagatgtggaggaggaggaacttccggtggagaatcgcgaagccgtgctgaaggaccatactaaaataagagccctcgtgagagcccatagtgagaaggatcagccccctttcggcgattccgacgatagcgtcgaagctgataaatcatcccctggcattcacctagaaaggagccaggccagtaccacagtcgatattaatacccaggtggaaaaggaagtcccacctggttccgccatcattcatattaagaaacatcaggtcagcgtcgagggcactaaccagacggatgtcaaagcggtagggggccctgccaagctgcttgtggtttcactggaggaggcctggcccctccatggtgactgcgagactgacgcggaggaaggcacaagtctgaccgcctctgtagtcgcggacgtgaggaagagccagttgcctgccgagggcgacgcaggcgctgaatgggcggcagccgtcctcaagcaggaacgcgcccatgaagtgggtgctcaggggggaccccctgtggctcaggtcgagcaggacctgccaatctccagggagaatctaaccgatctggtggttgacacagatactctgggagagtccacacagccgcagagagagggggcgcaggtgccaacgggcagagaaagagagcagcacgtcggagggactaaggatagcgaggacaattatggcgattcggaagacctcgacctccaggccacccagtgctttctagagaaccaaggacttgaggctgtccagagcatggaggacgagcctacacaggctttcatgctcacccctcctcaggaactcgggccatctcattgttcgtttcagacaactgggctcttaaactgcaaaatgcctccagccgaaaaagcgtcccgcatccgcgcggccgaaaaggtgtctagaggtgaccaagagtctcccgacgcctgcctgccacccacagtccccgaagcgccggctccccctcagaagcctcttaactcccagtctcaaaaacatctcgcacccccacccttgctgtcccctctgctcccctctataaaaccaacagtgagaaaaaccagacaagacggaagccaggaagctcctgaagcccccctgagcagtgagcttgagccattccacccaaagcccaaaattagaacacggaaatccagccgcatgaccccatttcccgccacttccgccgcacctgaaccacatccttccacctctacagctcagccagtcacacccaagcccaccagccaggccacgagatctcgaactaaccgttcctccgtgaaaaccccagaaccagtcgtgccgaccgctcctgaactccagccgtcaaccagtacagaccagcctgtcacaagtgagccaacctcccaggtaactagaggcaggaagtcaagaagcagtgttaagacacccgagacagtggtgcctaccgccctggagcttcagcccagcactagtactgacaggccagtcacttcagagcctaccagtcaagccacgcgcgggcggaagaatagatcctccgtgaagacacccgaacccgttgtacctacagcacccgagctccagccttccacatcaactgaccagccagtgacttcagaacccacgtaccaggccacccggggaagaaaaaacagatccagcgtgaagacaccggagcctgtggtgcccaccgccccagagctcaggccatcaacatcaaccgatcggcctgtgaccccaaaaccaactagccggacgacccgatctaggactaatatgtcaagtgtgaagactccagaaaccgtcgtcccaacagcacctgagctccagatatcaacgtctaccgaccagcccgttacacccaagcctacatccagaacaaccagaagccgtactaacatgtcctctgttaaaaatccagagtcaacagtcccgattgcccctgaactccctccaagcactagcacagaacagcctgtgacgccagaacctaccagccgggccactcgggggaggaaaaataggagcagcggtaagactcccgagactcttgtcccgacagcgcccaagttggaaccctctaccagcacagaccagccggttacacctgagcctaccagtcaagctacaaggggcaggaccaacagatcttccgtgaaaaccccagaaaccgtggttccaacggcccccgaactgcagcccagcacgagtactgatcagccagtgacaccggaacccacctctcaggccacgcggggaagaactgatcgctcaagcgtcaaaacccccgagacagtagtgccaactgctccggaattacaagcctccgctagtactgatcagcctgtgacttcagaacctactagtcgaactaccaggggcagaaagaacaggtcctctgtcaagacacccgagacagtggtgccagctgcacccgaactacagccctccacatctacagatcaacctgtcacccctgagcccaccagtcgggccacaaggggcaggaccaaccgcagctccgttaagactccagaaagtatcgtgcctattgcacctgagttgcagccttctacttcgagaaatcagctggtgacccctgagcctacgagtcgcgcgactagatgtcggacgaacagaagctctgttaaaacgcccgaacctgtggttcctacagcccctgagccgcatcctaccacttccacagaccagccggtcactcctaagctcaccagtagagcaacacggcgaaagacaaatcgctcttcagttaagacgcctaagcctgttgaacccgcagctagcgacctggaacctttcaccccaacggatcaaagcgtaacgcccgaggcaattgcacagggcggccagtccaaaacccttagaagctctacggtacgggcaatgcctgtacccactaccccagaatttcagagccccgtgaccactgaccagcctatctcacccgagcctatcacacagccatcttgcattaagaggcaacgcgccgctgggaatcctggctctctggcagcccctatcgaccacaagccatgcagtgcaccactggagccgaagagccaggcgagtcgcaatcagcgttggggggctgtccgtgcggcggaaagtttgacggccattccagagcctgcctcaccccagctgttggagacacctattcacgccagtcagatacaaaaggttgagcccgcaggccgtagccggtttaccccggaactccagcctaaggcaagtcagtctcggaagcgcagtctcgccactatggatagtccacctcatcagaaacagcctcagcggggagaagtttctcagaagaccgtgatcatcaaggaagaagaggaggatacagccgagaaacctgggaaagaggaagatgttgttacacccaagccaggcaaacgtaaacgggatcaagctgaggaagagccgaataggatcccctcccggagcttgcgacgcaccaaactgaatcaggagtccacggcgcccaaagtgctgttcaccggggtggtagacgcccggggggaacgagccgtgctggcactgggcgggagtctggccggctccgcggcggaggcatcccaccttgttactgacaggatacggcgtaccgttaagtttttgtgcgcgctgggcagaggaataccaatcctgtcactcgattggctgcaccagagccgcaaggcaggcttcttcctcccccccgacgagtatgtcgttacagaccccgaacaggagaagaatttcgggttctccctccaggatgcgctgtcacgcgctagagagcggcgtctgttggaaggatacgagatttatgtcacacctggcgtccaaccccctcccccccagatgggcgaaattatctcttgttgtggcgggacgtacctgcctagcatgcctcggagctacaagcctcaaagagtggtgatcacctgcccccaagattttccccactgttctattcccctgagggtggggttgcccttactcagcccggagtttctcctcacaggcgtgctcaagcaggaggcgaaaccggaggccttcgtgctttcgccgttagagatgagcagtacctag

SEQ ID NO: 269691 - DNA, 5477 bp, Artificial Sequence
  derived and/or modified sequence
atggaagacacccaggctattgattgggacgtggaagaagaggaagagacagagcagtcctctgagtccctgcgctgtaacgtcgagcccgttggcagactgcacatctttagtggggcacatggacctgaaaaagattttcccctgcacctaggcaagaacgttgtgggtaggatgccagactgtagcgtggcccttccattccctagcatcagcaagcaacacgctgagatcgaaatcctggcgtgggacaaagctcctatcctgcgggactgtggatctctcaacggaacgcagatattaaggccccctaaagtgctgtcccctggagtttcccatcgcctccgcgaccaggaattaatactgtttgccgacctgttgtgccagtatcataggctggatgtttccctccccttcgtcagccgaggaccgcttaccgtggaagagacaccacgagtacaaggagaaactcagcctcagcgcctcctcctggcagaggatagcgaggaggaggttgactttctatctgaacgaaggatggtgaaaaaaagccgaacaaccagtagttccgttatcgtccctgagagcgatgaggaaggtcacagccctgtcctgggcggtctcggaccaccctttgcctttaacctgaattcagataccgatgtggaagaaggacagcagcccgcaactgaggaggctagctccgctgcacgccgtggcgcaaccgtggaagccaagcagagcgaagcagaggtggtgactgaaattcaactggaaaaagaccagcccctggtcaaagagcgcgataacgacaccaaggtgaaaaggggtgctggtaacggcgtagtgccggctggggtcatcctcgagcgaagccagccacctggcgaagacagtgacaccgatgtagacgatgattctcgtcccccaggaaggcccgcagaagtgcacttggagcgcgctcagcctttcggattcattgatagcgacactgatgccgaagaggagagaattcccgctacaccagttgtgatccctatgaaaaagaggaagatatttcacggcgtcggtacaaggggaccaggggcacccggactggcccatctacaggagtcccaggcaggaagtgatacagacgtggaagaagggaaagcaccccaggccgtcccactcgaaaaatcccaggcatcaatggtcattaatagtgacaccgacgacgaagaagaagttagtgcagcgctcacactggcccacctgaaggaaagccagcctgcaatttggaatcgggatgccgaagaagatatgccccagcgcgtggtgctgctgcagaggtctcaaacgacaacggagcgcgatagcgataccgacgtggaggaggaagagttgcccgtcgagaacagagaggcggttctcaaagaccacactaagatccgggcactagtacgggcacactcagaaaaggaccagccccctttcggcgatagcgacgactctgttgaagccgacaaatcttctcctggaattcacctagagcggtcccaggcatctacgacagtcgacattaatactcaggtcgagaaagaagtgccacccggaagtgccattatccatattaaaaagcatcaggtttcagtggaaggtactaaccagactgacgtgaaggcggtgggcggtccagctaagctgctcgtggtcagtcttgaggaggcctggccacttcacggtgactgcgaaaccgatgccgaggagggcacatctctcacagcaagcgtggtggctgatgtgcgaaaatcccagctcccagctgagggagacgctggggctgagtgggcagcagccgtgttaaaacaggagcgagcccatgaggtgggggcacagggcggtccacccgtggcacaagtagaacaggacttgccgatcagccgggaaaatttgacggacctcgttgtggataccgacacactaggtgaatctactcagcctcagagagaaggtgcgcaagtcccaaccgggcgagagcgcgagcagcacgtaggcggtaccaaagatagcgaagacaattatggcgactctgaggacctggatctccaagccacacagtgttttttagaaaatcagggcctcgaggctgtacagtcaatggaggacgagcccacccaggcattcatgttaacgccgccacaggaattaggcccttctcattgtagttttcagacaaccggacttttgaactgcaaaatgccccctgccgaaaaggcaagccgcattcgggcagccgagaaagtcagcaggggggaccaggagagtcctgatgcctgcctacctcctaccgtgcccgaagcccctgccccaccccagaagcccttaaatagtcagagccagaagcacctggccccacctccccttctcagtcctctattgccatctattaagccaacagtgcggaaaacccgccaggatggaagccaggaggccccagaagcccctctgtcctctgaactggagcctttccaccctaagcccaagatcaggacgcgtaagtcttcaaggatgacaccattcccagctacgtctgccgctccagagcctcaccctagtacttcaacagcccagccagtgacaccgaagcccacttcccaggcaactcgatcccgtacaaaccgatcttctgtgaagaccccagagcctgttgttcccaccgcaccagaactgcaacctagtacatcaactgatcaacctgtgaccagcgaaccaacatctcaagtgaccagggggaggaaaagtcggagctcagtaaaaactcccgaaacagttgtgcctacagcacttgaactgcagccctctacctccaccgaccgcccagtcacgagcgagcccacatcacaggcaacacggggtagaaaaaatcgcagcagcgtaaagactcccgaacctgtcgttcctactgcccctgagcttcagcccagcacttccacggaccaacctgtcacaagcgaacctacctaccaagccacgcgtggaaggaaaaatcgctccagcgtgaaaacccccgagcctgttgtccccacagcccctgaactccgaccaagcacgagcaccgatcgcccagttacccccaagccgacctctcggactactcgatctcggaccaacatgagcagcgtcaagaccccggaaacagtcgtgcctactgcacctgagcttcaaatctctacatcgaccgaccagcccgtcaccccaaaaccgacctccagaacaacaagatccaggaccaacatgtccagtgtcaaaaaccccgagagtacagtgccgattgccccagagctgcctccaagtaccagcacagagcagccagtcacgccggaacctacgagccgagccactcgtgggagaaagaaccgaagtagtgggaagactccagaaactttagtacctacggcacccaagttagagccgtccacaagtacagaccagcctgtgacgccagagccgacctcgcaggccacccgtggcagaaccaaccggtccagtgtgaagaccccggaaaccgtcgtgcctaccgctcctgaattacagccgtcaacgagcacagatcagcctgttactcctgagcctacatcccaggcaactagggggagaaccgacagatcttctgttaagactcctgagacagtcgtgcccacagccccagaactccaggcatctgcttcgacagaccaaccggttacctcagaacccactagtcgaacaacacgcggtcgtaagaacagatcctcagtgaagacacccgaaaccgtcgtgccggcagcacctgaactccagccctctacctcaacagaccagccggtcactcctgaacctactagtcgagccactagagggaggacaaacaggagcagtgtgaagacccccgagagcatagtcccaatcgcccctgagctgcagccgagtactagtcgcaaccagctcgtgactccagaacccacttcccgagccactcgctgccggaccaaccgttcctccgtcaaaacaccagaacctgtggttcccaccgcacccgagccacaccctacaactagtacagaccagccagtcacacccaagctgacttctcgggctactcggagaaaaacgaataggagctccgttaagactccaaagcccgtggagccggctgcctccgacctcgagccattcactccaacagatcaatctgtcacacccgaggcgattgctcagggtggacagtctaagacactcagatccagcacagtgagagccatgcctgttcccacaacaccagagttccagtcccccgtaacaaccgaccagcctatttcacccgagccaatcacccaaccttcctgcattaagagacagcgggcagctggtaaccccggtagtctcgccgcacccatcgaccacaagccttgctcagcccctctcgaacctaaaagtcaggcaagccggaatcaaagatggggtgctgttagggctgccgagagcctgaccgctatccccgagccggcaagcccacagctgctggaaactcctattcacgcgtcacagattcagaaggtggaacccgcaggaaggtcacgatttactccagagttgcagcctaaagcgtcccagtcacgtaaacggtccttggcaactatggattctcctccccatcagaagcagccacagcggggagaggtgtctcagaagacagttattatcaaggaggaagaagaggatactgccgagaaacctgggaaagaagaagacgtcgtaacccccaagccaggaaagcggaagcgcgatcaggccgaagaagagccaaacagaataccctctagatccctgcgcagaacaaaacttaatcaggagtcaacagccccaaaggttctgtttactggggtggtggacgccagaggcgagagggctgtcttggcccttgggggttccctcgcgggtagcgcagccgaagccagccacctggtgacggaccgaatcagacgcaccgtgaagttcctttgtgcactcggacgaggaatccccatcctttccctggattggctgcatcagtcaaggaaagcaggctttttcttgccaccagatgagtacgtcgtgaccgacccagagcaggagaagaatttcggcttcagcctgcaggatgccctaagcagggctcgagaacggagactccttgaggggtatgagatatacgttacgcccggtgtccaaccccctccgcctcaaatgggtgagatcataagctgctgcggcggtacttatctgccctcaatgcctaggtcctacaaaccccagcgagtcgtgatcacctgtcctcaggacttcccacactgcagcatccccctgagagtgggccttcccctgttatcaccggagtttctactgaccggtgtccttaagcaggaagccaaacctgaggcattcgtgttgtcccctctggagatgagtagtaccta

SEQ ID NO: 269692 - DNA, 4968 bp, Artificial Sequence
  derived and/or modified sequence
atgtatcataggctggatgtgtctctccctttcgtgtctcgtgggccattaacagtggaggagacccctcgtgtgcaaggggaaacccagccacaaaggttgctgctggctgaggattcagaagaggaagtcgactttctgtcggaaaggagaatggtgaaaaagtcccgtactacgtcatcctctgtcattgtgcctgagtccgatgaggagggccacagccccgtcctgggaggactgggccctccattcgctttcaatctgaatagcgatacggacgttgaggaaggccagcagccagcaactgaggaggcatccagtgctgccagaaggggagcgacagttgaggctaagcagtcagaagcagaggtagtgactgagatccagctagagaaagaccaacccttggttaaggaaagggacaacgacaccaaggttaaacgcggtgcaggcaacggggtggtgccggcaggggtcatcctggagcgctcgcagccacccggtgaagactccgacactgatgtcgatgacgattcgagacctcctggcagacctgccgaagtccatcttgagagagctcagcctttcgggtttattgattcagacaccgacgcagaggaggagagaatccctgctacccctgtggtgatccctatgaaaaagcggaaaatctttcacggggtggggacgagaggccctggagcccctggcctagctcatctccaggagtcccaggcaggaagtgacaccgatgtggaggaagggaaagcacctcaggccgttcccctcgagaagtcgcaagccagcatggtgattaacagcgatactgatgacgaagaggaggtgagcgcagcactcactctcgcacatctcaaagagtcacagcccgcaatatggaaccgcgacgctgaagaggatatgccacagagggtggtgctgctgcagcgcagccagacaacaaccgagcgggattccgatacagacgtcgaagaagaagaactgcccgtcgagaatcgggaggcagtgctaaaagatcatactaagatccgggctctcgtgcgcgctcactccgagaaggatcaacccccattcggcgactctgacgacagcgtggaagccgacaaatccagcccagggatacatctcgaaagatcccaggccagcaccactgtggacatcaacactcaggtcgaaaaagaggtgccgcctggctctgctatcatccacatcaaaaagcatcaggtctcagtggagggaacaaaccagacagatgtgaaagccgttggcggtcccgcaaagctcctggtcgtgtctctggaggaagcttggcctttgcacggcgattgtgaaactgacgctgaggaagggacctccctaactgcctccgtggttgcggacgtcagaaagtctcaattacccgctgaaggtgatgccggagccgaatgggccgcagcagtgctgaaacaggaacgcgctcacgaagtgggggctcaggggggtcccccagtcgcccaggtggaacaggacctgccgatatcgagggaaaaccttactgacctagtcgtagacaccgatactctaggcgaatctacccagccacagcgggagggggctcaggttcctactggacgggagagggagcaacatgtgggaggtacaaaggattccgaagacaactacggagattctgaggacctagacctgcaggctacccagtgctttcttgagaatcaaggactggaggtccagagtatggaggatgaacctacccaggccttcatgctgacaccccctcaagagctaggcccatcccattgttcctttcagactaccggcctcctgaattgcaagatgccaccagccgaaaaagcctctaggatacgcgctgcagagaaagtttcaaggggcgaccaagaatcacctgatgcatgtttgccccctaccgtaccggaggctccagccccaccccaaaagcctttgaactcacagagtcagaagcatttagcacccccaccactgctttcaccactcctaccatctatcaaacccacagtgcgtaaaaccagacaggacggctctcaggaagctccggaggcacccttgagtagtgaactggaacccttccatcccaagccaaagatccgaaccagaaagtcatcccgcatgacaccgttccccgctacaagcgccgcacccgagcctcacccatctaccagcactgctcagcctgtgacgcctaagccaacctctcaggcgactagatccagaaccaatagatctagcgtaaaaactccagaacccgtggttcctactgcccctgagctccagccttccacttcgaccgaccagccagtgactagcgagccaacttcacaggtcactagaggtcgcaaaagccgatccagtgtcaaaactcccgaaacagtcgtccccactgcactggaattacaacccagtaccagcaccgataggccagtcacttcagaaccaacctctcaggcaacgagggggcgaaaaaataggagctccgtgaaaacaccggaacccgtcgtgcccaccgctccggagctacaaccatcgaccagtacagaccagcccgtgacaagcgagcccacataccaggccactcgaggccgaaagaacaggtcttcggtgaagacccccgagcctgttgtccctactgcacctgagcttcgcccatccacctcgacggacaggccagtgaccccaaaaccaacatcccgtaccactagatcgcggacaaatatgtcgagtgtgaagaacccggaatcaactgtccccatcgctcctgaactccccccttctaccagcactgagcagcccgtgacacccgaaccgacttctagggccacccgcggtagaaagaaccgatcctcggggaaaactccagaaactcttgtgccaacagcgccaaagctggagccatcgacgtcgacagatcaacccgttacgccagaacctacatctcaagcaacccgcggacggaccaacaggagctctgtaaagacccccgaaaccgtagtgccaaccgccccagagctgcagcccagcacttctactgatcagcctgttacaccagagcctacctcacaggctactagagggaggacagacaggtcgagcgtgaaaactccagagacagtggtgcctacagcacctgagctgcaggctagcgccagcaccgatcaaccagtcacaagtgagccaaccagcaggaccacccggggtaggaagaaccgctcctccgtgaaaacccccgaaaccgtagtgcccgcagctccagaattacagccttctacatctaccgaccagcccgttacaccagagcctacttctagggcaacccgcggtcgcactaacagaagttcagtgaagactcctgagagtatagttccgatagcccctgagctgcagccatcgacctctagaaaccagttggtaacgcccgaacccaccagtagggctacacgctgccggacaaacagatctagtgtcaagactcctgaaccggtggttcctaccgcacctgaaccccaccccaccacatcaacagatcagccagtaacacctaagctcacctcacgcgctactcgacggaaaaccaatagaagcagcgtgaagaccccgaaacccgtcgagcccgcagcttccgacctggagccctttactcccacagatcagtctgtgactcctgaagcaatcgctcagggtggtcagagtaagaccctgcggagttcaacagtgcgggcaatgcccgtgcctacaactccagagttccagagtcctgtgactacagatcagcctatatccccagaacccatcacacaaccgtcatgtattaagagacagcgtgcagcgggaaacccaggcagcctggcagcacctatagaccataagccatgctccgcccctctggagcctaagagccaggcttcacgaaatcaacggtggggcgctgttcgcgctgccgagtcccttaccgctatcccggagcccgcttctccacaattgctagagaccccaatccacgctagtcagatccaaaaagttgagcctgcagggcgtagccgcttcacgcctgagcttcagcctaaagcttcccagtcgcgcaagagatcactggccacaatggatagcccacctcatcagaagcaacctcagagaggggaagtttcacagaagaccgtgatcatcaaagaggaagaggaagacacagcagagaagcctgggaaggaagaagacgtggttacccccaagcctggcaagaggaagcgggaccaggccgaagaggagcctaaccggatcccaagtcgaagtctgagaagaacaaaactgaaccaggagtcaaccgcccctaaagtgctcttcacaggcgttgtcgatgcccgtggggagagagcggtgctggcacttggcggttcgctggctggctcagctgctgaagcatctcacctcgtgacggacaggattaggcgcacggtgaagtttctctgcgccctgggtagagggatccccatcctcagcctggactggttgcaccaatctcgaaaagccggatttttcctgccccctgacgaatacgtggtcacagaccctgaacaggagaaaaactttggattcagcttgcaggacgccttgagtcgcgctcgggagaggaggctgcttgagggttatgagatctatgttacccccggtgtgcagccccctccgcctcagatgggtgaaatcatttcatgctgtggtgggacttatttgccttctatgcccagaagttacaagccccaacgagttgtcatcacctgtcctcaggacttcccacactgcagtattcccctcagagtgggcctgccactcctgagccccgaattcctattgacaggagttctgaagcaggaagccaaaccagaagctttcgtattgtctccacttgagatgtcaagcacgtag

SEQ ID NO: 269693 - DNA, 5477 bp, Artificial Sequence
  derived and/or modified sequence
atggaggacacccaggctatcgactgggacgtggaagaggaagaagagacagagcagtcttccgaaagtctgcggtgtaatgtggaacccgtggggagactgcacattttctctggagcccatggacctgagaaggacttcccccttcacctcggcaagaatgttgtcggacggatgcctgattgtagtgtggcactccccttcccgagcattagcaaacaacatgctgagattgaaatcctcgcatgggacaaagctccgatactccgagattgcggatccctgaatggtactcagatattgagaccaccaaaagtgttgtcgccgggtgtgtcccatagattacgcgaccaggagctcatactctttgccgatcttctgtgccagtatcaccgtctggacgtctccctgcccttcgtctccaggggtcctctcactgtagaagagaccccccgagtccagggagagacccagccccagaggcttctccttgcagaggatagtgaggaggaagtggattttctgtccgagcggaggatggttaaaaagagtcgcaccaccagttcatccgtcatcgttcccgagtccgacgaggagggccacagccccgtgctgggaggcctcgggccaccttttgcctttaacctaaacagtgatacagatgtcgaagagggccagcaaccagccacagaagaagcgagcagcgcggcacgtcgcggagccacagtggaggcaaagcaaagcgaagcggaagtggtgacggagatccagctcgagaaggatcaaccactggtgaaagagcgtgacaatgatactaaggttaagcgcggagcgggaaacggggtggtgccagctggggtgatcctggaaagatcccagcctcctggggaggactccgacactgacgttgatgacgactctaggcctcccggtcggccagcagaggtgcacttggagcgagcccagcccttcggatttattgacagcgatacagatgctgaagaggagcggattcccgctacacccgtggtcattcccatgaaaaaaagaaagatatttcacggagtgggtacccggggtcctggcgcaccaggccttgcgcatctgcaagagtcgcaggcaggctcggacactgacgtggaggagggcaaggccccacaggcagtgcctctggagaagtcccaggcttctatggtgattaactccgacacagatgatgaagaagaggttagtgccgcacttactctggcacacttgaaagagtcccaaccagcaatatggaacagggatgcggaagaagacatgcctcaaagggttgttctgctgcagcggagccagaccacaacggaacgagatagtgacaccgatgtggaggaagaagagctgccggtggagaaccgggaggctgttctgaaggatcatacaaaaatccgggctctggtgcgggcacactcagaaaaggaccagcctcctttcggcgatagtgacgactcagtggaagcagacaagtcgtctccaggcatacatctggagagatctcaggccagcaccacagttgacatcaacacccaggtcgaaaaagaggttcccccagggtccgcaatcattcatataaaaaagcatcaggtaagcgtcgaaggcacaaaccagacggacgtgaaggctgtcggaggaccagccaagctcctggtggtcagtcttgaggaagcctggccactccacggagactgtgaaacagatgcagaagagggtacttcattaacagcttcagtcgtggcagacgttcgtaaatctcagttacctgccgagggagatgccggagcagagtgggcagctgccgtgctaaagcaggagagggcccatgaagtgggagcacaggggggtccacccgtggcacaagtcgagcaggacttgccaatctctcgtgagaaccttactgatctcgtggtcgacactgatacactgggcgaatcaacgcagccacaaagagagggagcccaggtccccacggggagggagagggagcagcacgtcggaggaactaaagatagcgaagataattatggtgactcagaggatctcgatctgcaggcaactcagtgcttcctcgagaaccaaggactggaggctgtccaaagtatggaggatgagccaacacaggcgttcatgttgacgccccctcaggaactcggacccagtcattgttcatttcagaccaccggattgctcaactgtaagatgccccctgctgagaaggcatcacgcatcagagctgctgagaaggtgtcgagaggtgatcaggagtccccagatgcatgcctgccacccactgtgccggaggcccctgcaccaccccagaagcccttgaattctcaatcacaaaagcatctagccccaccacccctgctgtcccctctacttcctagcataaagccgaccgttcgcaagactcgacaggacggatcccaggaggctccagaggcacccttaagtagcgaactggagcccttccacccaaaacccaaaatcaggacaagaaagagctctaggatgaccccctttccggcaacaagcgcagcacctgagccacacccttctacttcaaccgcccagcctgtgactcctaagcctacatctcaagctaccaggagcaggactaataggtcatctgtcaaaacccccgagccagtagtgccaacggctccagaactgcagccatcaacaagcactgaccagcctgtcacttctgaaccaacctcacaagttacacgaggacggaaatcgagaagctcagtcaaaacccccgagactgtggttccaactgcccttgaactacagcccagcaccagcactgaccgtcccgttacctcggaacccacctcgcaggcaactcgcggacgtaagaaccggtcgtcagtgaaaaccccggagcccgtggtaccgaccgcccctgaactccagccaagcacatctactgaccagccagtcacctcagagccgacataccaggctacccgagggagaaagaaccggtctagcgtgaaaactccggagcccgtagtgcctacggcaccagaattgagaccgtccacgagtacagatagacccgtaaccccaaaaccgacttcccgaacgactaggagtagaacaaacatgagctctgtgaaaacacccgaaacagtggtgccaacagctccggaactccagatctccacaagtacagaccagcccgtcaccccaaagccaacaagtagaacgacacgttctcggacaaacatgtcgtctgtcaaaaatcccgagagcaccgtgcctatcgcacccgagctgcccccatctacttctaccgagcagcctgtgactccggaaccaactagccgagccacccgagggcgaaaaaatagatcatctggaaaaactcctgaaacactcgtgccaacagccccaaagttggaacccagtacatctacagatcaacctgttactcccgagccaacgtcccaggcaactaggggacgcacaaacagatcttcagtaaagactccagagaccgtcgtccctactgctccagaactgcaaccctcgacatccaccgaccaacctgttactcccgaacccacctcacaggccaccagggggaggacggacaggagcagtgtgaagaccccagagaccgtcgtccccacagcccctgaactccaagctagtgccagtacagatcagccagtgacaagtgagcctacaagtcggacaacccggggtagaaagaacagatcgtcagtgaagactcctgaaaccgtggtacccgcagccccagaactgcagccttcaacctcaaccgatcagccagttacccctgaacccacatctcgcgctacccggggaagaactaatcggtccagtgttaagaccccagagtccatcgtgcccatcgctcctgagctgcagccaagcacctctcgaaatcagctggtgactcctgaaccaacttccagagccacacgatgccgaaccaaccgtagtagcgttaaaacccctgagcccgttgttcctactgcgcctgaacctcaccccaccaccagtaccgatcagcccgttacgccaaaactgactagccgcgctacccggagaaagacaaatcgctcttctgtgaaaacacctaagcccgttgagccagccgcttcggatctggagccatttactccaacagatcagtccgtgactcccgaggccatcgctcaaggcggtcagtctaaaaccctccgtagttcgaccgtgcgcgctatgcctgtacccacaactcctgaatttcaaagcccggttacaaccgatcagcccatatctcccgaacccattacccaaccgtcctgtatcaagagacaaagggccgctggcaaccctggcagccttgccgcacccatagaccataagccatgctccgcccctctcgaacctaagagccaagctagccggaaccagcggtggggcgcagtgcgcgcagccgagtctttgaccgccatccccgaaccagcctcccctcagcttcttgagacccctattcacgcttcacagatccagaaagttgagcccgctggcaggtcgaggtttacacccgagcttcagcctaaggcatctcagtctcgaaagcgctccttggctacaatggactctccacctcaccagaaacagccgcagcggggagaagtgtcccagaaaaccgttattatcaaagaggaagaggaagataccgccgaaaagcctggcaaggaagaggatgtagtgacccccaaacccggaaagaggaaacgagaccaagcagaggaggagccaaatcgtataccctctcgttccctgagacgcactaaattaaaccaggagtccacagcccctaaggtcctgtttacaggcgtggttgacgcgcgtggcgagagggccgtgctggcacttggtgggtcactcgcgggatcagccgctgaggcatctcaccttgttacagacaggatccggcgaacagttaagtttctgtgcgccctgggtaggggaatccctatcctcagcctggattggctgcatcagagtaggaaggccggattcttcctgcctccagatgagtacgtagtgaccgaccctgagcaggaaaaaaacttcggcttctctcttcaagatgcactgagcagggctcgcgaacgtcgtctgctggaaggctatgagatttatgtaacgcccggagtgcagcccccacccccacaaatgggagaaatcatttcttgctgtggcggaacttatctgccctccatgccacgttcctataagccacagagagtggtgattacctgtccgcaagacttccctcactgctcgatacctctacgggtgggtcttccattgctatcacctgagtttctgctaacaggcgtcctgaaacaggaggcgaaacctgaggctttcgttttaagccccttggaaatgtcttctacata

SEQ ID NO: 269694 - DNA, 5477 bp, Artificial Sequence
  derived and/or modified sequence
atggaggatacacaggctatagattgggatgtagaggaggaggaggaaacggagcagagtagtgaatctctacgctgcaatgtggagccagtgggtcgcctacatatcttctctggggctcacgggcctgagaaggactttcccttacatctgggcaagaacgtcgtgggtcgcatgccggattgtagcgtcgcactgccttttccttccatttctaaacagcacgcagaaatcgagattctcgcctgggacaaagcgcctatactgcgagactgcggaagtctaaatggaacacaaatcctgaggccgcctaaggtgctgtctcctggtgtttcgcatcggctacgcgaccaggagcttatcctgttcgctgacctcctgtgtcagtatcaccggctggacgtcagcctgccttttgtgagccgaggacccttaaccgttgaagaaacgccgcgagttcagggtgagacgcagccgcaaagactgctgttggcagaagattctgaggaggaggtcgatttcctgtccgaacgcaggatggtgaaaaagtccagaacaacgagcagctccgttattgtgcctgagtcagacgaggaaggtcattctcctgtgctagggggactgggccctccgttcgccttcaatctgaactccgacacagatgtggaggaggggcaacaacccgcaacagaggaggcatcttctgcagctagaaggggagctaccgtagaagctaaacagtcagaggctgaggtggttactgagattcagctggagaaagatcagcccctggtcaaggaacgggataacgatacaaaagttaaacggggagccggtaatggtgtcgttcccgctggggtcattttagagcgcagtcagccccctggtgaagattctgacaccgatgtagatgacgattctcgcccaccaggtaggccagctgaggtacatctggagagggcccaaccattcgggttcattgattccgacaccgacgccgaggaggaacgtattccagccactccagttgtcatcccaatgaaaaagaggaagatattccacggcgtgggcacccggggaccaggcgctcccggtttagcacatctacaggagagccaggctgggagcgacacagatgtggaggaaggaaaggcccctcaggctgtgcctctggagaaatctcaggcttccatggtcatcaattcggataccgatgacgaggaagaagtgagcgccgcactcacgctggcgcatttgaaagagagtcagccggctatctggaatagggatgcagaggaagacatgccccaacgcgtggtgctgttgcaacgcagtcaaacaaccacggagcgcgattccgacaccgatgtagaagaagaagagcttcccgtagagaaccgggaggctgtactgaaggaccacacaaagatccgggcactggtaagagcccacagtgaaaaggatcagccgccattcggcgatagcgacgacagtgtggaagccgacaagagttctcctggcatccatcttgagagaagccaggcttccactacagtggacatcaatacgcaagtcgaaaaagaggtgcctcctggatccgccatcattcacattaagaagcaccaagtgtctgtcgaagggaccaatcagacagatgtcaaggccgtgggaggaccggctaagctgctggttgttagtctcgaagaggcttggccattacatggcgactgcgagaccgacgccgaggagggaacaagcctgactgcatcagtggtcgcggacgtgagaaagagtcagctgcctgccgagggggacgctggcgcagaatgggcggcagccgtcctgaagcaagagcgggcacatgaggttggggctcagggcggtccacccgtagcccaggtcgaacaagatctgccaataagccgtgagaacttgactgacctggtggttgataccgacacacttggggagtccacacaaccccagagagaaggcgctcaggttccaacaggcagagagcgcgaacaacacgtgggcggaactaaggacagtgaggacaactacggtgattccgaggaccttgatctacaggccacacagtgttttctggaaaatcagggccttgaggccgtccagagtatggaggacgaacccacccaagcttttatgctcacgcctccacaagaattgggcccatcccattgctctttccagaccactggactcctgaactgcaagatgccccctgcggagaaggctagtcgaattcgtgccgcagagaaagtgtcaagaggtgaccaagagtcacctgacgcatgcctgccccctactgtgcctgaagcccctgccccaccccagaaacccctcaactcacagagccagaagcatctggccccaccgcctcttctgtcccctctgttaccatccatcaaaccaaccgtcaggaagaccaggcaggacggatcacaagaagcacctgaggcccctctcagctccgagctcgagccgttccacccaaaaccaaaaatcagaacccgcaaatctagcagaatgacaccttttcctgccactagcgcagccccagaacctcatccatcgacctccacggctcaacctgtgactcccaagcccactagtcaggccactcggtcacggaccaatcgctcttcagtaaaaacccctgaacccgtggtcccaacagcccctgagcttcagccctcaacctctaccgatcaaccagttacatccgagcccacctcacaggtgaccaggggtagaaagtctcgctcctccgttaaaactcccgagaccgtagtacctactgccctggagttacagcctagtacgtccactgaccgaccagtcacctctgagcctaccagccaagccacacgtgggaggaaaaaccgttctagtgtgaaaactccagaacctgtggtgcccactgcaccagagctgcagccttctaccagcaccgaccaacctgtgacctccgagcccacttatcaggctacgagagggaggaaaaatagatccagcgtcaaaacgcccgaaccagttgtccctaccgcaccagaactccgtccatcaactagcactgatcggccagtgacgcccaagccaacatctagaaccacacgcagccggaccaacatgtcgtccgtgaagacgccggagactgtggtgccgaccgcaccagaactccagatctctacttccacggatcagcctgttacccctaagccgaccagccggacaacaagaagtcgcactaacatgtcttccgtcaaaaatcccgaatctacggtgccaatcgcgccagagctgccccctagcaccagcacagagcagcctgtaaccccagaacccacttctcgcgctacccggggtcggaaaaatcgctcatcgggaaagactcctgaaactctggtccccaccgctcctaagctggaacctagtacaagcaccgaccaacccgtgacaccagagcctacgtcacaggcgacacgtgggaggactaacagatctagcgtgaagacgccagagacggttgtaccaacagcccctgagctgcagcccagtacatccacggatcagcctgtaacacccgaaccgacgtcccaggccactcgaggacgcaccgatcgtagctccgtgaaaacccccgaaactgtggttcctacggccccagaactccaggccagcgcctccactgaccaacccgtcacctcagaacccaccagccggactacacgaggaaggaaaaataggtcatcagtgaaaacccctgagacagtggtccctgcggcacccgaacttcagccttctactagcacagaccagcccgtgactcccgagcctacatccagagccactaggggaagaactaacagatcttccgtaaaaacccccgaaagcatcgtccccatcgctcctgagcttcaaccttcaacctcccggaaccagctggtaacgcctgagccaacctcacgagccacgcggtgccgaacaaatcggtcgtcagttaaaacacccgagcctgtggtgccaaccgccccagagccccatccaactacgtcgacggatcaaccagtcaccccgaaacttactagcagagctacaaggcgcaaaaccaatcgctctagcgttaaaacacctaagccggtcgagccagccgcaagcgacctggagccttttactccaactgatcagtccgtaacaccagaggccatagctcagggaggtcaaagcaagacgttgcggtcaagtacggtgagagctatgccagtcccgaccacccctgaatttcagagcccagtcactaccgatcagcccatttctcctgagcccatcacacaacctagctgcattaagcggcagagagcagctgggaacccgggatctttagctgcgccaatagaccataaaccttgctcagctcccctcgagccaaagtctcaggcttcacgaaatcagcggtggggagccgtgcgcgctgcagagtctttgaccgcgattcccgaacccgctagcccccagctgctcgagacccccatccacgccagtcagattcagaaggtggaacccgcaggcaggagccgttttactccggagctgcagcctaaggccagccagagcaggaaaaggagcctggccactatggatagtccaccacatcaaaagcagccccagcgaggggaggtgtcacagaaaactgttattatcaaagaagaagaggaagatacagcagagaaaccgggtaaagaagaggatgttgtcacccctaaacccggaaagcgaaagcgagatcaggcagaggaggaacccaaccggatcccttctcggagcctccgtcgtactaaacttaatcaggagagtacagcaccaaaagtcctttttaccggggttgtcgatgctcggggtgagagggctgtccttgccctgggtggcagtctcgctggctctgcggctgaggcttctcacctggtgactgaccggatccgcaggacagtaaaatttttgtgtgcgctggggagggggatacccatactctcactggattggttacaccagtcccgtaaagcagggttttttctcccccctgacgagtacgtggtcacagaccctgaacaggaaaaaaatttcggctttagtcttcaggatgccttaagtcgcgctagagagaggcgtctactggagggctacgaaatttacgtcacaccgggagtgcagccacctccacctcagatgggagaaattatcagttgctgcggaggcacttatctccccagtatgcctagatcatataaaccacaacgcgtggtcataacgtgccctcaggactttccacactgcagcattcctcttagagtgggcctgcccctgctatctcctgaatttttactcacaggcgtcctgaagcaggaagcaaagcctgaggcttttgtgctgtctcctttggagatgtcctccaccta

SEQ ID NO: 269695 - DNA, 4968 bp, Artificial Sequence
  derived and/or modified sequence
atgtaccatcgcctcgatgtgtctctcccatttgtcagccgcggacccctgacagtggaagaaacccccagagtgcagggtgagacacagccccagcggcttctccttgccgaagattccgaagaggaagtcgacttcttatccgagaggcggatggtgaaaaagtccaggacaacgagcagcagtgttattgtccctgagtccgacgaagaggggcattccccagtgctgggcggtctggggcctcccttcgcatttaacctcaattcggatacagacgtggaggagggacagcagccagctaccgaggaggcgtcttctgccgctagaagaggggcaactgttgaagccaagcagagcgaagccgaggtggtgaccgaaatccagctcgagaaagaccagcctctcgtcaaagagcgcgacaatgacactaaagtcaagcggggagctggaaatggagtcgtgcccgctggggtgatattagagcggtcgcaaccaccaggcgaagattctgataccgatgtggatgacgactccagacccccaggccgtcccgcagaagtccatcttgagcgggctcagccatttggcttcattgattctgataccgatgcagaagaagagaggattccggctacgcccgtcgtaatccccatgaaaaagaggaagatattccatggggtaggcacaagaggcccaggagctcccggattggcccacctacaggagtcacaagctggcagcgataccgacgtagaagaaggaaaggctccacaggctgtgcccttggaaaaatctcaggcgagcatggtgattaattcagatacggatgacgaagaggaggtctccgctgcattgaccttggcccatcttaaagagtctcagcctgctatctggaaccgcgatgcagaggaggatatgccacaacgcgtggtgctactacagaggagccagactaccaccgaaagggattctgacacagatgtcgaggaggaggagctgccagtcgaaaaccgcgaggccgtcctgaaggaccatacaaaaatccgagctctagtccgagcccactccgagaaggatcagcctccctttggcgatagcgatgactcagtagaagccgataagagctcgcctgggattcacctggagcggtctcaggcgagtactaccgtagacataaacacgcaggtcgagaaagaagtgccgcctggctcagctatcattcacatcaagaaacatcaggtgagcgtggagggaaccaaccagaccgacgtgaaggccgtggggggtccggcaaagctcctggtcgtgagtttagaggaggcttggccacttcacggcgactgcgagacagatgccgaagagggtaccagtctcacagcctccgttgtggccgatgtgcggaaatcacagctgcccgctgaaggggacgccggtgccgaatgggccgctgcggtgctgaagcaggagcgcgctcatgaggtgggcgcacaagggggaccccctgtggctcaggtcgaacaggatttgccaatttcccgtgaaaacctgaccgacctcgtggtcgataccgacacactgggagaaagtacacagccccaaagagaaggtgcccaggtgccaacggggagggaacgagaacagcatgtcggtggtacgaaggattcagaggataattacggtgacagcgaagacctggacctccaagctacccagtgcttccttgagaatcaaggtttagaagtacagtccatggaagacgagcctacccaggcattcatgctgacccctccccaggaactggggccaagccactgttctttccaaacaacagggctgctgaactgtaagatgccacccgcagagaaagcaagtaggatcagggcagcagagaaagtctccagaggcgatcaggaaagcccagacgcttgtctgcctcccacggttcctgaagccccagcacctcctcagaaaccactgaacagccaaagccagaagcacctggcgcctccaccccttctttcacccctgttgcccagcatcaaaccaaccgtccgcaagacccgtcaggacggatcccaagaggctccggaagcccctctctcatctgagttggagcctttccaccccaagcctaagattcggacaagaaagtctagccggatgacaccttttccagctacatctgctgcgcctgaaccacatccctctacgtcaaccgctcagccggtgacacccaaaccgactagccaggctactcgttctcggactaaccgatcatctgtcaaaactccagaaccagtggtgccgaccgctccggaattgcagccctccaccagcaccgatcagcccgtaactagcgaaccaacctctcaggtgacccgcggacgtaagagccgctcatcagttaaaaccccggagacagtcgtcccaacagcccttgagctgcagccttctacatcgacggaccgcccagtgacctcggaaccaacatctcaggcgacacggggtcgtaaaaacagatcttcagtgaaaacacccgaacccgtggttccaacagccccagaactccaaccatctacttcgacagatcaacctgttacaagcgagcccacctaccaggccactagaggccgaaagaatcgatctagtgtgaagacacctgagcctgtggtgcccacagcacctgagctgaggccttcgacctctaccgataggccggttacccccaagccgacctcccggacaactaggagtagaactaacatgagctccgttaagaatccggagtctaccgtcccaatcgcacccgagctgccgccaagcaccagtacggaacagccagtcaccccagaaccaacctcaagggccactagagggagaaaaaataggagtagcggaaagacgcctgaaactctggtccctacagccccaaaattggagccatccactagtactgaccagcccgtcacaccggagccaacatctcaagcaaccagaggtcgaaccaacaggtcgagcgttaaaactcctgaaaccgtggtgcccacggccccagaactccagccttctaccagcaccgaccaacctgttaccccggaaccaacctctcaagcaacccgcggacgtaccgacaggtcttctgtgaaaaccccggagactgtggttcctacggccccagagctccaggccagcgcaagcaccgaccagccagttactagcgagccaaccagcagaactacaagagggagaaagaaccgatcctccgtaaaaacacccgaaaccgttgttccagccgcaccagagcttcagccctcaacttccaccgaccagcctgtaaccccagagccaacctctcgcgcaacacgcggtaggaccaatagaagcagcgttaaaacgccagaaagtatcgtgcctatagccccagaactgcaacctagcactagcagaaatcaattagtcactccggaaccgacgtctcgggcaacaaggtgtcggaccaataggtcatcagtgaaaactccagaacccgtcgtgccaacagctccggagccacaccccacaacgtcaacggaccagccagtgacaccgaaactcacttcgcgggctacccgacggaaaaccaatagaagttccgttaagacaccaaagcctgtcgagcccgctgcctctgacctcgaaccattcacacctacagatcagagtgtgaccccagaagccattgctcagggcggtcagtccaaaactctgaggtcatcaaccgtgcgggcaatgccagtgcctacgacaccagagttccaaagtcctgtcacgaccgatcagccaataagccctgaacctatcacacagcctagttgtatcaagcgccagagggctgctggaaatcccggttcattagcagcacctatcgaccacaagccctgcagtgcacctctggaaccgaaaagccaggcctcccggaaccagcgatggggagctgttcgggcagctgaatctcttacggctataccggaaccagcttcccctcaattactagagacccccattcatgcttcgcagatccagaaagtggagccagcgggaaggtcacggttcaccccagagttgcagccaaaggcctctcagtcacgcaagcgctccctggcaacgatggactctccccctcaccaaaagcagcctcagagaggggaagtctctcagaagaccgtgattataaaggaagaagaggaggacaccgcggaaaagccgggtaaggaagaggatgtggtgactcctaagcctggaaaacgaaaaagggatcaggccgaggaggaacccaaccggatcccctcacgctctctccgtcgcactaagttaaaccaagagtcgaccgccccaaaagtccttttcaccggggttgttgacgccaggggcgagcgggctgtgctggctcttggtggctcactggccggttctgccgcagaagcttctcacttggtcacagaccggataaggcgtactgtgaagttcctttgcgcactcgggaggggtatcccaatcctgtcgcttgactggcttcaccagtcccggaaggcgggattttttttgccacctgatgagtacgtcgttactgaccctgaacaggagaagaactttggtttcagcctacaggatgctctctctcgggcaagggaacgccgtctcctcgaggggtatgagatatatgtgacccccggtgtgcagccccctccaccgcagatgggtgaaatcatctcatgctgtggaggtacttatctgccaagtatgccaagaagttataagcctcaacgtgtggtaataacctgcccacaggacttcccgcattgtagcattcccctaagggtggggctcccccttctgtcccctgaattcttgctcactggcgtgctgaagcaggaagccaagcctgaggcctttgttctgtctcccttggaaatgtcatcaacttag

SEQ ID NO: 269696 - DNA, 4968 bp, Artificial Sequence
  derived and/or modified sequence
atgtaccaccggctagatgtctcactgcccttcgtttccaggggtccactgaccgttgaagaaacacccagggttcaaggcgaaactcagccccagcggctccttctggctgaagactccgaagaggaggtggacttcctaagcgagagacggatggtgaaaaaatcacgaactacttcttctagcgttatcgtaccagaatccgacgaggaggggcacagccccgtactggggggactaggtccacccttcgcctttaacttgaatagcgatacagatgtagaagaggggcaacagcctgccacagaggaagcttcttccgcagctaggcgtggtgcaacagtagaggctaagcagtctgaggccgaggtggtgacagaaattcaactggagaaagaccaacccttagttaaagaaagagacaacgacactaaagtgaagagaggcgctggaaatggtgtggtgcctgctggggtcatactggaaagatctcagcccccaggtgaggacagtgacaccgatgttgacgatgatagtaggccccctggccgaccagccgaggttcacctggaacgtgcccaaccttttgggttcattgattccgacacagatgctgaggaggaacgcattcctgccactccggttgttatcccgatgaagaagcgtaagatcttccatggtgtgggaactcgcggaccaggcgcacccggactcgcccacctgcaggagagtcaagcaggatcagacaccgacgttgaagaagggaaggcaccgcaggcagttccactggaaaaatcccaggcatcaatggttatcaattctgacacagacgatgaggaagaagtgagcgccgctctcacactggcccatcttaaggagagccagcctgcaatttggaaccgcgacgcggaggaagacatgcctcagcgcgtggttttgctgcagcggtcccaaacaaccacagagagagattcagatactgacgttgaagaagaagagctgccagtggagaacagggaagcagtgctgaaagatcacaccaaaatacgggctctggtaagggctcactccgagaaagaccaacccccattcggagacagtgatgactccgtggaagcagacaaatcaagtcccggtatccacctcgaaaggagccaagctagcacaacagtggacatcaacacacaagtggagaaagaggtgccacccggatcggccatcattcacataaaaaaacatcaagtatcggtggaagggacaaaccagacagacgtgaaagcagtgggtggtcctgccaaactccttgtggtgtccctagaagaggcctggccactccatggggactgtgagaccgatgccgaggaaggtacaagtctgacagcctctgtggtcgcggatgttaggaaatcacagctacccgctgaaggagatgctggtgcagaatgggccgctgcagtcttaaagcaagagagggcacatgaagtcggcgcacaaggcggaccaccggtagcccaggtggagcaggaccttcctatttccagagaaaatctaaccgatctcgtggtggatacggacaccctgggggagtccacacagcctcagcgcgagggggctcaagtaccaactggcagggaacgggagcagcacgtgggcggaaccaaagattcagaggacaactacggtgatagcgaggatctcgatctccaagctacgcaatgttttttggagaatcagggtcttgaggtccagagtatggaagacgagcctactcaggcctttatgctgacccctccccaagagctcggcccttcgcactgcagcttccagacaactgggctcctcaattgcaagatgccacccgctgaaaaagcttccaggataagggctgccgaaaaggtgagcaggggagaccaagagtctcctgacgcatgcctccctcctaccgtgcccgaagcccctgctccaccccagaaaccattgaactcgcaatcacagaaacatcttgctccgccacctttgctgtccccactgcttccatctatcaagccaactgtgaggaagacccggcaagacggatctcaggaggcaccagaggctcccctcagtagtgagctggaaccatttcaccccaagccgaaaattaggactaggaagtcctctcggatgacaccatttccagccacatcagccgctccggaaccccatccatcgaccagcacagcacagcccgtcacccccaagccaaccagtcaggcaacccgttcgcgaacaaatcggagttcagttaaaacaccagagcctgtcgtgcctactgcccctgagctgcagccgtcaacaagcactgatcagcccgtgacaagtgaacctacaagtcaggtcacacggggacggaaaagccgcagcagcgttaagacacctgagaccgtggtgcccaccgccctcgagctgcagccgtccacgtccactgacaggcctgtgaccagtgagcccacgtcccaggctacaaggggacgtaaaaacagaagctctgtgaaaacccccgaaccagttgtgcctacagcccctgaactgcagccttcaacgagcactgaccagcctgtaacatctgaaccaacataccaggctactaggggccgaaagaatcggtccagtgtcaaaacccctgagccagtcgtccctaccgctcctgagttgagaccaagcacttccactgaccggcctgttaccccaaagcccaccagcagaaccacacgcagcaggacaaatatgtcctcagtaaagaatcccgagtccactgtaccgatcgctcccgagttgcccccaagcacttccacagaacagcctgtcacgccggaaccgacttctcgcgctaccagagggcgaaagaaccggagctccggaaaaacacccgaaacattggtgcctaccgcgcctaagctggagccatcgactagcaccgaccagcctgtgacacccgaacctacctcccaggccacccgcggacgtacaaaccgatcctccgtgaaaactcccgagacagtggtacctactgctccagagctgcaacctagcacaagcactgaccagcccgtgacccctgaacctaccagccaggccacaaggggcagaaccgaccgctcttccgtgaaaactccagagactgtggtgcccaccgctcctgaattgcaggcttccgcttctaccgatcaaccagtgacctccgagcccacatcccggactacgcggggacgcaaaaataggtcatcggttaagacacccgagacagtggtgcctgctgcccctgagctccagccctccacgtctaccgatcagcccgtcacccccgagcctaccagtcgggctacccggggaaggacaaaccgctctagcgtcaaaacaccagagagtatagtccctattgctccagagttgcagccctcaacctcgcgcaaccagctcgtgacaccagagcctacatctcgcgcaacaaggtgtaggaccaacaggagttccgtcaaaacaccagagcctgtggttcctacagcccctgaaccgcaccccaccacttccacagatcagccggtgacaccaaagctgacaagccgcgctacccgcagaaaaaccaatcggtcaagtgtcaaaacaccaaaacctgttgagccagcggctagcgacctggagccttttacccccacagatcagtcagtcacgcctgaagctatcgctcaggggggtcagtctaaaactttgcgctcttccactgtgagagctatgcctgtgccgactacaccagagtttcaatcccctgtcaccaccgaccagcccatttccccggaacctattacccaaccatcatgcattaaaagacagagggcggctggcaaccccggttccctcgctgcccctattgaccataaaccctgcagtgcacccctggagccgaaaagtcaagctagccggaaccagagatggggggctgtacgtgccgcagagagtctgacagctataccggagccagcttctcctcagctcctagagacgccaattcatgcttcacagatccagaaggttgagcccgctggcagaagccgctttacgcccgagttgcagcccaaggcctcacaaagccgcaagcgcagcttagctacaatggatagcccaccgcaccagaagcagccacagcgaggggaggtcagtcaaaaaactgtcataattaaggaggaagaggaggacaccgcagaaaaacctgggaaggaggaggacgtggtgacccccaaacccggtaaacgcaagcgtgaccaggcggaggaggaacccaatcgcattcctagcaggtctctgcgccgaaccaagctgaaccaagaatctaccgcccctaaagtgctgttcaccggcgtggtggatgctcggggagagagagccgtcctggccctgggcggtagccttgccggttcagcagccgaagcctcccacctggtgaccgacaggattcgaaggaccgtgaagtttctgtgcgccctcggcagggggatccccatcctaagcttggactggttacaccagtccaggaaagccggttttttcttgccgccagacgagtacgtggtcacggaccccgagcaggagaaaaatttcggattcagtctgcaggacgccctctcccgggcacgggagcgacgcctgctcgaggggtacgaaatatatgtcaccccaggtgtgcagcctccacctccacagatgggggagataatttcctgttgtggcggaacctacctgccttcaatgccccgatcttacaaaccgcagcgtgtggtcataacttgcccccaggactttcctcactgctccatcccactcagggtggggctgcccctgttgtcccccgaattcctcctgacaggcgtgctgaaacaggaggccaagcctgaagcatttgtattatctcctctagagatgagcagcacttag

SEQ ID NO: 269697 - DNA, 5477 bp, Artificial Sequence
  derived and/or modified sequence
atggaagacacacaagccatcgattgggatgtcgaagaggaagaggagacagagcagtcgtccgaatctttgaggtgcaacgttgagcccgtgggtcgtctccatatattctctggggcacatggacccgaaaaagatttcccattgcatctgggaaagaacgtcgtcgggagaatgcctgattgttccgttgcactgcccttcccatctatttccaaacagcatgctgaaatcgagattctggcctgggacaaagcacccattctccgtgattgcggctcactcaacggcacacaaattctccgacctcctaaggtgctgagccccggtgttagtcaccgtctgcgcgaccaggagctcatattgtttgccgacctattgtgtcaatatcatagattggatgtgtctttaccattcgtctcccgcggacctctcactgtagaagagacccctagggtccaaggcgagactcagcctcagcgtctgctcctggcagaggattccgaggaagaggtggatttcctcagtgagaggcggatggtgaagaagagcagaacaacaagttctagtgtcatagtccctgaaagcgatgaggagggccattctcccgtactggggggattgggtccccctttcgcattcaatctgaactctgataccgacgtagaggagggacagcaacctgcaactgaagaagcgtcatccgcggcacgccgaggcgctactgtggaggccaagcagtctgaagctgaggtggtcactgagattcaacttgaaaaggaccagcccctagtgaaggagagggacaatgacaccaaggtgaagcggggtgcgggaaacggagtagtcccggctggagtgatactggagcggagtcaaccaccgggtgaggactctgataccgatgtcgatgatgattctagacccccaggaagacccgctgaagtgcatctagagcgggctcagccctttggcttcatcgacagtgataccgacgcggaggaggagagaattcccgcaacccctgtggtcatccccatgaaaaaacgcaagatcttccatggcgtgggaacccgcggaccaggtgctcccggtctggcgcacctgcaggaaagccaggccggaagcgacaccgacgtcgaagagggcaaagcccctcaagctgtgccattagaaaagtcgcaggcgtccatggtgatcaattcagatactgatgacgaggaggaagtttcagccgctctcacattggcacatctcaaagaatcgcagccagctatatggaacagagatgctgaagaggatatgccgcagagggtcgtgctcctccaacgtagccaaacaaccaccgagagagacagcgataccgacgtagaagaggaagagctgcccgtcgaaaacagagaggccgtcctaaaggaccacaccaagatcagagcgttggtgcgcgctcactccgaaaaagaccagccgccttttggggattctgacgactctgttgaggctgacaaaagttcacccggaatccacctggagcggtctcaggccagcactactgtggatattaatactcaagttgaaaaagaggtccctcccggatctgctatcattcatattaaaaagcaccaggtcagcgtggagggcacgaatcagactgatgtgaaagcagtgggtgggccagccaagttgcttgttgtttccctcgaggaggcatggcctttgcacggtgattgcgagactgatgccgaggagggtacttcactgacagcttcagtggtggccgacgtccgtaagtcacagctgcccgctgaaggtgatgctggcgctgaatgggcagccgcagtactgaaacaggagcgggcacatgaggtaggcgctcaggggggtcccccagttgcccaggtcgaacaggatctccccatcagtcgtgagaatctgaccgaccttgtcgtggatacagatactctgggcgagagcacccagccccagcgcgaaggcgcacaagtgccgacaggcagggaaagggagcaacatgtcggaggcaccaaggactccgaggacaactatggagactctgaggacttggacctacaggctactcagtgcttcctggagaaccagggattagaggctgttcagagcatggaggatgagcccacccaagcgtttatgttgacaccgcctcaggaactgggcccatctcactgtagctttcagacaacgggcttgcttaactgcaaaatgccacctgctgagaaggcatccagaatacgggctgctgaaaaggtgagtcggggagatcaggagtccccagatgcctgtctcccacctaccgtccctgaggcgccagcccctccacagaaacccctaaattctcagtcccagaaacaccttgctccgcctcctcttctgagccccctgctgccgagcattaagcctacagtgcggaagactcggcaggatgggtcacaggaggctcccgaggcccctctgtcttctgaactggaacccttccatcccaaacctaaaatccggactaggaagtcatcacgtatgacacctttccccgctacgtcagccgcacctgagccccacccatccactagcacagctcaaccagtgacgcctaagcctacctctcaggccacccgtagcagaactaaccgctccagcgtgaaaacccctgaacccgtggtgcccaccgccccagaactccaaccgagtacttccaccgatcagcctgtcacaagtgaacccacttcacaggtaacaagaggaagaaaaagcaggtcctctgttaagactccagagacagtggtccccaccgctctggaattgcaacccagcacatccactgacagacccgtcacgtcagagccaacaagccaagcaacacgcggtaggaagaatcgatccagcgttaagactcccgaaccagtggtgcccacagccccagagcttcagccttctacctctactgaccagccagtgacttcagagccaacatatcaagccacaagaggacgcaaaaaccggagctcggtgaagaccccagaacccgtggtgcccactgccccagaactgaggccatccacctcaacagatcggcctgttaccccaaagccaacatcacggactacgcggtctcgcacaaatatgtcctcggtcaaaacacctgagacggtggtccctacagctccagagcttcagattagtacctctacggatcaaccagtgactcccaagccaacgtctagaacaactcgttctagaacaaatatgagctccgttaaaaacccagaatcaaccgtgcctatagctccagagttaccaccttccactagtacggagcagcctgttacacccgagcctactagccgcgctacaagggggcgtaagaatcgctcctccggaaagacccccgagacgctggtcccaacagctcccaaactggaaccaagcacttctactgatcagccagtgacccctgagccaacctctcaggcgacccgcggtagaaccaacaggtcgtctgtgaagacacccgagaccgttgtgccaactgcaccagagttgcagccaagcacgagcaccgaccaacccgtgacccccgaaccaacctcccaggcgacaaggggcaggactgacaggtcgagcgtgaaaactcctgagacagtggttcctacggcaccggaacttcaagcatccgcctccactgaccagcctgtcactagtgagccaacaagtagaactacacgcggtcgcaaaaaccggagctccgttaagaccccggaaaccgtggtcccggcagccccagagcttcagccgagcacctctacagatcagccggtcaccccggaacctacatccagggcaacaagggggaggacaaaccgctctagtgttaaaacaccagagtcaattgttcccatcgcaccagaactgcagcccagtactagccgaaaccagctggtcacccccgagcctacttcccgggcaacaaggtgcagaaccaatcgctctagcgtcaagacccctgaacccgttgtgccgaccgccccagaaccacaccccaccactagtactgatcagcccgtgactcctaagctgacaagtcgtgcaactaggcgtaagactaacaggtcttccgtgaagacccctaagcctgttgagcctgccgcttccgatcttgagcctttcacacctacagaccagagtgtgacccctgaggccattgcacagggagggcagtcaaagaccctgagatcttcaacggtccgcgcaatgccagtccccaccacccctgagttccagagccccgtgaccactgatcaaccgataagtccggagcctataacgcagccctcgtgcattaagcgacagcgcgcagccggaaaccccggttcactagcagcccctattgaccataaaccttgttcagccccattggagcccaagagtcaggcatctcgtaaccaacgatggggtgcggtgcgtgccgcagaatcgttgaccgccattcctgagcccgcatctccccaactgttagagacacctattcacgcctctcagatacagaaggtcgaacctgcaggtcgctctaggttcacacccgagctccaacctaaagcttcccagtcacgcaagcggagccttgccactatggactcaccaccccaccagaaacagccacaaagaggcgaagtgtcccagaagaccgtcatcataaaggaggaggaagaggacactgctgaaaaacccggaaaggaggaggatgtagtgactcccaagcctggcaagcggaaaagagaccaagctgaagaggaacccaaccgtattcctagtcggtctttgaggaggacaaaattaaaccaggagagcaccgctccaaaagtgctattcactggtgtagtcgacgcccgtggagaacgagccgttctggctcttggcggaagcttggctggaagtgcagccgaggccagccatctggtgaccgacaggattaggagaaccgtcaagttcttgtgcgccctgggcagggggatccccatcctgtcattggattggctccatcagtccagaaaagccggattcttcttgccacccgacgagtacgttgtcactgaccccgagcaggaaaagaattttggcttctctctgcaagacgctttgtctagagcaagagagaggcgcctgctcgagggatacgaaatatatgtgaccccgggagtgcagccccctcctccccagatgggggagattatctcatgctgtggaggcacgtacctgcccagtatgccacgcagctacaagcctcagagggtagttattacttgccctcaggacttccctcactgcagcataccgctaagggtcggcttgcctctgttaagcccagagtttctattgacaggcgtgttgaaacaagaggcgaagccggaagcgtttgtgctgtctcccctggagatgtcatcaacgta

SEQ ID NO: 269698 - DNA, 4968 bp, Artificial Sequence
  derived and/or modified sequence
atgtaccacaggctggacgtctctctcccatttgtgtcaaggggaccgctcaccgtggaggagaccccacgggtgcagggagaaactcagccccagcgactgctgcttgccgaagattcggaggaggaagtggactttttaagcgagcgacgaatggtaaaaaagtcacgcacaacctccagctcagtaatcgttcccgaaagcgacgaagaaggccattctcccgtgttaggcggactcggcccaccattcgcgttcaacctgaattcagatacagacgtggaagaaggacagcagcctgctactgaagaggctagcagcgcagctagaaggggagctactgtggaggccaagcagagcgaagcagaagtggtgacagaaatacagctggagaaggaccagccgctagtgaaggagcgtgataatgacacaaaagtcaagcggggagcaggaaatggggtggtccccgctggtgtgattctggaaaggtcgcaaccacccggagaggattcagatactgatgtcgacgacgactcccggcctcccggacggcctgcagaagtgcacttagagcgggctcagcccttcggttttattgattcagacactgacgccgaggaagaaaggataccagccacccccgtagtcatcccgatgaaaaaaaggaaaatctttcatggcgtggggaccagaggcccaggcgcacccggattagctcatcttcaggagtctcaagccggttcggacaccgatgtggaggaggggaaggcccctcaggccgttccgctggaaaaaagccaggcgagcatggtgatcaacagcgacactgacgatgaggaggaagtgagcgccgctctgaccctggcacatctgaaggaatctcagcccgcaatttggaatcgcgacgcggaagaggacatgcctcaaagagtcgtgttactccagagatcccagacaaccactgagcgagacagtgatacggacgtggaagaggaggaattaccagtcgagaaccgggaggccgttctgaaggaccataccaagatcagggccctggttcgcgcacattctgagaaggatcaacctccttttggagatagcgacgatagcgtggaggccgacaagtctagtccaggcatccacttggaaaggagccaggcgagtaccactgtagacataaacacacaggtggagaaagaggtaccccctggatctgcaatcattcacattaagaagcatcaggtgtctgtggagggaactaatcagaccgatgtgaaggccgttggaggccctgccaagttgttggtggtctcgctggaggaagcttggccgcttcacggcgactgcgagacagatgcagaggaggggacctcactgacagcaagcgtcgtcgctgacgtgcgcaaatctcagctgccggctgagggagacgctggggcagaatgggctgccgctgtgctgaagcaggagcgagcccacgaggtcggagcccaggggggacccccagtggcgcaggttgagcaggacctacccatcagcagagaaaacctgaccgatttagtggtggatacagacaccttgggcgaatctacccaaccccagagagagggcgcacaggttcctacaggcagggaaagagagcaacacgtggggggtacaaaagactccgaagataactacggggactctgaggatctcgatctccaggccacccagtgctttctcgagaatcaggggctggaggtccagagtatggaagacgagcccacacaagcgtttatgcttacaccacctcaggaacttggacctagccattgtagcttccagaccaccggactgttgaattgcaagatgccccctgcagaaaaagcgagccgaatccgcgctgccgagaaagttagccgcggagatcaggagtctccggatgcctgtctgcccccaacggtaccagaggctccagctccccctcagaaaccattaaactcacagtcgcaaaagcatctcgccccacctcccctactcagccccctgctgccctccatcaagcccacggtgcggaaaacccggcaagacggctcacaggaggcaccagaagcgcctctgtcttctgagctggaacccttccaccccaaacccaagatccgaactcgaaagtcaagccggatgaccccctttccggctactagtgctgctcccgaaccccacccctccacttctacagcccagcctgtgactccgaagcctacgtcccaagctaccaggtctaggactaaccgaagctcagtgaagacccctgaaccagtggtacccactgcccctgagctgcaaccatccacttctactgaccaaccagtaacaagtgagccaacatctcaggtgacacgagggaggaagtccaggtccagcgtgaagactcccgagacagtggttcctactgcactggaactgcaacccagcaccagcaccgatcgccctgttacttcagagccaacgtctcaggcgacccggggacgtaagaataggagtagcgttaagactccagagccagtcgtgccaactgcacctgagctgcagccctcaacttccactgaccagccagtgactagcgagccgacctaccaggcgactcggggaaggaagaataggtcctctgtgaagactcccgagccagttgtgccaaccgcccctgagctgagaccatctaccagcacagatcgcccagtcactcccaagcccaccagtagaaccacccgaagcaggacaaacatgagcagtgtcaaaaatcccgagtcaacggtaccgatagccccagaactcccccctagtaccagcaccgaacagcccgtgaccccagagcctacctcccgtgcgacaaggggtcggaagaacaggtctagtgggaaaacgcccgaaaccttggttcccacagctccaaagctagagccgtccacatccacagatcagccagtgacacctgaaccgaccagccaggcaaccagggggcgaaccaataggagctcagtaaaaactcctgaaactgtcgtgcccaccgcgccagaactgcagccatccacgtcaactgatcagccggtgactcccgaaccaactagtcaggctactcgtggcagaacagacagaagcagcgtgaaaacacccgaaaccgtggtccccacagcacccgagctccaagcttcagcatcaaccgaccaacccgtgacctcggagcctaccagcagaaccactaggggcagaaagaatcgctcctccgttaagacgccggaaacggtcgttccggctgccccagagctacagccatccacttcaaccgatcagccggtcacacctgagcctacctcgagagcaacccggggacgcacaaataggtccagcgtgaaaacaccagagtctatcgtacccatcgcaccagaactgcagccttccacaagtaggaatcaactcgtaaccccagaacctacatcacgcgcaactcgatgccggaccaataggtcttccgtcaagactcccgagcccgtggtacccaccgccccagagcctcacccgacaactagcaccgatcagcctgttacaccgaagttgacgtcccgcgctacccgccgaaagacgaatcggtcaagcgtgaagacacctaaacccgtcgagccggcagcttcggacctagagccctttacgcccaccgatcagtccgtgactcctgaggcaattgcccaaggcggtcagagcaaaacgctgagatctagcacagttagagccatgccggttcccaccacccctgagtttcagtctcccgtgacaacagatcagccaataagtccagagccaattacgcagccatcttgcataaagcggcagcgggcagccggtaatccaggaagcctcgcagcgcctattgaccacaagccgtgctcagcaccactcgagccaaagtcacaagcctctaggaatcaacggtggggggcagtgcgggcagccgaatctctcacagccatcccggagcccgcttctccccagctcctggagaccccaattcacgcctcacagattcagaaggtggagcctgccggtaggtccagattcacccctgaactgcaacccaaggcctcccagtcacgaaagcgctctttagctacaatggattcccccccacatcagaagcagccacaaagaggggaagtgtctcaaaagacagtgatcattaaagaggaagaagaagacaccgccgagaagccaggaaaagaagaggacgtggttacccctaagcccggaaagagaaagagagaccaggctgaggaagagcccaataggataccgtcccgttcattgagacgcaccaaacttaatcaggaatccaccgctcccaaggtcctattcactggggtggtcgatgccaggggcgagagagctgtgctagcactggggggttctttggccggttccgccgcagaagcttcacatctggtcactgaccgaattcgccgtactgtgaaatttctgtgtgcactggggcgagggattcccatcctctcccttgactggctgcaccagtcccgaaaggctggattcttcctgcctcctgatgaatacgtcgtgacagaccctgagcaagagaaaaacttcggtttctctctgcaggacgcactgtcgcgggcacgcgaacgccgacttctggaagggtatgaaatatatgtgacccctggtgttcagccccctcctccacagatgggagaaattatctcctgttgcggtggcacctacctccccagtatgccacgcagctataaaccacagcgtgtggtgatcacttgtccgcaggattttccccattgttcaatacctttacgcgtgggtctgcctcttctgagtcccgaattcttgctgacaggagtcctgaaacaggaggctaaacctgaggcttttgtgcttagtcccctggaaatgagcagtacttag

SEQ ID NO: 269699 - DNA, 4968 bp, Artificial Sequence
  derived and/or modified sequence
atgtatcaccggcttgacgtgtcgctgccctttgtcagcagaggccctttgaccgtggaagaaactccccgagtgcagggggagactcaaccgcagagactgttgcttgcagaggacagcgaagaggaagtagacttcctctctgaacggcgaatggtgaagaagtcccggacaacgtcatcatcagtgatagtccccgaaagtgatgaagaaggccattccccggtgctgggaggcttaggccctccctttgccttcaatttgaattccgacaccgacgtggaagaggggcaacagcctgctaccgaggaggctagcagcgccgcaaggagaggtgcgactgtagaagctaaacagtccgaagccgaggtcgtcacagaaatccaactcgagaaagaccagcctctggtaaaagaaagggacaatgataccaaggtcaaaaggggagcagggaatggagttgttccagcaggggtgatccttgagcgttcgcagccccctggcgaggactccgacaccgacgtcgacgatgatagtagacccccagggcgacccgcagaggtccacctagagcgcgctcagccttttgggttcatagactctgacacagacgccgaggaagagaggatcccagccactcccgtcgtgattcccatgaagaaaagaaagatattccacggagtgggcacaaggggacctggcgctcccggactcgcacaccttcaggagtctcaggctggcagtgatacagacgtcgaggaaggcaaagcaccccaggccgtgcctttggagaagtcccaggcaagtatggtgatcaactccgatacggacgacgaggaggaagtgagtgctgccctgactctggcgcatctgaaggagtctcagcctgccatctggaaccgggatgccgaggaagatatgcctcagagagtggtgctgctgcaacgttcacaaacgaccacagagagagatagcgatacagatgtcgaggaagaagagctgcctgtcgagaatagagaggctgtcctgaaggaccatacaaagatcagagctcttgtgcgggctcactccgagaaggaccagccaccctttggcgactcggacgattccgttgaggctgacaagagttcaccgggaattcatctggagagatcacaggcttcaaccactgtagatattaatacgcaggttgagaaggaggtcccaccagggagtgccatcattcacattaaaaaacaccaagtgtcagttgaaggcacgaatcagacagacgtgaaagcagtcgggggaccggcaaagctgctggtggtgagcctagaagaggcctggcccctccatggcgattgcgaaactgacgctgaggagggcacgagcctgactgcatcagttgtggccgacgttcgcaagagccagctccctgctgaaggcgatgctggtgctgaatgggccgctgcagtgctcaagcaggaaagagctcacgaagtcggcgcacagggcggtcccccagtggcacaggtggagcaggatctaccaatctcccgggaaaacttaacagacctggtggtcgacacagatacactgggtgagtccacccagcctcagcgcgaaggagctcaggtgccaaccggaagagaacgtgagcaacacgttggcggtaccaaggatagcgaggacaactatggcgattcagaagatcttgatcttcaggccacacagtgcttcttagagaaccagggcctcgaagtccaatccatggaagacgaacccacccaggctttcatgctgacaccgccacaggagttaggtcctagccactgtagcttccaaacaactggcctgctcaattgcaagatgcccccagcggagaaggcaagtaggatacgagccgcagaaaaggtgtctcgcggtgatcaagaaagtcccgacgcttgcctcccccctacagtacctgaagcccctgcccctcctcaaaagcctctaaatagccagtcccagaagcacctcgcccctccccctctgctctcccccctactgcccagcatcaaaccaaccgtgcgaaagacgagacaggatggaagccaggaggcacctgaagccccactctctagtgagctcgagcccttccatcctaagcccaaaatcaggacacgtaaatctagtcggatgactcccttccccgctacaagcgctgcacccgagccacatccatcaacttctactgcccagcctgtcactcctaagccgacgtctcaggctactcgttctcgtacaaaccgcagcagcgtgaaaacaccagaacctgtggtgcctacagcgccagaactccaaccctcaacatctactgaccagcctgttacaagtgaaccgacctcacaggtgacaagggggagaaagtcacgttctagcgttaagaccccggaaaccgtggtccctacagcacttgagctgcagccttccactagtacagataggcccgtgacctcagagccgacctctcaggctacccggggaagaaaaaatcgatcctcagttaaaacccccgaacctgtggtaccaacagcacctgagctgcaaccatccacttcaaccgatcagcccgtcacctctgagcccacctaccaggctaccagaggtaggaaaaaccggtcgagcgtgaagactcctgaaccagtcgtgcccaccgctcctgaattgaggccttcaacttccaccgaccgacccgtcacaccaaagccaacatcccggacaacccgttccaggaccaatatgagcagcgtgaaaaaccccgaaagcacagtgccaattgccccagaactgcccccatccacttccaccgaacagcctgtgacacccgaacctacttcaagggctacccggggtaggaagaatcgatcctcaggcaaaactccagaaaccctggttcctacagctccaaagctcgagccttccaccagcactgaccagcccgttacacccgaaccgacttcacaggccactaggggcagaacaaaccggtcaagcgttaagactcctgagaccgtcgtgcctaccgccccagaacttcagccatcaacttccacagaccaacccgtgactcctgaacccacctcgcaggcgactcgagggcgtactgatcgttcttcagtgaagacgccagagactgttgttccgacggcacccgagctccaggcatccgcttccacggaccagcctgtcacatcagaaccaactagccgcacgactcgcggtagaaaaaacaggtcctctgtgaagacacctgaaacagttgtgcctgctgcccctgagttgcagcctagtacttcgaccgatcagcctgtgacacccgagcccactagtagggccacccgcggaaggactaacagaagcagcgtaaaaactcctgagagcattgtgccaatagctcctgagctccagccttccacgagcaggaaccagctggtcacccctgagccaacttccagggccacgagatgccgcacgaatcgctcctctgtgaagacacccgagcctgtcgtgcccacagccccagagccacatccaaccactagcacggatcagccagtgacgccaaagctaacgagcagagccacacgccgtaagacaaataggagctccgttaagaccccaaagccggttgagccggcagcaagcgacttagagccattcacacctaccgaccagagcgtcacaccagaagcgatcgctcaagggggacagtctaagacactccgctctagtacagtgagggcaatgcccgtgccgaccactcctgagtttcaatctcccgttactaccgatcagccgatttcacccgaaccaataacacagccctcctgcattaagcgccagagggctgccggaaatccgggaagtttggcagccccaattgaccacaagccctgttccgcgcctttggagcccaaaagccaggcaagcaggaaccagcggtggggtgcggtgcgagcagccgaaagcctcaccgctatcccagagccggctagcccccagcttctggagactccaatacacgcttcccagatacagaaggtagaacctgccggaagaagtagattcaccccagaacttcaaccaaaggctagccagagtcgaaagcgtagtctggctacaatggactccccccctcaccagaagcagccgcagagaggggaagtgtcccagaagactgtcatcataaaggaagaggaagaggacacagcggagaagccgggaaaggaagaagacgttgtgacacccaagcctggtaagcggaagagagaccaagctgaagaggagcccaatcgcatcccgtctcgctctttgaggagaactaagctgaaccaggaatcaacagcgccaaaagtgttgttcacaggggttgtcgacgctaggggagaacgtgccgtgcttgctctggggggaagcctggcaggaagcgccgctgaagcaagccacctcgtgacagatagaatccgccgtacagtgaagttcctgtgtgccttaggcaggggcattccaatcctatccctggattggctgcatcagtctaggaaggccggattcttcctgccacccgacgaatacgtcgttactgaccccgaacaggagaagaactttgggttttcccttcaagacgcgctgtcccgagccagggaacgaaggctgctcgagggttacgagatttacgttacacctggtgtgcaacccccaccacctcagatgggcgaaatcatatcttgttgtggaggaacctatctgccatccatgccacgctcatacaaaccacagcgagtcgttatcacttgcccccaggacttcccacattgctcgatcccacttagggttggtctcccactcctgtctcccgagttccttctgaccggcgtacttaagcaggaggccaaacctgaggcttttgtattatcgccccttgaaatgagctccacctag

SEQ ID NO: 269700 - DNA, 4968 bp, Artificial Sequence
  derived and/or modified sequence
atgtatcatagattggatgtaagcctccccttcgtatcacgcggtccactaacagtcgaggaaacccccagagtgcagggtgagacccagccccagcgactccttctcgctgaggacagcgaggaagaagtggacttcctctctgagagacgtatggtgaaaaagagccgaaccacatccagttccgtgatcgtgcctgagtccgacgaggaggggcatagcccagttttggggggattgggacccccattcgcctttaacttaaacagtgatacagatgtcgaggaaggacagcagcccgcaaccgaagaagccagctctgccgcacgcagaggcgcaacagtcgaggccaagcagtcagaagccgaagtcgttactgagatccagttagagaaagatcagccactggtcaaagagagagacaatgacacaaaggtgaaaagaggagcaggcaatggtgtcgtacccgctggtgtcatcctcgaacgaagccaaccccctggtgaggattcagacacagacgttgatgacgatagccgacctcccggaagacctgctgaggtgcacctggaacgtgcccagccctttgggttcatcgattcagacactgacgctgaggaagaaaggatcccagctacaccagtcgtcatcccaatgaagaaaaggaagatttttcatggcgtcggcacaagaggacccggagcacctgggctggcgcacctgcaggaatctcaggcgggatcagataccgacgtcgaagaaggcaaggccccacaggcggtgcctctggagaagagtcaggccagtatggtcatcaatagcgacacggatgatgaggaagaggtgtcagctgctctgaccctggcccacctaaaagaatcacagccagctatctggaaccgagacgcagaagaggacatgccccagagggttgttctgcttcagcgctcccagacaaccacagaacgcgatagcgatactgacgtggaagaggaagagttgcctgtggaaaaccgcgaggcggtgttgaaagatcatactaaaatcagagcgttagtacgcgctcactctgagaaggaccagcctccattcggcgacagcgatgactccgtcgaggcggataaaagtagccccggaattcacttggagagatcacaggctagcactacagtcgatatcaatactcaggtagagaaggaagtgccgcctgggtccgccattatccacataaaaaagcatcaggtgagtgtggaggggactaatcagaccgacgtgaaggcagtgggtggcccagcgaaactgctggtggtcagcctggaggaggcatggcctctccacggcgattgtgagacggacgccgaagaggggacatcacttaccgcaagtgtggtggcagatgtgagaaaaagtcagctgccagcggagggcgatgccggtgcggagtgggccgctgccgtcttaaaacaggagcgggcacatgaggtgggggcacagggtggacctccagtcgcacaggtggaacaggacctaccaatttctagagaaaatctcacagatctggtagtcgacactgatacactcggtgaaagcactcagccccagagggaaggtgcacaggttccaaccgggagagaacgtgaacagcatgtagggggaacaaaggactcagaggataattatggcgatagcgaggacctcgacctccaggcaacccagtgcttcctggaaaatcaggggctggaagtgcagagcatggaagatgaacctacccaggcattcatgctgactccgccacaagaactggggccttcccactgcagcttccaaacaaccggcctgctgaactgtaaaatgccccctgcagagaaagcttcaagaatccgggctgcagagaaggtgagcagaggtgatcaggaaagcccagacgcctgtcttccccctaccgtccccgaggcccctgcaccaccccagaaacctctgaattctcagtcccagaagcacttagcaccaccacctctgcttagccctctactgccctcaatcaagcctacagtgcggaaaacccggcaggacgggagtcaagaggcccctgaagcaccactctctagtgaactcgagccgttccaccctaaaccgaaaatccgtacacggaaaagtagccgcatgacacccttcccggctacttccgcagctcccgaacctcacccctctacttcaacagctcagcccgtgacgcctaagcccacctcccaagccactaggagccgaacgaatcgctcctctgtaaagacacctgaacctgtcgttcctacggcgccagaactgcagccatcaacctctacggaccagcctgtcactagtgaacccaccagtcaggtaacgaggggacgaaaatcacgcagcagtgtgaagacacctgaaaccgtggtcccaacggcacttgaactacagccgtccacctccactgatcgcccagtaacaagtgagcctacaagccaagccactcggggaaggaagaaccggtcttccgttaagacacctgaacctgtggtgccgactgcaccagagctccaacctagcacaagcactgatcaacccgtgactagcgagcccacttatcaggctacgcgcggacggaagaatagatcctcagtgaagacgccggagccggtggttccgacagctcccgagctgagaccaagcacatcaacagatagacccgtcactccgaagcccacatcgcgcaccactcgcagcagaacaaacatgtcttcggtcaaaaaccccgaatctaccgtgcccatagctcctgaactccccccttccacctccacagaacagccggtaactcctgagcccacaagtagggctacacgcggacggaagaatcggtcatctgggaaaacccccgagacactcgtgccaaccgcacctaaactggagcctagtacctcaaccgaccagccagtgaccccggaaccaacatctcaagcaacacgcggtagaaccaaccgatccagtgtgaagacccccgaaaccgtggttcccacagctcctgaattgcaaccctcaacgagcacagaccaacctgtgactcccgagcccacctcccaggcaacacgagggagaacagaccggtcaagtgtgaagacacccgagacagtggtgccaaccgccccagagttacaagcatctgcttcaactgaccaacctgtcacttccgaacccactagtaggaccacccgcggtaggaagaaccgcagcagcgtcaaaacacctgaaaccgtggtgcctgctgcgcctgagctccagccatctacatctacagatcaaccggttacaccagaaccaacctctcgggcaacaaggggtcggactaacaggagcagcgtgaagacccccgaaagcatcgttcccattgctcccgagttgcagccatccacaagcaggaatcagctcgtgacacctgaaccgacaagtcgcgctacaagatgtagaaccaacaggtccagcgttaagacacctgaacctgtcgtcccgacagcgccagagcctcatcctacaacctctaccgaccaacctgtaacacctaagctaacaagccgggcaactaggagaaagacaaaccgaagctcagtgaagacacctaagcccgttgaaccagccgctagcgatctggaaccgtttacgcctactgatcagtccgtgacccccgaagctattgctcaaggtgggcagagcaagactctgcgttcgtctaccgtcagggctatgcctgtgcccacaactcctgagtttcagagtcctgttaccaccgatcagcccatcagtcctgaaccgatcactcagcccagttgcattaaacggcagagggctgcaggcaaccccggatccctagccgctcccatcgaccacaagccatgttccgccccactggagcctaaaagccaggctagcagaaaccaacgctggggtgcagtacgcgcagccgagtccctgacggcaattcccgagcccgcaagtcctcagctgctggagacccctatccatgcctctcagatacagaaggtggaacccgctgggcgttccagattcacaccagagctccaaccaaaggctagccaaagcagaaaaaggtccctcgccactatggatagccctccacaccagaaacaaccgcagcggggagaggtgtcacagaagacggtgatcattaaagaagaggaagaggacactgccgaaaagccaggtaaagaagaagatgtggtcacccctaagccgggaaagagaaaacgggatcaggccgaggaggagcctaatcggatccctagcagaagtttgagacgaacaaaattgaaccaggagtccacagcccctaaggtgctgttcaccggggtggtagacgccagaggggaaagggccgtgctggccctaggaggctcgttggccggatccgcagctgaggccagccacttggtgactgatcgcattagacgaactgtaaagtttctttgcgccctcgggagaggaatacccatcttaagcttggactggctccaccagagtcggaaggccggttttttcttgccacctgacgagtacgtcgtgaccgacccagagcaggagaagaatttcggattctcacttcaggatgccctgagccgcgctcgtgaacgcaggctgttagagggatacgaaatctacgttacacctggagtgcaacctccccctcctcagatgggggaaattatatcctgctgtgggggtacttacctcccatccatgcctagaagctacaagccgcaaagggtcgtgatcacctgcccacaggattttcctcattgttcaatacccttacgggtcggcttaccccttcttagccctgagtttttgctgactggagtgcttaaacaagaggccaaaccggaagcgttcgtcttgtcacccttggaaatgagttcaacatag

SEQ ID NO: 269701 - DNA, 5477 bp, Artificial Sequence
  derived and/or modified sequence
atggaggatacacaggctatcgattgggatgtggaggaagaggaggaaacagaacaatcctcagagtcactgcgatgtaacgtggagcccgtcgggagactgcatattttcagtggcgcacacggaccagagaaggattttccactgcatttggggaagaatgtagttggcaggatgcctgattgttcagtggcacttccctttccttcaatctcaaagcagcatgcagaaatagaaattctcgcctgggataaggcacctatcttgagagactgtggctcattgaacggcactcagatcctacgccctcctaaagtgctgtctcccggtgtgagtcacaggctacgcgatcaggagctgatcttgttcgccgatttgctgtgccaatatcacaggcttgacgtaagcctgccattcgtgagcagaggaccactgaccgtcgaggaaacacctcgcgtgcaaggcgagacccagcctcagaggcttctactagccgaagactcagaagaagaggtcgattttttatctgagcgcagaatggtgaaaaaaagccgaactacatcaagcagcgtgatcgtgccagaatcagacgaggagggccactctccagtgctggggggtttgggcccacctttcgccttcaacctcaatagcgacactgacgtggaggagggacagcagccagctacggaagaggccagctctgcagcccgtagaggggcaaccgtggaggcaaaacaatccgaagccgaggtcgtgactgagatacagctagagaaggatcaacccctagtcaaagagagggataacgacacgaaagtaaagaggggagccggtaacggcgtggtccccgcaggagtcattctcgaaagatctcagccacctggagaagactctgataccgatgttgatgatgattcccggccacctggcagaccagcagaggtgcacttggagcgggctcagccattcggcttcattgatagcgacaccgatgccgaggaagagagaatcccggctactcctgtggtgatacccatgaaaaagcgcaaaattttccacggtgtgggcacccggggaccaggtgcaccgggactggcacatctccaagagagtcaagcaggctcagataccgacgtggaggaggggaaggctccccaggctgtgccgcttgagaagtcacaggcctcaatggtcatcaactccgatactgacgacgaggaagaggtgagtgccgctctgacactggcacacctcaaagaaagtcaacctgccatctggaacagggacgccgaagaagacatgcctcaaagagtcgtcctactccaaaggtcacaaactacaaccgagagagatagtgacactgacgtcgaagaggaagaactgccggtggaaaaccgggaggctgtgttgaaagatcacaccaagatacgcgctctcgtgagggctcactccgagaaggaccagccgcctttcggcgatagtgacgattccgtagaggcagataagtcttctcccggaatacatttagagcgatcgcaggctagtacaaccgtggacatcaacacccaggtcgagaaagaagtccccccaggcagcgccattatccatatcaagaaacaccaggtgagcgtagaggggacaaaccagacagacgtcaaggccgtcggagggccagccaaactgctcgtagtgagccttgaagaagcatggcctctgcatggggactgtgagacggatgcggaggagggaacctctttgaccgctagtgtggtagccgacgtgagaaaaagccagctgccggcagagggagacgccggtgctgaatgggccgctgctgtgctgaagcaggagcgggctcacgaagtgggtgctcagggaggaccgccagtagcccaggtcgaacaagatctgcccatttcaagggagaacttgacagatctagtcgtcgacacagataccttgggcgaatctacgcagccacagcgcgagggagcccaggtaccaacaggcagagagcgagaacagcacgtcgggggaacaaaagactccgaagacaactatggggacagtgaggacctcgaccttcaggcaactcagtgtttcctcgagaaccaaggactggaggccgttcagtcaatggaagacgagcccacccaagccttcatgcttaccccaccacaagagctagggcctagtcactgtagtttccagacaaccgggctcttgaattgtaaaatgcctcctgccgaaaaggccagtcgaatcagggctgccgaaaaggttagtcggggagatcaggaaagcccagatgcttgcctgcctccaaccgtgccagaggcgccagcccctcctcagaagccactgaattcccagtctcaaaaacacctggccccacctcctttactgagtccactgctgccttcaatcaagcctaccgtgagaaagacacgtcaggatggcagccaggaagcccctgaggcgccactgagcagcgaactggagcctttccatcccaagcctaaaatccgtactaggaagagttcaagaatgactcccttccccgctactagcgccgctccagagcctcatcccagcactagcacagcacaacccgtgacaccaaagcccactagccaggctacaaggagccggaccaatagaagttcggtgaaaacgccagagcctgtggttcctacagccccagagctgcagccttctacgtctaccgatcagcctgtcacatctgagcctacctcacaggtcacacgagggaggaaatcaagatcatcggtgaagacgccagagacagtggttccaacagccctggaattgcaaccctccacgtcaacggatagacccgtgacgagcgagcctaccagtcaggctactcgcggtcgtaaaaatagaagctccgtgaaaactcctgaacccgtggtcccaaccgcccctgaactccagccttccacttctaccgaccagcccgtaacctccgagcctacatatcaggccactaggggcaggaaaaataggagcagcgtcaagacccccgagccagtcgtccctactgcccctgaacttcggccttccacgagcaccgacagacccgtgacacctaaaccaacatctcggaccaccagatcccggaccaatatgagttctgtgaagacaccggaaacagttgttcctactgcaccagagttgcaaatctcaacttcaacagaccaacccgtcacacctaaaccaacttccagaaccactcgttcaagaacgaacatgtcaagtgtgaagaaccccgaaagtaccgtgcctatcgcgccagaactgccccctagtacgagtaccgaacaacctgtgactccagaacctacaagccgggctacccggggacggaagaataggtcctccggtaaaacaccagaaacactggtgccaaccgcgccaaagctggaaccgtcgacatccactgaccagcccgtgacacccgaaccgaccagccaggctacccgtggaagaacaaaccggagcagcgtcaaaaccccagagaccgtcgtgccgaccgctccagaattacagccctctacctccactgaccaacctgttacacccgagcctacaagccaggcgacgaggggccgaaccgacaggagtagcgtgaagacaccagagacagttgtgccaacagcacccgaactccaggcgagtgcgagcaccgaccagcccgtgaccagcgaacctacctctagaaccacacgtggtcggaaaaaccgctcctccgtcaagactcctgagactgtggtccctgccgcaccagagctgcagccttccacctcgactgaccagccagttacccctgagccgacctccagggccactaggggcaggactaatcgctcatccgttaagaccccggaaagtattgtaccaattgcccctgaacttcagccctccacatctcggaatcagctggtgacgcctgagcctacatccagggccacaagatgccgcacaaatcggtcctccgtgaaaactcctgaaccagtggtgccaactgctccagagcctcacccaaccaccagcaccgaccagccggtgaccccaaagctgacttctcgcgctactcgcagaaagaccaacagatcttctgtgaagacacctaaacccgtggagcccgcagccagcgaccttgagccctttacccccactgaccaaagcgtgacaccggaggcaattgcccagggcggacagtcaaagacactgcgctcttctaccgtccgcgctatgcctgtccccaccacacccgaatttcaatctcctgtcaccaccgatcagcccattagccccgaacccattacccagccgtcctgcattaaacgccaacgggcagccggtaaccctgggtctttggcggctccaatcgaccacaagccgtgtagcgccccactagagcctaaaagtcaagcctcccgtaaccagcgatggggtgccgtcagggccgctgaaagcttgacagctatcccagaacccgcttcccctcaactccttgaaacgccaatccatgccagccaaattcagaaggtggagccggcagggaggagcagatttactccggagctgcagccaaaagcttcccagagcagaaagaggtccctggctacaatggacagcccaccacaccaaaagcaaccccaaaggggagaagtatcacaaaagacagtgatcataaaggaagaagaggaagacaccgccgagaagccaggtaaagaggaggacgtggtgactcccaaaccgggtaagaggaaaagggatcaagcagaggaggaacccaatagaattccatcccgtagcctgcgacggacgaagttaaaccaggaatctaccgctcctaaagtgctgttcactggggtggtggatgcaaggggggagcgtgcagtactggctctgggcggatccctggctggatctgctgccgaagcgtctcaccttgtgacagacagaatcaggcggaccgtcaaatttttgtgtgccttgggcagaggcatccccatcctgtctttagattggctgcatcaaagccggaaggcaggattctttctgccgccagacgaatacgttgtaaccgacccggagcaggaaaagaactttggtttcagccttcaggatgccctatcacgggctcgtgaacggagactgctggaggggtatgagatctacgtgactcctggggtgcagcctcccccaccacaaatgggcgagataattagctgctgtggcggaacatacttaccctctatgcccagatcttataagccccagcgggtagtgatcacatgtccgcaggattttcctcactgcagcattcccctcagggttggactgccactgctctccccagaatttcttcttacaggggtgcttaagcaggaggccaaacccgaggccttcgtgttgtcacccctagagatgtccagcacata

SEQ ID NO: 269702 - DNA, 5477 bp, Artificial Sequence
  derived and/or modified sequence
atggaggacacccaggctatcgactgggatgtggaagaagaggaggaaactgagcagtctagcgagagcctgaggtgtaacgtagaacctgtgggcaggctgcacatcttttcgggggcacacgggcctgagaaagacttcccgctgcacctcggaaaaaacgtagtcggtcgaatgccagactgtagcgtggcgttgccctttccatcgatctctaagcagcacgccgagatcgaaatacttgcctgggataaggcccctatcctgagggactgcggtagcctcaatggaactcagatcctgaggcccccaaaagtgttgtccccaggagtgtctcatagacttcgggaccaagaactgatcctttttgcagatttgttgtgccagtaccatagactggatgtgtctttgccttttgtcagcagagggccactcacagtggaggagacgcccagagtgcagggggagacacagccccagcggctcctcttggccgaggacagcgaagaggaggtggatttcctttccgaacgtcgaatggtaaaaaagtctaggactaccagctcctccgtcatcgtacccgagagcgacgaggaggggcacagcccagtcctcggtggcctagggccaccctttgctttcaacctgaatagtgacacagatgttgaggaggggcagcaacctgctaccgaagaggcatccagtgcggctagaagaggtgcaacggtagaagcgaagcaaagcgaggccgaagtcgtcacggagatacagttggagaaggatcagccccttgtcaaggagcgggacaatgacaccaaagtgaagagaggcgcagggaacggcgtggtccctgcaggcgtaatacttgagcgcagtcaacctcctggcgaagattccgacacagatgtcgatgacgatagcaggccacccggacgccctgctgaagtgcacctagagagggcacagccattcgggttcattgacagcgacactgacgccgaggaggagcgcattccagcaacacctgtcgttattccaatgaagaagaggaagatcttccacggtgtgggcaccagggggcctggcgctccgggtctggcccatctgcaggaaagccaggcgggtagtgataccgatgtggaggaggggaaagcccctcaggccgtaccactggagaagtcccaggcaagcatggtaattaatagcgatactgacgacgaagaagaggtgagtgctgccctgaccctggcccacctgaaggaatctcagcccgcaatttggaacagagacgccgaggaagacatgccccagcgcgtggtcctgcttcagcggtcgcaaactactacagagcgcgactccgatactgacgtagaggaagaggagctccctgtagaaaatcgagaagcagtgctgaaagaccacaccaagatccgggcattggtcagggctcattccgagaaagaccagcccccatttggcgatagtgatgactccgtggaggccgataagtcttctccgggaatccatctggagcggtctcaagccagcactacagtcgatatcaatactcaggtggaaaaggaggttccccctggcagcgctattatccatatcaagaagcaccaggtgagcgtcgaggggacaaaccagacggacgtgaaggctgtaggtggccctgccaagctactcgtggtatccctggaagaggcctggccccttcacggggactgcgagacagatgcagaagagggtacatctctcaccgccagtgtagtggccgacgttcgaaagagccagttgccagcggaaggggatgctggagctgaatgggcggcagccgtgctgaaacaggagcgcgcacatgaagttggagcccagggcggtcccccagtggcacaggtggagcaggatctgcctatttctagggaaaatttaaccgacctcgtagtcgataccgacaccctgggggaaagcacgcagccacagcgggaaggtgcccaagtccccaccggaagagaaagggaacagcatgtgggcggaactaaggatagcgaggataactatggtgactccgaagacttagatctgcaggcaacccaatgttttctggaaaaccagggtcttgaggctgttcaatctatggaggatgaaccaactcaagcattcatgttgacacctccccaagaattgggtccttctcactgcagctttcaaaccaccggcctccttaattgcaaaatgcctccagctgagaaagcaagtcggataagggcggcagaaaaagtgtcgcggggtgatcaggagtcacccgacgcgtgtctaccaccaaccgtgcccgaggccccagccccaccacagaaaccattaaattcccagagtcagaaacatctcgcaccgccacccctcctatctccgcttctacctagcatcaagcccaccgtgcgcaagactcgacaggatggatcacaggaggcccctgaggcacctctctcaagcgagctcgagcccttccaccctaagcccaagattcggacccgaaagagctccagaatgacacccttcccagccacttcagcggctcccgagcctcatccctccacaagtactgcccaacctgtaacccctaaaccgactagccaagctactcggtcaagaacaaaccggtcttccgttaaaaccccagagccggttgtgcccacagctcccgaactccaaccctcaaccagtacagaccagccagtgacaagcgaaccgacctcgcaggtgacacgtggaaggaagtcgcggagtagcgttaagacccctgagactgtggtccctaccgctctggagctgcagcccagtacatccactgacagacccgtcacaagcgagccaacctcacaggccaccagaggccgtaagaacaggagctcggtgaagacgccagagcctgtggtgccaacagccccagagctccaaccctcgacatccaccgatcagccagtgactagtgaaccgacgtatcaggctaccagaggacgaaaaaaccgaagttctgtgaaaacaccagaaccagtagtcccaaccgctcccgaactgcgaccatctacaagtacagacagacccgttacgccaaagccaacctcccggacaacgagatcacgcaccaatatgtctagcgtgaagacacctgagacagtcgtgcccaccgcacctgaattacaaatctctacatccaccgatcagcccgtgacccccaaacctacctcccggactacacgttcccgcactaatatgagctcggtaaagaatcctgagtcaaccgtgccaattgcacctgaattacctccgtctacatcgacagagcagcctgtgactcccgaaccaacttctcgcgcaacaaggggccgaaagaatcgttcttccggaaagaccccggagactctggtacctactgcacccaagctagagccaagcactagcacagatcagccagtcactcctgaacctactagccaagccacccgtggcagaaccaacagatcttcggtgaagactcctgagaccgttgttcccacggctcctgaactgcagccctcaacaagtacggatcagcccgttacaccagagcctacttcacaggccacaagaggtcgaacagataggagttctgtaaagaccccagaaacggtcgtgcccaccgcacccgaactgcaggcatccgctagcacggaccagccggtaacaagtgagcccacgtcacggactacgagggggagaaagaataggtcaagtgtgaagacccccgagactgtcgtgcccgctgcacccgaactgcagcctagcactagcaccgaccaacctgtgactcctgaacctacgtcaagggctactcgtggacgcaccaataggtccagtgtgaagaccccagagtcaatcgtccctattgctccagaactccagccctctacctcaaggaaccagcttgtgacgcctgaacccacaagccgcgctactcggtgccggaccaaccggtctagcgtgaagactcctgagccggttgtgcccaccgcccctgagcctcacccaaccacaagcacagaccagcctgtcacacccaagctgacatccagagctacacggaggaagacgaaccgcagctctgtgaaaacacctaaaccagtggagccagcggcttcagatttggaaccttttacaccaactgaccagtctgttacgccagaagccatcgcccagggaggacagtctaagacattgcgtagtagcactgtccgcgcaatgcccgtgcccactacccccgaattccagtctcccgtgaccacagaccagccaatttctccagagcccatcacccaaccttcctgtataaagaggcagcgagctgccggtaatccgggatccctggccgcaccgatcgaccataaaccttgtagcgccccattggagcccaaaagtcaggctagtcgcaatcagcgatggggggctgtgcgtgcagcagagtctctcactgccattccagaacctgcctcacctcagctcctggaaaccccaattcatgccagccaaatccagaaggtggaacctgccggacggtctagatttacccctgagctgcagccaaaagcaagtcaaagccggaagcgtagcctcgctactatggactcaccgcctcaccagaagcaaccgcagcgcggagaagtttcccaaaaaacagtcattattaaggaagaggaggaagacacagccgaaaagccagggaaggaggaagatgttgtgacgcccaagccaggcaaacgcaagagggaccaggcagaggaggagcccaatcggatcccttctcgcagcttaagaaggaccaaactaaatcaggagtcgaccgctccaaaagttctttttactggagtggtcgacgcccgaggggagcgggcagtgctcgctctgggagggagccttgccggttccgctgcggaagcgtcccaccttgtcacagaccgaattcgcagaaccgtgaagttcctgtgcgcgctcggcagaggaattcctatactgtcactcgactggctccaccagtcacgcaaagcgggttttttcctcccaccagatgagtacgttgtgaccgatccagagcaggagaaaaattttggtttcagtctacaagatgcattgagccgcgctcgagagcggagactgctggagggatatgaaatttacgtcactcccggtgtccagccacctcctccgcaaatgggggaaatcatcagttgttgtgggggtacctatctgcctagcatgcccaggtcctacaagccccagagagtagtgataacctgtccccaggatttcccccattgttcaatacccctgcgcgtggggctcccattgttatcacctgagtttttgttaaccggggtgcttaaacaggaagctaagcctgaagccttcgtactctctccactcgaaatgtcttccaccta

SEQ ID NO: 269703 - DNA, 5478 bp, Artificial Sequence
  derived and/or modified sequence
atggaggacacccaggccatcgactgggacgtggaggaggaggaggagaccgagcagagcagcgagagcctgagatgcaacgtggagcccgtgggcagactgcacatcttcagcggcgcccacggccccgagaaggacttccccctgcacctgggcaagaacgtggtgggcagaatgcccgactgcagcgtggccctgcccttccccagcatcagcaagcagcacgccgagatcgagatcctggcctgggacaaggcccccatcctgagagactgcggcagcctgaacggcacccagatcctgagaccccccaaggtgctgagccccggcgtgagccacagactgagagaccaggagctgatcctgttcgccgacctgctgtgccagtaccacagactggacgtgagcctgcccttcgtgagcagaggccccctgaccgtggaggagacccccagagtgcagggcgagacccagccccagagactgctgctggccgaggacagcgaggaggaggtggacttcctgagcgagagaagaatggtgaagaagagcagaaccaccagcagcagcgtgatcgtgcccgagagcgacgaggagggccacagccccgtgctgggcggcctgggcccccccttcgccttcaacctgaacagcgacaccgacgtggaggagggccagcagcccgccaccgaggaggccagcagcgccgccagaagaggcgccaccgtggaggccaagcagagcgaggccgaggtggtgaccgagatccagctggagaaggaccagcccctggtgaaggagagagacaacgacaccaaggtgaagagaggcgccggcaacggcgtggtgcccgccggcgtgatcctggagagaagccagccccccggcgaggacagcgacaccgacgtggacgacgacagcagaccccccggcagacccgccgaggtgcacctggagagagcccagcccttcggcttcatcgacagcgacaccgacgccgaggaggagagaatccccgccacccccgtggtgatccccatgaagaagagaaagatcttccacggcgtgggcaccagaggccccggcgcccccggcctggcccacctgcaggagagccaggccggcagcgacaccgacgtggaggagggcaaggccccccaggccgtgcccctggagaagagccaggccagcatggtgatcaacagcgacaccgacgacgaggaggaggtgagcgccgccctgaccctggcccacctgaaggagagccagcccgccatctggaacagagacgccgaggaggacatgccccagagagtggtgctgctgcagagaagccagaccaccaccgagagagacagcgacaccgacgtggaggaggaggagctgcccgtggagaacagagaggccgtgctgaaggaccacaccaagatcagagccctggtgagagcccacagcgagaaggaccagccccccttcggcgacagcgacgacagcgtggaggccgacaagagcagccccggcatccacctggagagaagccaggccagcaccaccgtggacatcaacacccaggtggagaaggaggtgccccccggcagcgccatcatccacatcaagaagcaccaggtgagcgtggagggcaccaaccagaccgacgtgaaggccgtgggcggccccgccaagctgctggtggtgagcctggaggaggcctggcccctgcacggcgactgcgagaccgacgccgaggagggcaccagcctgaccgccagcgtggtggccgacgtgagaaagagccagctgcccgccgagggcgacgccggcgccgagtgggccgccgccgtgctgaagcaggagagagcccacgaggtgggcgcccagggcggcccccccgtggcccaggtggagcaggacctgcccatcagcagagagaacctgaccgacctggtggtggacaccgacaccctgggcgagagcacccagccccagagagagggcgcccaggtgcccaccggcagagagagagagcagcacgtgggcggcaccaaggacagcgaggacaactacggcgacagcgaggacctggacctgcaggccacccagtgcttcctggagaaccagggcctggaggccgtgcagagcatggaggacgagcccacccaggccttcatgctgacccccccccaggagctgggccccagccactgcagcttccagaccaccggcctgctgaactgcaagatgccccccgccgagaaggccagcagaatcagagccgccgagaaggtgagcagaggcgaccaggagagccccgacgcctgcctgccccccaccgtgcccgaggcccccgcccccccccagaagcccctgaacagccagagccagaagcacctggcccccccccccctgctgagccccctgctgcccagcatcaagcccaccgtgagaaagaccagacaggacggcagccaggaggcccccgaggcccccctgagcagcgagctggagcccttccaccccaagcccaagatcagaaccagaaagagcagcagaatgacccccttccccgccaccagcgccgcccccgagccccaccccagcaccagcaccgcccagcccgtgacccccaagcccaccagccaggccaccagaagcagaaccaacagaagcagcgtgaagacccccgagcccgtggtgcccaccgcccccgagctgcagcccagcaccagcaccgaccagcccgtgaccagcgagcccaccagccaggtgaccagaggcagaaagagcagaagcagcgtgaagacccccgagaccgtggtgcccaccgccctggagctgcagcccagcaccagcaccgacagacccgtgaccagcgagcccaccagccaggccaccagaggcagaaagaacagaagcagcgtgaagacccccgagcccgtggtgcccaccgcccccgagctgcagcccagcaccagcaccgaccagcccgtgaccagcgagcccacctaccaggccaccagaggcagaaagaacagaagcagcgtgaagacccccgagcccgtggtgcccaccgcccccgagctgagacccagcaccagcaccgacagacccgtgacccccaagcccaccagcagaaccaccagaagcagaaccaacatgagcagcgtgaagacccccgagaccgtggtgcccaccgcccccgagctgcagatcagcaccagcaccgaccagcccgtgacccccaagcccaccagcagaaccaccagaagcagaaccaacatgagcagcgtgaagaaccccgagagcaccgtgcccatcgcccccgagctgccccccagcaccagcaccgagcagcccgtgacccccgagcccaccagcagagccaccagaggcagaaagaacagaagcagcggcaagacccccgagaccctggtgcccaccgcccccaagctggagcccagcaccagcaccgaccagcccgtgacccccgagcccaccagccaggccaccagaggcagaaccaacagaagcagcgtgaagacccccgagaccgtggtgcccaccgcccccgagctgcagcccagcaccagcaccgaccagcccgtgacccccgagcccaccagccaggccaccagaggcagaaccgacagaagcagcgtgaagacccccgagaccgtggtgcccaccgcccccgagctgcaggccagcgccagcaccgaccagcccgtgaccagcgagcccaccagcagaaccaccagaggcagaaagaacagaagcagcgtgaagacccccgagaccgtggtgcccgccgcccccgagctgcagcccagcaccagcaccgaccagcccgtgacccccgagcccaccagcagagccaccagaggcagaaccaacagaagcagcgtgaagacccccgagagcatcgtgcccatcgcccccgagctgcagcccagcaccagcagaaaccagctggtgacccccgagcccaccagcagagccaccagatgcagaaccaacagaagcagcgtgaagacccccgagcccgtggtgcccaccgcccccgagccccaccccaccaccagcaccgaccagcccgtgacccccaagctgaccagcagagccaccagaagaaagaccaacagaagcagcgtgaagacccccaagcccgtggagcccgccgccagcgacctggagcccttcacccccaccgaccagagcgtgacccccgaggccatcgcccagggcggccagagcaagaccctgagaagcagcaccgtgagagccatgcccgtgcccaccacccccgagttccagagccccgtgaccaccgaccagcccatcagccccgagcccatcacccagcccagctgcatcaagagacagagagccgccggcaaccccggcagcctggccgcccccatcgaccacaagccctgcagcgcccccctggagcccaagagccaggccagcagaaaccagagatggggcgccgtgagagccgccgagagcctgaccgccatccccgagcccgccagcccccagctgctggagacccccatccacgccagccagatccagaaggtggagcccgccggcagaagcagattcacccccgagctgcagcccaaggccagccagagcagaaagagaagcctggccaccatggacagccccccccaccagaagcagccccagagaggcgaggtgagccagaagaccgtgatcatcaaggaggaggaggaggacaccgccgagaagcccggcaaggaggaggacgtggtgacccccaagcccggcaagagaaagagagaccaggccgaggaggagcccaacagaatccccagcagaagcctgagaagaaccaagctgaaccaggagagcaccgcccccaaggtgctgttcaccggcgtggtggacgccagaggcgagagagccgtgctggccctgggcggcagcctggccggcagcgccgccgaggccagccacctggtgaccgacagaatcagaagaaccgtgaagttcctgtgcgccctgggcagaggcatccccatcctgagcctggactggctgcaccagagcagaaaggccggcttcttcctgccccccgacgagtacgtggtgaccgaccccgagcaggagaagaacttcggcttcagcctgcaggacgccctgagcagagccagagagagaagactgctggagggctacgagatctacgtgacccccggcgtgcagcccccccccccccagatgggcgagatcatcagctgctgcggcggcacctacctgcccagcatgcccagaagctacaagccccagagagtggtgatcacctgcccccaggacttcccccactgcagcatccccctgagagtgggcctgcccctgctgagccccgagttcctgctgaccggcgtgctgaagcaggaggccaagcccgaggccttcgtgctgagccccctggagatgagcagcacctag

SEQ ID NO: 269704 - DNA, 4968 bp, Artificial Sequence
  derived and/or modified sequence
atgtaccacagactggacgtgagcctgcccttcgtgagcagaggccccctgaccgtggaggagacccccagagtgcagggcgagacccagccccagagactgctgctggccgaggacagcgaggaggaggtggacttcctgagcgagagaagaatggtgaagaagagcagaaccaccagcagcagcgtgatcgtgcccgagagcgacgaggagggccacagccccgtgctgggcggcctgggcccccccttcgccttcaacctgaacagcgacaccgacgtggaggagggccagcagcccgccaccgaggaggccagcagcgccgccagaagaggcgccaccgtggaggccaagcagagcgaggccgaggtggtgaccgagatccagctggagaaggaccagcccctggtgaaggagagagacaacgacaccaaggtgaagagaggcgccggcaacggcgtggtgcccgccggcgtgatcctggagagaagccagccccccggcgaggacagcgacaccgacgtggacgacgacagcagaccccccggcagacccgccgaggtgcacctggagagagcccagcccttcggcttcatcgacagcgacaccgacgccgaggaggagagaatccccgccacccccgtggtgatccccatgaagaagagaaagatcttccacggcgtgggcaccagaggccccggcgcccccggcctggcccacctgcaggagagccaggccggcagcgacaccgacgtggaggagggcaaggccccccaggccgtgcccctggagaagagccaggccagcatggtgatcaacagcgacaccgacgacgaggaggaggtgagcgccgccctgaccctggcccacctgaaggagagccagcccgccatctggaacagagacgccgaggaggacatgccccagagagtggtgctgctgcagagaagccagaccaccaccgagagagacagcgacaccgacgtggaggaggaggagctgcccgtggagaacagagaggccgtgctgaaggaccacaccaagatcagagccctggtgagagcccacagcgagaaggaccagccccccttcggcgacagcgacgacagcgtggaggccgacaagagcagccccggcatccacctggagagaagccaggccagcaccaccgtggacatcaacacccaggtggagaaggaggtgccccccggcagcgccatcatccacatcaagaagcaccaggtgagcgtggagggcaccaaccagaccgacgtgaaggccgtgggcggccccgccaagctgctggtggtgagcctggaggaggcctggcccctgcacggcgactgcgagaccgacgccgaggagggcaccagcctgaccgccagcgtggtggccgacgtgagaaagagccagctgcccgccgagggcgacgccggcgccgagtgggccgccgccgtgctgaagcaggagagagcccacgaggtgggcgcccagggcggcccccccgtggcccaggtggagcaggacctgcccatcagcagagagaacctgaccgacctggtggtggacaccgacaccctgggcgagagcacccagccccagagagagggcgcccaggtgcccaccggcagagagagagagcagcacgtgggcggcaccaaggacagcgaggacaactacggcgacagcgaggacctggacctgcaggccacccagtgcttcctggagaaccagggcctggaggtgcagagcatggaggacgagcccacccaggccttcatgctgacccccccccaggagctgggccccagccactgcagcttccagaccaccggcctgctgaactgcaagatgccccccgccgagaaggccagcagaatcagagccgccgagaaggtgagcagaggcgaccaggagagccccgacgcctgcctgccccccaccgtgcccgaggcccccgcccccccccagaagcccctgaacagccagagccagaagcacctggcccccccccccctgctgagccccctgctgcccagcatcaagcccaccgtgagaaagaccagacaggacggcagccaggaggcccccgaggcccccctgagcagcgagctggagcccttccaccccaagcccaagatcagaaccagaaagagcagcagaatgacccccttccccgccaccagcgccgcccccgagccccaccccagcaccagcaccgcccagcccgtgacccccaagcccaccagccaggccaccagaagcagaaccaacagaagcagcgtgaagacccccgagcccgtggtgcccaccgcccccgagctgcagcccagcaccagcaccgaccagcccgtgaccagcgagcccaccagccaggtgaccagaggcagaaagagcagaagcagcgtgaagacccccgagaccgtggtgcccaccgccctggagctgcagcccagcaccagcaccgacagacccgtgaccagcgagcccaccagccaggccaccagaggcagaaagaacagaagcagcgtgaagacccccgagcccgtggtgcccaccgcccccgagctgcagcccagcaccagcaccgaccagcccgtgaccagcgagcccacctaccaggccaccagaggcagaaagaacagaagcagcgtgaagacccccgagcccgtggtgcccaccgcccccgagctgagacccagcaccagcaccgacagacccgtgacccccaagcccaccagcagaaccaccagaagcagaaccaacatgagcagcgtgaagaaccccgagagcaccgtgcccatcgcccccgagctgccccccagcaccagcaccgagcagcccgtgacccccgagcccaccagcagagccaccagaggcagaaagaacagaagcagcggcaagacccccgagaccctggtgcccaccgcccccaagctggagcccagcaccagcaccgaccagcccgtgacccccgagcccaccagccaggccaccagaggcagaaccaacagaagcagcgtgaagacccccgagaccgtggtgcccaccgcccccgagctgcagcccagcaccagcaccgaccagcccgtgacccccgagcccaccagccaggccaccagaggcagaaccgacagaagcagcgtgaagacccccgagaccgtggtgcccaccgcccccgagctgcaggccagcgccagcaccgaccagcccgtgaccagcgagcccaccagcagaaccaccagaggcagaaagaacagaagcagcgtgaagacccccgagaccgtggtgcccgccgcccccgagctgcagcccagcaccagcaccgaccagcccgtgacccccgagcccaccagcagagccaccagaggcagaaccaacagaagcagcgtgaagacccccgagagcatcgtgcccatcgcccccgagctgcagcccagcaccagcagaaaccagctggtgacccccgagcccaccagcagagccaccagatgcagaaccaacagaagcagcgtgaagacccccgagcccgtggtgcccaccgcccccgagccccaccccaccaccagcaccgaccagcccgtgacccccaagctgaccagcagagccaccagaagaaagaccaacagaagcagcgtgaagacccccaagcccgtggagcccgccgccagcgacctggagcccttcacccccaccgaccagagcgtgacccccgaggccatcgcccagggcggccagagcaagaccctgagaagcagcaccgtgagagccatgcccgtgcccaccacccccgagttccagagccccgtgaccaccgaccagcccatcagccccgagcccatcacccagcccagctgcatcaagagacagagagccgccggcaaccccggcagcctggccgcccccatcgaccacaagccctgcagcgcccccctggagcccaagagccaggccagcagaaaccagagatggggcgccgtgagagccgccgagagcctgaccgccatccccgagcccgccagcccccagctgctggagacccccatccacgccagccagatccagaaggtggagcccgccggcagaagcagattcacccccgagctgcagcccaaggccagccagagcagaaagagaagcctggccaccatggacagccccccccaccagaagcagccccagagaggcgaggtgagccagaagaccgtgatcatcaaggaggaggaggaggacaccgccgagaagcccggcaaggaggaggacgtggtgacccccaagcccggcaagagaaagagagaccaggccgaggaggagcccaacagaatccccagcagaagcctgagaagaaccaagctgaaccaggagagcaccgcccccaaggtgctgttcaccggcgtggtggacgccagaggcgagagagccgtgctggccctgggcggcagcctggccggcagcgccgccgaggccagccacctggtgaccgacagaatcagaagaaccgtgaagttcctgtgcgccctgggcagaggcatccccatcctgagcctggactggctgcaccagagcagaaaggccggcttcttcctgccccccgacgagtacgtggtgaccgaccccgagcaggagaagaacttcggcttcagcctgcaggacgccctgagcagagccagagagagaagactgctggagggctacgagatctacgtgacccccggcgtgcagcccccccccccccagatgggcgagatcatcagctgctgcggcggcacctacctgcccagcatgcccagaagctacaagccccagagagtggtgatcacctgcccccaggacttcccccactgcagcatccccctgagagtgggcctgcccctgctgagccccgagttcctgctgaccggcgtgctgaagcaggaggccaagcccgaggccttcgtgctgagccccctggagatgagcagcacctag

SEQ ID NO: 269705 - DNA, 5097 bp, Artificial Sequence
  derived and/or modified sequence
atggtcggtgagcttagataccgggaattcagagtacctcttggtccaggactccacgcttaccctgacgagctcatccgccagcgggtgggacatgatgggcacccggagtaccagataagatggttaatattgaggaggggagacgaaggggacggagggtcaggtcaggtggactgcaaagccgagcacattctgctgtggatgtctaaagatgagatctacgccaactgccacaagatgttgggcgaggatggccaggttattggcccctctcaagaatccgccggtgaagtaggagccctggacaaatccgtgctggaagaaatggaaactgacgtgaagagtttaattcagagggcgcttagacaattggaagaatgcgttgggacaattccccccgcccctctcctgcataccgtgcatgtcttgagtgcttatgcatcaatcgagcctctgacgggggtgttcaaggatcccagagtgcttgacttgctgatgcacatgctgtccagccctgactatcagattagatggtcagcgggcaggatgatccaagcactgtcaagccacgacgccggcaccaggactcagatcctgctgtctcttagccagcaggaggcaattgaaaaacacctggactttgactcccggtgtgcactgttagccctgtttgctcaggcgaccctgtcagagcatccgatgagctttgagggcatccagttaccacaagtacctgggagggtgctgttctcactggtgaagaggtatctgcacgttacatcactactggatcagctaaacgattcggcagctgaacctggcgcccagaatacatcagctcccgaggagctcagtggggagcgggggcagctcgaactcgagttttctatggccatgggaacgctgatttctgagctggtgcaggcaatgagatgggaccaggccagcgacaggccccgttccagcgcccggtcgcctgggagcattttccaaccgcagcttgcagacgtgtcacccggtttaccagctgcccaagcacagcccagctttagacgtagccggcgcttccgtccaaggtccgagttcgccagcggtaacacttatgctctgtatgtgagggacacccttcagcctggcatgcgggtaaggatgctcgatgattacgaagagataagcgccggcgacgagggagagttcagacagtccaacaacggcgtaccacctgtgcaggtgttctgggagtctaccgggcgcacttattgggtacactggcatatgctggagattttgggattcgaggaggacattgaggatatggtggaagcggacgaatatcagggagcagtagcgtccagagtactaggtcgtgctctcccagcatggcgctggcggcctatgacggagctgtacgccgtgccatatgtgcttcccgaggatgaagataccgaagaatgcgaacacctcacattagccgaatggtgggagttgctgttcttcataaagaagctggacgggcccgaccatcaggaagttttgcagatcctacaagaaaatctggacggtgagattctcgatgatgagatactcgcagaactggccgtgccaattgagcttgcacaagacctgctcctgacactgccacagcggctaaacgattccgccctgagggatctcataaactgccacgtgtacaaaaagtacgggcccgaggccctggccggcaaccaggcctatcctagtctactggaggctcaggaagatgtcttgcttctggacgctcaagcccaggcgaaagatagcgaagatgccgccaaggttgaggccaaggagccaccgtcccaaagtccaaacacaccccttcagcggctggttgagggatatggtcccgccggtaaaattctgctcgatctggagcaagccctgtcttcggagggaacgcaggagaataaggtaaagcccctgcttcttcaacttcagaggcaacctcagcctttcctcgcccttatgcagagcctagacacaccagagaccaaccggaccctccacctgactgtactgagaatcctcaagcagctggtggactttccagaagcccttcttttgccatggcatgaggcagttgatgcttgcatggcatgccttcgatcccctaatactgacagagaagtcctgcaggaattaatcttctttctccatcgactcacatcggtgagtcgggactatgcagtcgtgctcaaccagcttggagctcgggatgcaataagcaaagctctcgagaaacatctgggaaagcttgagctggctcaagaattaagggacatggtgtttaagtgcgagaagcatgcccatttatatcggaaattgatcactaatatactcggagggtgcatccagatggtgttaggccagattgaagatcaccgacggacgcatcagccaattaatattccgttttttgatgtgtttcttcgctacctctgccaaggttcttccgtggaagtgaaggaagacaagtgctgggaaaaagttgaagtttcgagtaaccctcaccgggcctcgaaactgaccgatcataatcctaaaacctactgggagtctaatgggagtgccggctcgcattacattactcttcacatgcgccgcggcatcttaatacgccagctaaccctgttggtagctagcgaagactccagctatatgcccgcaagggtagtggtatgcggcggggactcaactagcagcctccacaccgaattgaactctgtgaacgtcatgccaagcgcctcacgggtaatcttgctggagaacctgactcgcttttggcctattatccagatacggatcaaacggtgtcagcaagggggtattgacacccgcatccgagggcttgagatcttgggtcctaagccaaccttctggccggtttttcgagagcagctgtgccgtcatactcgccttttttatatggtcagagctcaggcctggtcacaggatatggccgaggacagacggtcactcttacatttatcttcccgtctgaatggagctttgaggcaagaacagaactttgctgacagattcctgccagacgatgaggcggctcaagccttaggaaaaacatgttgggaggctttggtcagcccggttgtccaaaatatcacgagtccagacgaggacggcattagccctctagggtggttgctcgatcagtatttggagtgtcaggaggcagtcttcaacccccaaagcagagggcctgccttctttagcagggttagacggctaactcaccttttagttcatgtggagccttgtgaggctcctccccctgttgtggccaccccacgacccaaggggcgtaaccgctcccacgattggagtagcctcgcaacccgcggcctccccagcagcattatgcgaaacttgacgcggtgctggagggccgtggtcgagaaacaagttaacaacttcctgacaagctcctggcgggacgatgacttcgtccctcggtactgcgagcactttaatatcctccagaacagttcatcagaactcttcgggcctcgggcggccttcctgctcgccctgcagaatggctgcgctggtgccctcctgaagcttccatttttgaaggctgcccatgtttccgagcaatttgcccgccatatcgatcagcagattcaggggtccagaattggcggcgcgcaggagatggaaagactcgcacagctccagcagtgtctgcaggcggtgctgatattctcagggttggaaattgcaacaacctttgaacactactaccaacattacatggctgataggctactgggagtggtatcctcctggcttgagggggcggtcttagaacagatcggaccctgctttccgaatcgtctgccacagcagatgctccagtccctgtccactagtaaggaactccagaggcagtttcacgtttaccagttgcagcaactggaccaagagctgctcaagctagaagatacggagaaaaaaattcaagtgggcctcggcgcctctggaaaggaacataagtcagaaaaggaggaagaggccggagccgcagcagtggtagatgtggcggagggcgaggaggaggaggaggaaaacgaggacttgtactatgagggggctatgccagaggtcagcgtcctcgtgttgtctcgtcatagctggccagtcgcctctatctgtcataccctgaaccctcggacgtgtctgccctcctaccttagggggacattgaataggtactctaatttttacaataagtctcagagccaccccgctctggagagaggctctcagagacgtctgcagtggacctggttgggctgggctgagctgcaatttggcaatcagacacttcacgttagcacagtccagatgtggctgctcctgtatctaaacgatctgaaggcagtctccgtggaatccctcttagcctttagcggactgtctgccgatatgctgaatcaagcaattggacccttgacatcctctagaggtcctttagatctgcacgaacagaaggatatccctgggggagtgctaaaaatccgagacgggagcaaagaaccaaggtcaagatgggacattgttcggctcatccctccccagacgtatctgcaggccgaaggcgaagatggacaaaacttggaaaagagacgcaatttgctcaactgcctaattgtacgaattttgaaggctcatggtgatgaagggctccacatcgatcagctggtttgcctggttctggaggcttggcagaaaggcccttgtccccctagggggttggtgagtagcctcggtaaaggttctgcttgcagcagcactgatgtcctcagctgtattcttcatctcctcggcaagggcaccctgagaagacacgatgacagaccccaagtcctgtcatacgctgtgcccgtgaccgttatggagcctcatactgagtccctgaatccagggtccagcggacctaatcccccgctgacctttcatactctccaaattaggtctcgcggagtgccgtatgcctcgtgcacagccacgcaatcatttagtaccttcagatag

SEQ ID NO: 269706 - DNA, 5097 bp, Artificial Sequence
  derived and/or modified sequence
atggtgggggagctgcgctaccgggagttccgggtgcccctgggccctggcctgcacgcctacccagatgagctgatccggcagagggtgggccatgatggccaccctgagtaccagatccgctggctgatcctgcggagaggagatgaaggagatggcggcagcggccaggtggactgcaaggccgagcacatcctgctgtggatgagcaaggatgagatctatgccaactgccacaagatgctgggggaggatggccaggtgattggccccagccaggagagcgctggggaggtgggcgccctggacaagtctgtgctggaggagatggagacagatgtgaagagcctcatccagagggccctgcggcagctggaggagtgtgtgggcaccatccccccagcccccctgctgcacacagtgcacgtgctgagcgcctatgccagcattgagcccctgactggagtcttcaaggacccccgggtgctggacctgctgatgcacatgctgagcagcccagactaccagatccgctggagcgctggccgcatgatccaggccctgagcagccatgatgctggcaccaggacccagatcctgctgagcctgagccagcaggaggccatcgagaagcacctggactttgacagccgctgtgccctgctggccctgtttgcccaggccaccctgtctgagcaccccatgagctttgagggcatccagctgccccaggtgcccggccgggtgctcttcagcctggtgaagcgctacctgcacgtgaccagcctgctggaccagctgaatgacagcgctgctgagcccggggcccagaacaccagcgcccctgaggagctgagcggggagcggggccagctggagctggagttctccatggccatgggcaccctcatcagcgagctggtgcaggccatgcgctgggaccaggccagtgaccggcccaggagcagcgcccggagccctggcagcatcttccagccccagctggctgatgtgtccccaggcctgcctgctgcccaggcccagcccagcttccgccgcagccgccgcttccggcccaggagtgaatttgccagcggcaacacctacgccctgtatgtgcgggacaccctgcagcccggcatgagggtgaggatgctggatgattatgaggagatctctgctggagatgaaggagagttccggcagagcaacaatggagtgccccctgtgcaggtgttctgggagagcactggaagaacctactgggtgcactggcacatgctggagatcctgggctttgaagaagatattgaggacatggtggaggctgatgagtaccagggcgctgtggccagccgggtgctgggccgggccctgcctgcctggcgctggaggcccatgacagagctgtatgctgtgccctacgtgctgcctgaagatgaggacacagaagaatgtgagcacctgaccctggccgagtggtgggagctgctcttcttcatcaagaagctggatggccctgaccaccaggaggtgctgcagatcctgcaggagaacctggatggagagatcctggatgatgagatcctggccgagctggccgtgcccatcgagctggcccaggacctgctgctgaccctgccccagaggctgaatgacagcgccctgcgggacctgatcaactgccacgtgtacaagaagtatggccctgaggccctggccggcaaccaggcctaccccagcctgctggaggcccaggaggatgtgctgctgctggatgcccaggcccaggccaaggacagtgaagatgctgccaaggtggaggccaaggagccccccagccagagccccaacacccccctgcagaggctggtggagggctacggccctgctgggaagatcctgctggacctggagcaggccctgagcagcgagggcacccaggagaacaaggtgaagcccctgctgctgcagctgcagaggcagccccagcccttcctggccctgatgcagagcctggacaccccagagaccaacagaaccctgcacctgactgtgctgcgcatcctgaagcagctggtggacttccctgaggccctgctgctgccctggcatgaagctgtggatgcctgcatggcctgcctgcggagccccaacacagaccgggaggtgctgcaggagctgatcttcttcctgcaccggctgacctctgtgtcccgggactatgctgtggtgctgaaccagctgggcgccagagatgccatcagcaaggccctggagaagcacctgggcaagctggagctggcccaggagctgcgggacatggtgttcaagtgtgagaagcacgcccacctgtacaggaagctgatcaccaacatcctgggcggctgcatccagatggtgctgggccagatcgaggaccacaggaggacccaccagcccatcaacatccccttctttgatgtgttcctgcgctacctgtgccagggcagctctgtggaggtgaaggaggacaagtgctgggagaaggtggaggtgagcagcaacccccaccgggccagcaagctgacagaccacaaccccaagacctactgggagagcaatggcagcgctggcagccactacatcaccctgcacatgagaagaggcatcctgatccggcagctgaccctgctggtggccagcgaggacagcagctacatgcctgcccgggtggtggtgtgtggcggggacagcaccagcagcctgcacacagagctgaacagcgtgaatgtgatgcccagcgccagcagggtcatcctgctggagaacctgacccgcttctggcccatcatccagatccgcatcaagcgctgccagcagggcggcatcgacacccgcatccggggcctggagatcctgggccccaagcccaccttctggcctgtgttccgggagcagctgtgccgccacaccaggctcttctacatggtgcgggcccaggcctggagccaggacatggccgaggaccggcgcagcctgctgcacctgagcagccggctgaatggagccctgcggcaggagcagaactttgctgaccgcttcctgcctgatgatgaggccgcccaggccctgggcaagacctgctgggaggccctggtgtcccctgtggtgcagaacatcaccagcccagatgaagatggcatcagccccctgggctggctgctggaccagtacctggagtgccaggaggccgtgttcaacccccagagccggggccctgccttcttcagccgggtgcggcggctgacccacctgctggtgcacgtggagccctgtgaggcccctcctcctgtggtggccaccccccggcccaagggcaggaacagaagccatgactggagcagcctggccacccggggcctgcccagcagcatcatgaggaacctgacccgctgctggagggctgtggtggagaagcaggtgaacaacttcctgaccagctcctggagagatgatgactttgtgccccgctactgtgagcacttcaacatcctgcagaacagcagcagcgagctgtttggccccagggctgccttcctgctggccctgcagaatggctgtgccggggccctgctgaagctgcccttcctgaaggccgcccacgtgtctgagcagtttgcccggcacatcgaccagcagatccagggcagcagaattggaggagcccaggagatggagcggctggcccagctgcagcagtgcctgcaggccgtgctgatcttcagcggcctggagatcgccaccacctttgagcactactaccagcactacatggctgaccggctgctgggcgtggtgtcctcctggctggagggcgctgtgctggagcagatcggcccctgcttccccaaccggctgccccagcagatgctgcagagcctgagcaccagcaaggagctgcagaggcagttccacgtgtaccagctgcagcagctggaccaggagctgctgaagctggaggacacagagaagaagatccaggtgggcctgggcgccagcggcaaggagcacaagtctgagaaggaggaggaggccggggctgctgctgtggtggatgtggccgagggggaggaggaggaggaggagaatgaagacctgtactatgagggcgccatgcctgaggtgtctgtgctggtgctgagccgccacagctggcctgtggccagcatctgccacaccctgaaccccaggacctgcctgcccagctacctgcggggcaccctgaaccgctacagcaacttctacaacaagagccagagccacccagccctggagcggggcagccagaggcggctgcagtggacctggctgggctgggccgagctgcagtttggaaaccagaccctgcacgtgtccacagtgcagatgtggctgctgctgtacctgaatgacctgaaggctgtgtctgtggagagcctgctggccttcagcggcctgtctgctgacatgctgaaccaggccatcggccccctgaccagcagccggggccccctggacctgcacgagcagaaggacatccctggaggagtgctgaagatcagagatggcagcaaggagcccaggagccgctgggacatcgtgcggctcatccccccccagacctacctgcaggccgagggagaagatggccagaacctggagaagagaagaaacctgctgaactgcctgattgtgcgcatcctgaaggcccatggagatgagggcctgcacatcgaccagctggtgtgcctggtgctggaggcctggcagaagggcccctgccccccccggggcctggtgagcagcctgggcaagggcagcgcctgcagcagcacagatgtgctgagctgcatcctgcacctgctgggcaagggcaccctgcggagacatgatgaccggccccaggtgctgtcctatgctgtgcctgtgacagtgatggagccccacacagagagcctgaaccctggcagcagcggccccaacccccccctgaccttccacaccctgcagatccgcagccggggcgtgccctatgccagctgcacagccacccagagcttcagcaccttcagatag

SEQ ID NO: 269707 - DNA, 5097 bp, Artificial Sequence
  derived and/or modified sequence
atggtgggcgagctgcggtaccgggagttccgggtgcccctgggcccaggactgcacgcgtatccagacgagctgatacgccagcgagtgggtcacgacggtcacccggagtatcaaatccgttggctgattttacggagaggtgatgagggcgacggtggatccggacaagtggattgcaaggcggaacacatcctactttggatgtccaaggatgagatctatgccaattgccacaagatgctaggcgaagacggccaggtgataggtccctctcaggagtcagctggagaggtcggtgctctggataagagcgtactggaggagatggaaactgacgtcaaatcgctcattcaaagggctctaagacaactggaggaatgcgtcggcaccatacctccggctcccctgctgcataccgtgcacgtgttgagtgcctatgcgtcaatcgaacccttaacaggagtgtttaaggatccacgagtgcttgatctcctcatgcatatgctgtcgtcacccgactaccagatacgttggagcgcggggcggatgattcaagcgctaagcagccatgacgcagggaccaggacccagatcctcctgtccttaagccagcaggaagcaatcgagaagcatcttgatttcgactctaggtgcgcactgttggccctctttgctcaagcgaccctgagcgagcaccccatgtcattcgagggcatacagctgcctcaggtcccagggcgcgtccttttcagcttggtcaagcgttatttacacgtgacaagcctgttggaccaattgaatgatagcgctgccgagccaggcgctcagaatacctcagcccctgaagagctctcgggggagcgcggtcagctggagctcgagttttcaatggccatggggacgctgatttccgagctcgtgcaggccatgcggtgggatcaggcctcggatcggcctcgttcttctgcccggagtcccggctccatcttccagcctcagctcgctgacgtttccccaggcttgcccgccgctcaggcacagccaagctttcgccggtctcggcgctttcgaccaagaagcgagttcgcttcagggaacacatatgccctttacgtgcgagatacactccagccggggatgcgggtacgcatgctggacgattatgaagagattagtgctggcgacgagggggagtttcgccagtctaacaacggagtgccaccagttcaggtgttctgggagagcactggacgtacatattgggtccactggcatatgctggagattctggggttcgaggaggacatcgaggatatggtcgaggccgacgaatatcaaggggcagtcgcatcaagggtcctcggtcgagcactccctgcctggaggtggcggccaatgacagaactttatgctgtcccatacgtacttccggaggacgaggacacagaggagtgcgagcatcttacgttggccgaatggtgggagctgttgttctttattaaaaagctcgacggtcctgaccaccaagaggtgctccagatcctgcaggagaacctggatggtgagatactcgacgatgaaatcttggccgaactggccgtacctatcgagctcgcccaggacctcctcctgacacttccccagagattgaacgattccgcgctgcgggacttgattaactgtcacgtatacaagaaatatggacccgaggcccttgcaggtaatcaagcctaccctagcctgctcgaagcccaggaagatgttctgctgctagatgctcaggctcaggcgaaggactctgaagacgccgccaaggtagaagccaaagagccgcccagtcaatctcctaatacacctcttcagagactggtggaggggtacgggccggccgggaagatcctgctggacctggaacaagctctcagcagtgagggaacacaggaaaacaaagtgaagccgctcctcctccagctgcaacggcaaccccagcccttcctggcgctgatgcaatccctcgataccccggaaacaaataggacactgcatttaaccgtcctcaggatactcaagcaattggtggacttccccgaggccctgttgctcccctggcatgaggccgtcgatgcatgcatggcttgtctgagatcacccaatactgacagggaggtactgcaagagttgatcttttttctgcaccgactcacaagtgtgagccgagactacgccgtggtgctcaatcagctgggtgctcgcgatgctatttcaaaggccttggaaaaacacctagggaaacttgagttagcccaggaattacgggatatggtgtttaagtgcgaaaagcacgcgcacctgtatcgaaagctgatcacaaatattcttggaggctgcattcagatggtgcttggccagatcgaagaccaccggcgcacacatcagccaatcaacatcccgttcttcgacgtgtttctgagatatctgtgtcagggcagcagtgttgaagtaaaggaagataagtgctgggagaaggtcgaagtctcatctaacccccatcgcgcatccaaactcacagatcacaatcctaaaacatattgggagagtaacggtagtgcaggaagccattacatcactctgcacatgaggaggggtatcctgatccgtcagctgacattattggtggccagtgaggattcttcatatatgccagcccgcgttgtcgtgtgcggaggtgattcgaccagtagcctgcacaccgaactcaacagcgtgaacgtaatgccatctgcttcgcgggttattctgttggagaatctgaccagattctggcctattatccagatccggattaaacgctgtcagcaaggagggattgatactcgcatacgagggctggaaattttaggcccaaaacctaccttctggccggtgtttagagaacagctgtgtagacacacacggcttttttacatggtaagagcccaggcgtggagtcaagacatggctgaggatcgacgctctctcctacacctctcgtctaggctgaatggggccctgagacaggaacagaatttcgcagaccggtttctaccagacgatgaagccgcacaggctctgggcaagacctgttgggaagccctcgtcagccctgtggttcaaaacattacatcccccgacgaagacggcatatcccctctgggctggttgttagatcagtacctggagtgtcaggaagcagtgtttaacccacaatcccgcggtccagcttttttttcaagggtgagaagacttacccacttattggtgcatgtcgaaccctgtgaagcccctccccccgtcgtagcgacccccagaccaaagggaaggaaccggagtcacgattggtcatctttagctacacgagggctgccttcctccattatgcgtaatctgacgaggtgctggcgcgccgttgtggaaaagcaagttaacaactttctcacttcctcctggcgggatgacgattttgtacctcgatattgtgaacacttcaatatcttacagaacagctccagcgagttgtttggcccccgcgcggccttcctgctagctctgcagaatggctgtgccggagctctgttgaagttgccttttctgaaagctgcccatgtatccgagcagttcgcgaggcatattgaccagcagatccaaggaagccggatcggtggtgcccaagaaatggagagacttgcacagttacagcagtgcctgcaggcagtcctcatcttcagtggtctggaaatcgccactacatttgagcattactatcagcactatatggccgatcggctgctcggggtggtaagcagttggctggaaggggcagtcttggagcagattgggccctgctttcccaaccgcctgccccagcagatgctacagagtctgtctactagcaaagagctgcagagacaatttcatgtgtaccagttacagcagctagatcaggaactgctgaagttagaggatacagagaagaagattcaagtgggcctgggcgcgagcggcaaggagcataaatccgagaaagaagaagaagctggagctgccgctgtcgtggatgtggccgagggagaagaagaggaggaggagaatgaggatctttactatgagggggccatgcctgaagtgtccgtgctggtgctgagtcgccattcgtggccggtggccagtatttgtcatacactgaatccacggacgtgcctcccatcctatttacgtggcacgctgaaccgctactccaacttttataataagtcccagtcacatccagcacttgagcgaggcagtcagcggcgcttgcagtggacctggctcggatgggcggagttgcagtttggaaaccagacacttcacgtgagcaccgtacagatgtggcttcttctttaccttaatgacctgaaggcggtgagcgtggaatctctgctggctttttccggtctgtccgctgatatgttgaaccaggccattggcccactgacttccagccggggaccactcgacctgcatgagcagaaagatattcccggcggcgttctgaaaataagagacggttctaaggagcccaggtcacgatgggacatcgttaggctcatccctcctcagacatatctccaagcagagggagaagacgggcagaacctcgagaagagacggaatctattgaactgcctcatcgtccgcatcctgaaggcgcacggcgatgagggcctccacatcgatcagctcgtatgcttggtactggaggcctggcaaaagggcccgtgtccacctcgtggtctcgtcagcagtcttgggaaggggtctgcttgctcttctaccgatgtcctgagctgtattctgcacctgctcggaaagggaactctacggagacacgatgatcggccccaagtcctgtcttacgccgttcctgtgactgttatggaaccccatactgagagcctcaatcccgggtcctcgggtccaaacccccctctgacattccatactctgcagattagatctaggggggtgccatacgcctcatgtaccgctactcagagcttttccacatttaggtag

SEQ ID NO: 269708 - DNA, 5097 bp, Artificial Sequence
  derived and/or modified sequence
atggtaggggaattacgctaccgggagttcagagtgcctttaggacctgggctccacgcgtatccagacgagttgatccgccagcgagtaggtcacgatggacacccggagtatcagatccgttggctcatcctgcggcgtggcgacgagggtgatggtggcagcggacaagtcgactgtaaggccgaacacatcctgctgtggatgagtaaggacgagatttacgcaaattgtcataaaatgttaggcgaagacgggcaagttatcggcccttctcaagaatcagccggtgaagtcggtgccctcgataaatctgttttggaagagatggagaccgacgtgaaaagcctgattcagagggcgctcaggcagttagaggaatgcgttgggactatcccccctgccccactgttgcacaccgtccacgtgctgagtgcctacgctagcatcgagccactcactggagttttcaaggatccaagggtactggatcttctcatgcatatgctgtctagccctgactaccagatccggtggagcgcaggtaggatgatacaggccctgagctcacatgacgccggtacccgtacccaaatcctcctatcgctcagtcagcaggaggctattgagaagcatttagactttgatagccgctgcgcactgctcgccctctttgcacaggcaaccctgagtgagcatcccatgtcctttgaggggatacagctgccacaggtcccaggtcgcgtgctgttctccctcgttaagcgctacttacacgtcacctcccttctagatcagctgaatgatagcgccgctgaacctggggcacagaatacaagcgctccggaggaactgtcaggagagcgcggacagttagaacttgaattttccatggcgatgggcaccctgatttcagaactcgtgcaagccatgcggtgggaccaggcgtcagaccgccctagaagttctgcaagaagtcctggatccattttccagccacaactggccgatgtctctccgggtttgcccgcagcgcaggcacagccctcctttcggaggagcaggcggtttaggcccagatccgagttcgcaagcggtaatacctacgcgttgtacgtacgtgatactttgcagcctggaatgcgcgtgcggatgctcgacgactatgaggagatatctgctggcgatgagggcgagttcaggcagagtaacaatggggtgccacccgttcaggtcttctgggagtctactggtagaacctactgggtccattggcacatgcttgagattctgggcttcgaggaggacatcgaggatatggtcgaggccgacgagtaccagggcgcagtggccagccgcgtgctgggcagggccttgccagcatggcgctggcggccaatgacagaactctacgccgtcccatatgtactgccggaagatgaagatacagaggaatgtgagcacctgactcttgccgagtggtgggagctgctgtttttcataaagaagctagatggtcccgatcaccaggaagtgctgcagatcctgcaagaaaacctcgatggcgagattcttgacgacgaaatccttgctgagctggcggtccccatagagctggcccaagatctccttctgactctgcctcaaagacttaatgactccgctttacgagatctgataaactgtcacgtctacaaaaaatatggacccgaagcactggcgggaaatcaggcatacccgtctctgcttgaagctcaggaagacgtgttgctgttggatgctcaggctcaggcaaaggatagcgaggacgcggcaaaggtggaggccaaggagccccctagccagtccccaaacacccccctgcagcgcttggtagagggttacggacccgcagggaaaatccttctcgatctagaacaagctctttcttcagaaggtacccaggaaaataaggttaaaccattgctgcttcagctgcaacggcagccccaaccgtttttggcattgatgcagtctctggacactccagaaacaaatcggacactgcatctgacagttctccggattctgaaacagctggtggacttccctgaggccttactcttgccctggcatgaagcagtcgacgcatgcatggcttgtctgaggtctccaaataccgaccgggaggtgttgcaggaactgatttttttccttcatcgcctaacatccgtgtcccgcgattacgccgtagtccttaaccagctgggcgctagggacgccatcagcaaagcactagagaaacacctggggaagctagaactcgcccaagagctgcgcgacatggtgttcaaatgtgaaaagcatgcacacttgtaccgtaagctgattaccaatatcctcggcggatgcattcagatggtccttgggcaaatagaagatcacagacggacacaccagcccattaatattccgtttttcgatgtgttccttaggtacctgtgccaaggttcttccgtcgaagttaaggaagataagtgttgggagaaagtcgaggtctcctctaacccacatcgagccagcaagctgactgaccacaatcccaaaacctactgggaatcaaacgggtcagccggttcacattacattacactgcatatgcggagagggatcctgatcagacaactgactctcctcgtggctagtgaggattccagctacatgcctgcacgggttgtcgtctgcggcggagacagcacttcttctcttcacacggagcttaactcagtcaacgtaatgccgagcgctagcagagtgatcctgctggaaaatctcacccgcttttggcccataattcagatcagaatcaagagatgccagcagggtgggatagacacccggatccgcggactcgagatcctcgggcctaaacccactttctggccagtgtttcgggaacagctgtgtaggcacactcgtttgttctatatggtccgcgctcaagcttggagccaggacatggccgaagatcggcgatcactcctacacttatcatcacgtttgaacggagctcttcggcaggaacaaaatttcgctgacagattcttgcccgacgatgaggccgctcaggcattgggcaaaacctgttgggaggccctagtgagccccgtggtacagaatataacatctccagatgaggatggtatatcgcccctcggctggctcctggaccagtatctggagtgtcaagaagcagtgttcaatcctcagagccgcggaccagcctttttttctcgtgtgcgcaggctcactcacttgttagtccatgtagaaccatgtgaagctccgccaccagtggtggccacgccacggccaaagggtcgaaaccggagccacgactggtcctctttggctactaggggactgccttcatctataatgcgtaacctcactaggtgctggagagctgttgttgagaaacaggtgaacaacttcctcacttcgtcctggcgggacgatgacttcgtccccagatactgtgagcactttaatatcctgcagaactcctcaagtgagctgttcggccctcgcgcagcttttcttttggcactgcagaacggatgcgcgggagccctgctgaagttacctttcctgaaagccgctcacgtctctgaacaatttgccagacacattgaccagcaaatccaaggcagccgaatcggcggagcccaggagatggagcggctcgctcagctgcagcaatgccttcaagctgtgctcatcttttcgggactggagatcgccaccacattcgagcactattaccaacactatatggccgaccggcttcttggggtggtaagcagctggctggagggcgcagtgctcgaacagataggaccatgttttcccaataggttgccccagcagatgctgcagtcactcagcacatcaaaagaacttcaaaggcaatttcacgtgtaccagcttcagcaactggatcaagagctccttaagctggaagacactgaaaaaaagatccaggtcggacttggcgcaagtggcaaggaacataaatccgaaaaagaagaggaggccggagccgcagctgtggtggacgtggccgaaggcgaggaagaagaggaggagaacgaggacttgtactacgagggcgcaatgcccgaggtgagtgttcttgtcctgagtcggcactcatggcccgtggcaagcatctgccatacattaaacccacgcacatgcctccccagctacttgaggggcaccctgaatcgttacagtaacttctacaataaatcccagtctcacccagctcttgagcggggaagccagagacgcctccagtggacatggctggggtgggctgagctgcaattcggcaaccagactcttcatgtgtccaccgtgcagatgtggctgctgctgtacctcaacgacttgaaagccgtttcggtcgagtccctgttggcgttctctggactgagcgcggacatgctgaatcaggccattggccctctgactagctcacgaggccctcttgacctccatgaacagaaagacatacctggaggagttttgaaaattcgggatggttcaaaggaaccacggagtcgctgggatattgtgcgactaattccaccacagacgtatttacaagctgagggtgaagacgggcagaatttggaaaagcgcaggaatctcttaaattgcctgatcgtaagaattcttaaggcacatggcgacgagggtttgcacatcgaccagttagtgtgtttagttttggaggcgtggcagaagggtccgtgtccgcctagaggcctggtgagctccttggggaaaggatcagcctgcagttctacagacgttctctcctgcatccttcacctgttaggtaagggtactctgcgcaggcacgacgacaggccccaggtgctgagctatgctgtgccagtgaccgtcatggagccgcatacagaaagcttgaatccaggatcctcaggccctaacccaccactgacgtttcacaccctgcagatccggagccgaggcgtgccttatgcatcatgcaccgccacacagtctttcagcactttccggtag

SEQ ID NO: 269709 - DNA, 5254 bp, Artificial Sequence
  derived and/or modified sequence
gtcgccgccagcgtctgtgccgcgtcccttgctctgtgaaggacaggcctcgcgccaggaccccggtggacttctgaggtgccaggatggtgggagaactccgctacagggaattcagggtgcccctggggcccggcttacatgcctatcctgatgagctgatccgccagcgcgtgggccatgatgggcatcctgagtaccagatccgttggctcatcctgcggcgtggcgatgagggggacgggggctctggccaagtggactgcaaggctgagcacatcctgctgtggatgtccaaggatgagatctatgccaactgccacaagatgctgggcgaggatggccaggtcatcgggccctcccaggagtctgcaggggaggttggggccctggacaaatctgtgctggaggagatggaaaccgacgtgaagtccctcattcagagagcccttcggcagctggaggagtgtgtgggcactatccctcctgctcctctacttcacactgtccacgtgctcagcgcctatgccagcattgagcccctcactggagtattcaaggacccaagggtcctggacttgctcatgcacatgttgagtagtcctgattatcagattcgctggagtgcaggccggatgatacaagccctgtcctcccatgacgctgggacccggactcagatccttctgtcactgagccaacaagaagccattgagaaacacctggattttgacagccgctgtgctctgctagcactgtttgcacaggccacgctctctgaacaccccatgtctttcgagggcattcagctaccacaggtcccaggaagggtgctcttctccctggtgaagcggtatttgcatgtcacctcgctcctggatcagctgaacgacagtgctgcggagccaggagcccagaacacctctgctcctgaggagttgagtggggagaggggtcaactggagctggagttcagtatggccatgggcaccctgatctcggagctggtgcaagccatgcgctgggaccaggcctcagacagaccaaggagctcagcacggtcccccggttccatcttccagcctcagctggcagatgtgagcccagggctccccgctgcccaggctcagccctccttcaggaggtcaagacgttttcgccctcgttctgagttcgcaagtggcaatacctatgctttgtatgtgcgggacacactgcagccggggatgcgagtgcggatgctggatgattatgaggagatcagtgccggggatgagggcgagtttcggcagagcaacaacggtgtgcctcctgtgcaggtattttgggagtcaacaggccgcacctattgggtgcactggcacatgctggagatcttgggctttgaggaagacattgaggacatggttgaggctgatgagtaccaaggggcagtggccagtagagtcctgggtagagccctgcctgcctggcgctggaggcccatgacagaactctatgctgtgccttatgtgctgcctgaggatgaggacactgaggagtgtgaacacctgaccctggctgagtggtgggaactcctcttcttcatcaagaagctggatggacctgaccatcaggaggttctccagatcctccaggagaacctagatggggagattctggatgatgagatcctagctgaactggccgtgcccatagaattggcccaggacttgctgctgactctgccacagcgactcaatgacagtgccctcagggacctgatcaactgccatgtctacaagaagtatgggcctgaagccctagcagggaaccaagcctacccatcccttctagaagcccaagaagatgtcctcctgctagacgcgcaggcccaggctaaggactcagaagatgcagccaaagtggaagcaaaagaacccccatctcagagtcccaacactcccctgcagcgtctggtggagggttatggtccagctgggaaaatcctcctggatctagagcaagccctcagctcagaggggacccaggagaacaaggtcaagccactcctgctgcagctgcagcggcagccgcagcccttcctggcactgatgcagagcctggacactccggagactaacaggaccctgcacctgactgtgctgagaatcctgaagcagctggtggacttccccgaggcactgctgctcccctggcacgaggccgtggatgcctgcatggcctgcctgcggtccccaaacactgatcgagaggtgctccaggaactgattttcttcctgcaccgcctgacctcagtgagcagggactatgccgtggtgctgaatcagctgggagcaagagacgctatctccaaggccctggaaaagcacctgggaaagctggagctggctcaggagctgcgggacatggtgttcaagtgtgagaagcatgcccacctctaccgcaaactcatcaccaacatcctgggaggctgcatccagatggtgctgggccagatcgaagaccacagacgaacccaccaacccatcaacatccctttctttgatgtgttcctcagatacctgtgccagggctccagtgtggaagtgaaggaggacaagtgctgggagaaggtggaggtgtcctccaacccgcaccgggccagcaagctgacggaccacaaccccaagacctattgggagtccaacggcagcgccggctcccactacatcaccctgcacatgcgccggggcatcctcatcaggcaactgactctgcttgtggctagtgaggactcgagttacatgccggcccgagtggtggtgtgcgggggtgatagcactagctctcttcacacggaactcaactcggtgaatgtgatgccctctgccagccgggtgatcctcctggagaacctgacccgcttctggcccatcatccagatccgcataaagcgctgccagcagggtggcattgatacgcgcattcgggggttagagatcctaggccccaagcccacgttctggccagtgttccgggagcagctctgtcgtcacacacgcctcttctacatggttcgggcacaggcctggagccaggacatggcagaggaccgcaggagcctcctgcacctgagttctagactcaacggtgctctgcgccaggagcagaattttgctgaccgcttcctccctgatgacgaggctgcccaagctctgggcaagacctgctgggaggccctggtcagccccgtggtgcagaacatcacctcccctgatgaggatggcattagccccctgggttggctgctggaccagtacctggagtgtcaggaagctgtcttcaacccccagagccgcggcccagctttcttctcgcgggtgcgccgtctcactcacctgctggtgcatgtcgagccctgtgaggcaccccctcctgtggtggccactcctcggcccaaaggcagaaacagaagccacgactggagctccttggctacccggggccttccaagcagcatcatgagaaacctgacgcgctgttggcgggccgtggtggagaagcaggtgaacaattttctgacctcatcctggcgggatgatgactttgtgccacgctactgtgagcactttaatattctgcagaactcaagctctgaactgtttgggcctcgggcagccttcttgctggcgctgcaaaatggctgtgcgggagccttgctgaagctcccttttctcaaagctgcccacgtgagtgagcagttcgcccggcacattgaccagcagatccagggcagccggatcggtggagcccaggaaatggagaggctggcacagctgcagcaatgcctgcaagctgtcctgattttctccggcttggagatagccaccacttttgagcattattaccagcactacatggcggaccgtctcctgggcgtggtctcgagctggctggagggggccgtgctggagcagatcggtccctgcttccccaaccgcctcccccagcagatgttgcagagcctgagcacctctaaggagctgcagcgccagttccacgtctaccagctccagcagctggatcaggaactcctgaagctggaggatacagagaagaaaatacaggtgggccttggggccagtggcaaggagcacaagagcgagaaggaagaggaagctggggcagcagcagtggtggatgtggcggagggagaggaggaagaggaggagaatgaggacctctactatgaaggggcaatgccagaagtgtctgtgcttgtcctgtcccgacactcctggcctgttgcctcaatctgccacacactgaaccccagaacctgcctgccctcctacctgaggggcactttgaacagatactccaacttctacaacaagagtcagagccaccctgcccttgagcgaggctcacagaggcgactgcagtggacgtggctgggctgggctgagctgcagtttgggaaccagaccctgcatgtgtccaccgtgcagatgtggctactgctgtatctcaacgacctgaaggcggtctctgtggagagtctgctggcgttctcagggctctccgcagacatgctcaatcaggcgattgggcccctcacctcttcaagaggccccctggaccttcacgagcaaaaggatataccaggaggggtcctcaagattcgagatggcagcaaggaacccaggtcgagatgggacattgtgcggctcatcccacctcagacgtacctgcaagctgagggtgaagacggccagaacttggagaagagacggaatcttctgaactgcctcatcgtccgaatcctcaaggcccatggagatgaggggctgcacattgaccagcttgtctgtctggtgctggaggcttggcagaagggcccgtgtcctcccaggggtttggtcagcagccttggtaaggggtctgcatgcagcagcactgacgtcctctcctgcatcctacacctcctgggcaagggcacgctgagacgccatgacgaccggccccaggtgctgtcctatgcagtccctgtgactgtcatggagcctcacactgagtccctgaacccaggctcctcaggccccaacccacccctcaccttccataccctacagattcgctcccggggtgtgccctatgcctcctgcactgccacccagagcttctctaccttccggtagccctagacttggggtcaggggaaggtagagctggagcttttacagaaataaaacccaagagtttgattata

SEQ ID NO: 269710 - DNA, 5097 bp, Artificial Sequence
  derived and/or modified sequence
atggtgggcgagctgagatacagagagttcagagtgcccctgggccccggcctgcacgcctaccccgacgagctgatcagacagagagtgggccacgacggccaccccgagtaccagatcagatggctgatcctgagaagaggcgacgagggcgacggcggcagcggccaggtggactgcaaggccgagcacatcctgctgtggatgagcaaggacgagatctacgccaactgccacaagatgctgggcgaggacggccaggtgatcggccccagccaggagagcgccggcgaggtgggcgccctggacaagagcgtgctggaggagatggagaccgacgtgaagagcctgatccagagagccctgagacagctggaggagtgcgtgggcaccatcccccccgcccccctgctgcacaccgtgcacgtgctgagcgcctacgccagcatcgagcccctgaccggcgtgttcaaggaccccagagtgctggacctgctgatgcacatgctgagcagccccgactaccagatcagatggagcgccggcagaatgatccaggccctgagcagccacgacgccggcaccagaacccagatcctgctgagcctgagccagcaggaggccatcgagaagcacctggacttcgacagcagatgcgccctgctggccctgttcgcccaggccaccctgagcgagcaccccatgagcttcgagggcatccagctgccccaggtgcccggcagagtgctgttcagcctggtgaagagatacctgcacgtgaccagcctgctggaccagctgaacgacagcgccgccgagcccggcgcccagaacaccagcgcccccgaggagctgagcggcgagagaggccagctggagctggagttcagcatggccatgggcaccctgatcagcgagctggtgcaggccatgagatgggaccaggccagcgacagacccagaagcagcgccagaagccccggcagcatcttccagccccagctggccgacgtgagccccggcctgcccgccgcccaggcccagcccagcttcagaagaagcagaagattcagacccagaagcgagttcgccagcggcaacacctacgccctgtacgtgagagacaccctgcagcccggcatgagagtgagaatgctggacgactacgaggagatcagcgccggcgacgagggcgagttcagacagagcaacaacggcgtgccccccgtgcaggtgttctgggagagcaccggcagaacctactgggtgcactggcacatgctggagatcctgggcttcgaggaggacatcgaggacatggtggaggccgacgagtaccagggcgccgtggccagcagagtgctgggcagagccctgcccgcctggagatggagacccatgaccgagctgtacgccgtgccctacgtgctgcccgaggacgaggacaccgaggagtgcgagcacctgaccctggccgagtggtgggagctgctgttcttcatcaagaagctggacggccccgaccaccaggaggtgctgcagatcctgcaggagaacctggacggcgagatcctggacgacgagatcctggccgagctggccgtgcccatcgagctggcccaggacctgctgctgaccctgccccagagactgaacgacagcgccctgagagacctgatcaactgccacgtgtacaagaagtacggccccgaggccctggccggcaaccaggcctaccccagcctgctggaggcccaggaggacgtgctgctgctggacgcccaggcccaggccaaggacagcgaggacgccgccaaggtggaggccaaggagccccccagccagagccccaacacccccctgcagagactggtggagggctacggccccgccggcaagatcctgctggacctggagcaggccctgagcagcgagggcacccaggagaacaaggtgaagcccctgctgctgcagctgcagagacagccccagcccttcctggccctgatgcagagcctggacacccccgagaccaacagaaccctgcacctgaccgtgctgagaatcctgaagcagctggtggacttccccgaggccctgctgctgccctggcacgaggccgtggacgcctgcatggcctgcctgagaagccccaacaccgacagagaggtgctgcaggagctgatcttcttcctgcacagactgaccagcgtgagcagagactacgccgtggtgctgaaccagctgggcgccagagacgccatcagcaaggccctggagaagcacctgggcaagctggagctggcccaggagctgagagacatggtgttcaagtgcgagaagcacgcccacctgtacagaaagctgatcaccaacatcctgggcggctgcatccagatggtgctgggccagatcgaggaccacagaagaacccaccagcccatcaacatccccttcttcgacgtgttcctgagatacctgtgccagggcagcagcgtggaggtgaaggaggacaagtgctgggagaaggtggaggtgagcagcaacccccacagagccagcaagctgaccgaccacaaccccaagacctactgggagagcaacggcagcgccggcagccactacatcaccctgcacatgagaagaggcatcctgatcagacagctgaccctgctggtggccagcgaggacagcagctacatgcccgccagagtggtggtgtgcggcggcgacagcaccagcagcctgcacaccgagctgaacagcgtgaacgtgatgcccagcgccagcagagtgatcctgctggagaacctgaccagattctggcccatcatccagatcagaatcaagagatgccagcagggcggcatcgacaccagaatcagaggcctggagatcctgggccccaagcccaccttctggcccgtgttcagagagcagctgtgcagacacaccagactgttctacatggtgagagcccaggcctggagccaggacatggccgaggacagaagaagcctgctgcacctgagcagcagactgaacggcgccctgagacaggagcagaacttcgccgacagattcctgcccgacgacgaggccgcccaggccctgggcaagacctgctgggaggccctggtgagccccgtggtgcagaacatcaccagccccgacgaggacggcatcagccccctgggctggctgctggaccagtacctggagtgccaggaggccgtgttcaacccccagagcagaggccccgccttcttcagcagagtgagaagactgacccacctgctggtgcacgtggagccctgcgaggcccccccccccgtggtggccacccccagacccaagggcagaaacagaagccacgactggagcagcctggccaccagaggcctgcccagcagcatcatgagaaacctgaccagatgctggagagccgtggtggagaagcaggtgaacaacttcctgaccagcagctggagagacgacgacttcgtgcccagatactgcgagcacttcaacatcctgcagaacagcagcagcgagctgttcggccccagagccgccttcctgctggccctgcagaacggctgcgccggcgccctgctgaagctgcccttcctgaaggccgcccacgtgagcgagcagttcgccagacacatcgaccagcagatccagggcagcagaatcggcggcgcccaggagatggagagactggcccagctgcagcagtgcctgcaggccgtgctgatcttcagcggcctggagatcgccaccaccttcgagcactactaccagcactacatggccgacagactgctgggcgtggtgagcagctggctggagggcgccgtgctggagcagatcggcccctgcttccccaacagactgccccagcagatgctgcagagcctgagcaccagcaaggagctgcagagacagttccacgtgtaccagctgcagcagctggaccaggagctgctgaagctggaggacaccgagaagaagatccaggtgggcctgggcgccagcggcaaggagcacaagagcgagaaggaggaggaggccggcgccgccgccgtggtggacgtggccgagggcgaggaggaggaggaggagaacgaggacctgtactacgagggcgccatgcccgaggtgagcgtgctggtgctgagcagacacagctggcccgtggccagcatctgccacaccctgaaccccagaacctgcctgcccagctacctgagaggcaccctgaacagatacagcaacttctacaacaagagccagagccaccccgccctggagagaggcagccagagaagactgcagtggacctggctgggctgggccgagctgcagttcggcaaccagaccctgcacgtgagcaccgtgcagatgtggctgctgctgtacctgaacgacctgaaggccgtgagcgtggagagcctgctggccttcagcggcctgagcgccgacatgctgaaccaggccatcggccccctgaccagcagcagaggccccctggacctgcacgagcagaaggacatccccggcggcgtgctgaagatcagagacggcagcaaggagcccagaagcagatgggacatcgtgagactgatccccccccagacctacctgcaggccgagggcgaggacggccagaacctggagaagagaagaaacctgctgaactgcctgatcgtgagaatcctgaaggcccacggcgacgagggcctgcacatcgaccagctggtgtgcctggtgctggaggcctggcagaagggcccctgcccccccagaggcctggtgagcagcctgggcaagggcagcgcctgcagcagcaccgacgtgctgagctgcatcctgcacctgctgggcaagggcaccctgagaagacacgacgacagaccccaggtgctgagctacgccgtgcccgtgaccgtgatggagccccacaccgagagcctgaaccccggcagcagcggccccaacccccccctgaccttccacaccctgcagatcagaagcagaggcgtgccctacgccagctgcaccgccacccagagcttcagcaccttcagatag

SEQ ID NO: 269711 - protein, 1022 aa, Artificial Sequence
  derived and/or modified sequence
MFREVKYYAVGDIDPQVIQLLKAGKAKEVSYNALASHIISEDGDNPEVGEAREVFDLPVVKVSSEDRSALWALVTFYGGDCQLTLNKKCTHLIVPEPKGEKYECALKRASIKIVTPDWVLDCVSEKTKKDEAFYHPRLIIYEEEEEEEEEEEEVENEEQDSQNEGSTDEKSSPASSQEGSPSGDQQFSPKSNTEKSKGELMFDDSSDSSPEKQERNLNWTPAEVPQLAAAKRRLPQGKEPGLINLCANVPPVPGNILPPEVRGNLMAAGQNLQSSERSEMIATWSPAVRTLRNITNNADIQQMNRPSNVAHILQTLSAPTKNLEQQVNHSQQGHTNANAVLFSQVKVTPETHMLQQQQQAQQQQQQHPVLHLQPQQIMQLQQQQQQQISQQPYPQQPPHPFSQQQQQQQQAHPHQFSQQQLQFPQQQLHPPQQLHRPQQQLQPFQQQHALQQQFHQLQQHQLQQQQLAQLQQQHSLLQQQQQQQIQQQQLQRMHQQQQQQQMQSQTAPHLSQTSQALQHQVPPQQPPQQQQQQQPPPSPQQHQLFGHDPAVEIPEEGFLLGCVFAIADYPEQMSDKQLLATWKRIIQAHGGTVDPTFTSRCTHLLCESQVSSAYAQAIRERKRCVTAHWLNTVLKKKKMVPPHRALHFPVAFPPGGKPCSQHIISVTGFVDSDRDDLKLMAYLAGAKYTGYLCRSNTVLICKEPTGLKYEKAKEWRIPCVNAQWLGDILLGNFEALRQIQYSRYTAFSLQDPFAPTQHLVLNLLDAWRVPLKVSAELLMSIRLPPKLKQNEVANVQPSSKRARIEDVPPPTKKLTPELTPFVLFTGFEPVQVQQYIKKLYILGGEVAESAQKCTHLIASKVTRTVKFLTAISVVKHIVTPEWLEECFRCQKFIDEQNYILRDAEAEVLFSFSLEESLKRAHVSPLFKAKYFYITPGICPSLSTMKAIVECAGGKVLSKQPSFRKLMEHKQNSSLSEIILISCENDLHLCREYFARGIDVHNAEFVLTGVLTQTLDYESYKFN

SEQ ID NO: 269712 - protein, 123 aa, Artificial Sequence
  derived and/or modified sequence
MPRLHDHFWSCSCAHSARRRGPPRASAAGLAAKVGEMINVSVSGPSLLAAHGAPDADPAPRGRSAAMSGPEPGSPYPNTWHHRLLQRSLVLFSVGVVLALVLNLLQIQRNVTLFPEEVIATIF

SEQ ID NO: 269713 - protein, 888 aa, Artificial Sequence
  derived and/or modified sequence
MLLECFININYIKKEEGRRFLSCLFNWNINFIKMIHGTIKNQLQGLQKSLMVYIAEIYFRAWKKASGKILEAIENDCIQDFMFHGIHLPRRSPVHSKVREVLSYFHHQKKVRQGVEEMLYRLYKPILWRGLKARNSEVRSNAALLFVEAFPIRDPNLHAIEMDSEIQKQFEELYSLLEDPYPMVRSTGILGVCKITSKYWEMMPPTILIDLLKKVTGELAFDTSSADVRCSVFKCLPMILDNKLSHPLLEQLLPALRYSLHDNSEKVRVAFVDMLLKIKAVRAAKFWKICPMEHILVRLETDSRPVSRRLVSLIFNSFLPVNQPEEVWCERCVTLVQMNHAAARRFYQYAHEHTACTNIAKLIHVIRHCLNACIQRAVREPPEDEEEEDGREKENVTVLDKTLSVNDVACMAGLLEIIVILWKSIDRSMENNKEAKLYTINKFASVLPEYLKVFKDDRCKIPLFMLMSFMPASAVPPFSCGVISTLRSREEGAVDKSYCTLLDCLCSWGQVGHILELVDNWLPTEHAQAKSNTASKGRVQIHDTRPVKPELALVYIEYLLTHPKNRECLLSAPRKKLNHLLKALETSKADLESLLQTPGGKPRGFSEAAAPRAFGLHCRLSIHLQHKFCSEGKVYLSMLEDTGFWLESKILSFIQDQEEDYLKLHRVIYQQIIQTYLTVCKDVVMVGLGDHQFQMQLLQRSLGIMQTVKGFFYVSLLLDILKEITGSSLIQKTDSDEEVAMLLDTVQKVFQKMLECIARSFRKQPEEGLRVSDVEELTPPEHLSDLPPFSRCLIGIIIKSSNVVRSFLDELKACVASNDIEGIVCLTAAVHIILVINAGKHKSSKVREVAATVHRKLKTFMEITLEEDSIERFLYESSSRTLGELLNS

SEQ ID NO: 269714 - protein, 898 aa, Artificial Sequence
  derived and/or modified sequence
  misc_feature (1)..(1): Xaa can be any naturally occurring amino acid
XLEESGEIKDMLLECFININYIKKEEGRRFLSCLFNWNINFIKMIHGTIKNQLQGLQKSLMVYIAEIYFRAWKKASGKILEAIENDCIQDFMFHGIHLPRRSPVHSKVREVLSYFHHQKKVRQGVEEMLYRLYKPILWRGLKARNSEVRSNAALLFVEAFPIRDPNLHAIEMDSEIQKQFEELYSLLEDPYPMVRSTGILGVCKITSKYWEMMPPTILIDLLKKVTGELAFDTSSADVRCSVFKCLPMILDNKLSHPLLEQLLPALRYSLHDNSEKVRVAFVDMLLKIKAVRAAKFWKICPMEHILVRLETDSRPVSRRLVSLIFNSFLPVNQPEEVWCERCVTLVQMNHAAARRFYQYAHEHTACTNIAKLIHVIRHCLNACIQRAVREPPEDEEEEDGREKENVTVLDKTLSVNDVACMAGLLEIIVILWKSIDRSMENNKEAKLYTINKFASVLPEYLKVFKDDRCKIPLFMLMSFMPASAVPPFSCGVISTLRSREEGAVDKSYCTLLDCLCSWGQVGHILELVDNWLPTEHAQAKSNTASKGRVQIHDTRPVKPELALVYIEYLLTHPKNRECLLSAPRKKLNHLLKALETSKADLESLLQTPGGKPRGFSEAAAPRAFGLHCRLSIHLQHKFCSEGKVYLSMLEDTGFWLESKILSFIQDQEEDYLKLHRVIYQQIIQTYLTVCKDVVMVGLGDHQFQMQLLQRSLGIMQTVKGFFYVSLLLDILKEITGSSLIQKTDSDEEVAMLLDTVQKVFQKMLECIARSFRKQPEEGLRVSDVEELTPPEHLSDLPPFSRCLIGIIIKSSNVVRSFLDELKACVASNDIEGIVCLTAAVHIILVINAGKHKSSKVREVAATVHRKLKTFMEITLEEDSIERFLYESSSRTLGELLNS

SEQ ID NO: 269715 - protein, 597 aa, Artificial Sequence
  derived and/or modified sequence
MEHILVRLETDSRPVSRRLVSLIFNSFLPVNQPEEVWCERCVTLVQMNHAAARRFYQYAHEHTACTNIAKLIHVIRHCLNACIQRAVREPPEDEEEEDGREKENVTVLDKTLSVNDVACMAGLLEIIVILWKSIDRSMENNKEAKLYTINKFASVLPEYLKVFKDDRCKIPLFMLMSFMPASAVPPFSCGVISTLRSREEGAVDKSYCTLLDCLCSWGQVGHILELVDNWLPTEHAQAKSNTASKGRVQIHDTRPVKPELALVYIEYLLTHPKNRECLLSAPRKKLNHLLKALETSKADLESLLQTPGGKPRGFSEAAAPRAFGLHCRLSIHLQHKFCSEGKVYLSMLEDTGFWLESKILSFIQDQEEDYLKLHRVIYQQIIQTYLTVCKDVVMVGLGDHQFQMQLLQRSLGIMQTVKGFFYVSLLLDILKEITGSSLIQKTDSDEEVAMLLDTVQKVFQKMLECIARSFRKQPEEGLRVSDVEELTPPEHLSDLPPFSRCLIGIIIKSSNVVRSFLDELKACVASNDIEGIVCLTAAVHIILVINAGKHKSSKVREVAATVHRKLKTFMEITLEEDSIERFLYESSSRTLGELLNS

SEQ ID NO: 269716 - DNA, 2667 bp, Artificial Sequence
  derived and/or modified sequence
atgctcttggagtgtttcatcaacattaattatatcaaaaaggaggaaggcagacggttcctgtcatgtctcttcaactggaatattaattttatcaaaatgatccacggcactatcaagaatcagctccaggggctccagaaatcattaatggtgtatatcgcagaaatctatttccgagcttggaaaaaggccagtggcaagatactggaggcgatcgagaacgactgcattcaagacttcatgttccatggtatccatctcccccggcgttccccagtacattccaaggtccgcgaggtgctgagttatttccaccatcagaagaaagtgcggcagggcgtggaggagatgctgtatcgattatataaacctatcctgtggcgagggctgaaagctaggaactctgaagttcggagcaacgccgctctgttgtttgtggaagctttccctattagggaccccaacctacacgcaatcgagatggattctgaaatacagaagcagttcgaggaactctattccctcctggaggacccttacccaatggtgcgcagcacagggatactgggagtgtgcaagatcacctcaaagtactgggagatgatgccacccaccatcctcatagacctactcaagaaagtcactggggagttggcattcgatacatcctctgccgatgttcgctgctcggtctttaagtgccttccaatgattctggacaacaaattaagtcacccattactcgaacagttgctgccagcactgaggtacagcttgcatgacaactccgaaaaggtacgcgttgcattcgtggacatgctgctgaaaatcaaagcagtgcgcgctgctaaattttggaaaatatgcccaatggaacacatcctcgttcggctcgagaccgattctagacccgtctcacgacgtctggtctccttgatttttaactcttttctccctgtgaaccagcctgaggaagtgtggtgcgaacgttgtgttaccctggtccaaatgaaccacgccgcagcaagacgcttctaccagtacgcccacgagcacaccgcatgtactaacatcgcaaagttaattcatgttataaggcactgtttaaatgcgtgcatccagagggccgtcagggagccgcccgaggacgaagaagaggaggatgggcgcgagaaggaaaatgttactgtgctcgataaaaccctgagtgttaatgacgtggcctgtatggccggcctcctcgagatcatcgtcattctgtggaagtccatcgatcgatccatggaaaacaataaagaagccaagctgtacactatcaacaagtttgccagcgttctcccggagtacctgaaggtgttcaaagacgacagatgcaagattcctctattcatgctcatgtccttcatgcccgcaagcgccgtcccacccttcagctgcggtgtaatctccacattgcgatctagggaggagggggcagtcgataagagctattgcacactgctggattgcctgtgttcttggggacaggtgggacacatcttggagctggttgacaattggcttccaacagagcatgcccaggctaagagcaacacagctagtaaaggaagggtgcagattcacgacactcgtcctgtgaaacccgaactggccctcgtgtacattgaatacctgctcacacacccaaagaacagggagtgtctgctctctgcaccaagaaagaagctgaaccacctgctgaaagctttggagacttcaaaggccgacctggagtcgttactgcagacccctgggggcaaacctcggggcttttccgaggcagcagcccctcgggcttttggccttcattgcagactcagcattcatctgcaacataagttttgttctgagggcaaggtgtatttatcaatgctggaagacaccgggttttggctggaaagcaagatactgagtttcatccaggatcaagaggaggactacctgaaactgcatcgtgtcatttatcaacagatcattcaaacatatctcacagtctgtaaagacgtggtcatggtggggctcggagatcatcagtttcagatgcaactgctgcagcgtagcctcggcatcatgcagaccgtaaaggggtttttctacgtcagtttgttactggacatcctgaaggagatcactggttcgtccctgatccaaaagacagattctgacgaggaagtcgctatgctgttagatactgttcaaaaggtgtttcagaagatgttagagtgtatcgcacggtcctttcggaagcagcctgaggaggggcttcgcgtgagcgatgtagaggagctaacacctcctgagcacctgtccgatctaccaccattttccaggtgcctgataggaattatcattaagtccagtaacgtcgtgaggtcttttttggacgaactgaaggcttgcgtggcatcaaacgatattgaaggaatcgtgtgcttgacggccgccgttcatatcattctggtgataaatgcgggcaagcacaaatcctccaaagtcagggaggttgctgcgaccgtgcatcggaaactgaaaacatttatggagatcacactcgaggaggatagtatagaaaggtttctgtacgagtcaagttcacggaccttaggagagctgctgaactcgtag

SEQ ID NO: 269717 - DNA, 2697 bp, Artificial Sequence
  derived and/or modified sequence
taactggaggaaagcggcgagattaaagacatgctgctggagtgtttcattaacatcaattacattaaaaaggaggagggcaggcggttcctgagttgtctgttcaattggaacattaacttcattaagatgatccatgggacaatcaagaatcagcttcaagggctgcagaagtctcttatggtctacatcgctgagatctacttccgcgcttggaagaaggcctcaggcaaaattctcgaagccatcgaaaacgattgcattcaagacttcatgtttcacggcatccatttgcctagaagaagtcctgtccactccaaggttcgtgaggtcttgagctacttccatcaccaaaagaaagtaaggcaaggggtcgaggagatgctgtacaggctgtacaaacctatcctttggagggggctcaaggcacgaaacagtgaggttaggagtaacgccgccctgctttttgtggaagccttcccaatcagggatcccaacttgcacgccattgagatggactctgagatccagaagcagtttgaagagctgtacagtctgctcgaggacccctaccctatggttagaagcacagggattctgggggtgtgtaaaatcacctcgaaatattgggagatgatgccgccaaccattctgattgacctgcttaagaaagtcaccggagagctcgccttcgatacttctagcgcagacgtacggtgcagcgtttttaaatgtcttccgatgatcctggacaataagctgtctcaccctcttcttgaacagctgctgcccgccttacggtacagcttgcatgataactccgaaaaggtgagagtagcgtttgtggacatgcttctcaagattaaagccgtgagagccgcaaaattctggaaaatttgccccatggaacatatcctcgtgcggctggagacagacagccggcctgtgagtaggagactggtgtcactgattttcaatagcttcctccccgtgaatcagcctgaagaagtgtggtgcgagcgctgtgtgacgctggtccaaatgaaccacgcagcagcgaggagattctatcagtacgctcacgaacacacggcctgcaccaacatcgcaaagctcattcacgtgattcgccactgcctgaacgcctgcatccagcgcgccgtgcgtgagccgcccgaggatgaggaagaagaagatggtagagaaaaagagaatgtcacggtactggataagacactgtcagtgaacgacgtggcctgtatggcaggactcctggaaatcatcgtaatcctttggaagtccatcgatcgctcaatggaaaataataaagaagctaagttgtacacaatcaataaattcgcctccgtgctgcctgaataccttaaggtgtttaaggatgatcgttgcaaaatcccccttttcatgttaatgagctttatgcccgccagcgcagtacctcccttttcttgcggcgtcatatctacactgcggtcccgagaggaaggcgctgttgacaagtcttactgtaccctgctggattgcctgtgttcatggggccaggtggggcatattttagagctcgtggataactggctaccaaccgaacacgcacaggcgaagtccaacactgcctctaaggggagagtccaaatccacgacacacggccagtcaagcctgaattggctcttgtctacatcgagtatcttctcacacatccgaaaaacagagaatgtctgctttccgctccaagaaagaaactgaaccatcttctgaaagctctcgaaacctctaaagcggatctggaaagcctgttgcagaccccaggtggcaagccccggggcttttctgaagctgctgccccacgtgcctttggtttacactgtagacttagcattcatctgcagcataagttctgctctgaggggaaagtctacctcagcatgctggaggacactggcttctggctcgagagtaaaatattaagcttcatacaggatcaagaggaggactatctcaaattacatcgcgtcatctatcaacaaatcatccagacctatttgacagtgtgcaaggacgtcgtaatggtgggattaggagaccaccagttccaaatgcagctcctacaacgatcattaggtatcatgcagactgtgaagggcttcttctacgtgtccttgttgctggatatcttaaaagagattactggcagcagcctgattcaaaaaaccgattctgacgaagaggtggcgatgctgttagatactgtccagaaagtgtttcagaagatgttggagtgtattgcacggtcatttcgcaaacagcctgaggagggattacgcgttagtgatgtcgaagaactgacccctcctgagcatctgtccgatctgcccccatttagtagatgtctgataggcattatcataaagtcttcgaacgtcgttcgtagttttctcgatgagctaaaggcgtgcgtggcttctaatgacatcgagggtatagtctgcttgacagccgcagtgcatatcatcctcgtcatcaacgcaggtaagcacaaatccagcaaggtgcgggaagtcgccgccactgtgcatcgtaaacttaagacatttatggaaattaccctggaggaggactcaattgaacgttttctgtacgaaagctctagtcggactctgggcgagctcctcaactcatag

SEQ ID NO: 269718 - DNA, 2924 bp, Artificial Sequence
  derived and/or modified sequence
atttggaggaaagtggagaaattaaagatatgttacttgagtgcttcataaatattaattatatcaagaaagaagagggaagaagatttcttagttgtctcttcaactggaatatcaacttcatcaaaatgatccacgggaccattaaaaaccagttacagggattacaaaagtctttgatggtatacattgcagaaatttatttcagagcttggaaaaaggcttcagggaaaatactggaggcgattgaaaatgattgcatccaggacttcatgttccacgggatacaccttccgaggaggtctccagtgcattccaaagtgcgggaggttctgagttactttcaccatcaaaagaaagttcggcagggagtggaagagatgctttatagattatataagcccatcctttggagaggattaaaggccagaaactctgaagttcgatcaaatgctgcattgttgtttgttgaagcatttcctattagggatccaaaccttcatgctattgaaatggatagtgaaatccagaaacagtttgaagagctctatagccttttagaagatccttacccgatggtccgttccacagggatccttggtgtttgtaaaataacttctaagtactgggaaatgatgcccccgaccattcttattgacctcctgaagaaggtgactggggaactggcatttgacacgagctcagctgatgttcgttgttctgtctttaagtgtctgccaatgattttggacaacaaactgagccacccattgttagagcagctccttccagctctcagatacagtctccacgacaattcggagaaagtgagggtagcttttgtggacatgctgttgaagatcaaagctgtgagggctgctaagttttggaaaatatgtcccatggagcacattctggttcgtctggaaactgattctcgacctgtgtctcggcgcctggtgagcctcatctttaattctttcctgcctgtgaatcagccggaggaggtctggtgcgagcgctgtgtcaccctggtgcagatgaaccacgccgctgccaggaggttctatcagtacgcccacgaacacaccgcctgcaccaacatagcaaagctgattcacgttattcgtcattgcttaaatgcctgtatccagagggcagtgagagagcctccagaggacgaggaggaagaggacggaagggagaaggagaatgtgactgttctggacaaaacactgtcagtaaacgatgttgcatgcatggcaggtttactagaaatcattgtgattctctggaaaagtattgacagaagtatggaaaataataaagaggccaaactttacacgattaacaagtttgcctctgtgcttccagagtatctgaaagtatttaaggatgatcgctgcaagatccctttattcatgctaatgtcctttatgccggcctctgctgtccccccattcagctgtggtgtgatttccacgctgagaagccgggaggagggcgctgtggacaagagctactgcactttgttggattgcctctgctcctgggggcaggtggggcacattctggagcttgttgacaactggctgcccacagagcatgcccaggccaagagcaacacagcttctaaaggtagggtgcagatccatgacacacgcccagtcaaacctgaattggcattggtctacattgagtatctgctgactcatccaaagaaccgcgagtgcttgctctctgctcctcggaagaaacttaaccatcttttgaaagcccttgaaacgtcaaaggcagatctggagtcacttctgcagacaccgggtgggaagcctcgtggcttcagtgaagcagctgccccgcgagcctttggtctccactgtcgcctgagcatccatcttcagcacaagttctgctcagaaggaaaggtgtatttgtccatgttggaagacactggcttttggttagaaagcaaaattttatcttttattcaagatcaagaagaagactacctgaagcttcatagggtcatttatcagcaaattatccagacctacctgactgtgtgtaaagatgttgttatggtaggccttggtgaccatcagtttcagatgcaactcttacagcggagtcttggaatcatgcaaacagtgaagggatttttttatgtttcattacttcttgacattctgaaagagataactggaagttccttgattcagaaaacagattcagatgaagaagttgcaatgctgttggacacagtccagaaagtatttcagaaaatgttggaatgtattgcacggagcttcaggaagcagccggaagaaggcctgcgggtttctgacgtagaagagcttacccctccagagcatctttctgatcttccaccattttcaaggtgtttaataggaataataataaagtcttcgaatgtggtcaggtcatttttggatgaattaaaggcatgtgtggcttctaatgatattgaaggcattgtgtgcctcacggctgctgtgcatattatcctggttattaatgcaggtaaacataaaagctcaaaagtgagggaggttgcagccactgttcacagaaaactaaagacattcatggaaattactttggaagaggatagcattgaaagatttctctatgaatcatcatcaagaactctgggagaacttttgaattcataaccaagccaacatctccagacatgtaaaaatagggaaaagtgattcaaattgaaatgcctgtgtattttcctattgtttttaatgttaataacccatataatagggaaagggtgggatttttttgtgggaatgtgggaaggtgggggttatggaggagataactcaaaacttcttcaattttgcctagtgcctgcgtaaataatatatttaatataaaggactccaggt

SEQ ID NO: 269719 - DNA, 2926 bp, Artificial Sequence
  derived and/or modified sequence
atttggaggaaagtggagaaattaaagatatgttacttgagtgcttcataaatattaattatatcaagaaagaagagggaagaagatttcttagttgtctcttcaactggaatatcaacttcatcaaaatgatccacgggaccattaaaaaccagttacagggattacaaaagtctttgatggtatacattgcagaaatttatttcagagcttggaaaaaggcttcagggaaaatactggaggcgattgaaaatgattgcatccaggacttcatgttccacgggatacaccttccgaggaggtctccagtgcattccaaagtgcgggaggttctgagttactttcaccatcaaaagaaagttcggcagggagtggaagagatgctttatagattatataagcccatcctttggagaggattaaaggccagaaactctgaagttcgatcaaatgctgcattgttgtttgttgaagcatttcctattagggatccaaaccttcatgctattgaaatggatagtgaaatccagaaacagtttgaagagctctatagccttttagaagatccttacccgatggtccgttccacagggatccttggtgtttgtaaaataacttctaagtactgggaaatgatgcccccgaccattcttattgacctcctgaagaaggtgactggggaactggcatttgacacgagctcagctgatgttcgttgttctgtctttaagtgtctgccaatgattttggacaacaaactgagccacccattgttagagcagctccttccagctctcagatacagtctccacgacaattcggagaaagtgagggtagcttttgtggacatgctgttgaagatcaaagctgtgagggctgctaagttttggaaaatatgtcccatggagcacattctggttcgtctggaaactgattctcgacctgtgtctcggcgcctggtgagcctcatctttaattctttcctgcctgtgaatcagccggaggaggtctggtgcgagcgctgtgtcaccctggtgcagatgaaccacgccgctgccaggaggttctatcagtacgcccacgaacacaccgcctgcaccaacatagcaaagctgattcacgttattcgtcattgcttaaatgcctgtatccagagggcagtgagagagcctccagaggacgaggaggaagaggacggaagggagaaggagaatgtgactgttctggacaaaacactgtcagtaaacgatgttgcatgcatggcaggtttactagaaatcattgtgattctctggaaaagtattgacagaagtatggaaaataataaagaggccaaactttacacgattaacaagtttgcctctgtgcttccagagtatctgaaagtatttaaggatgatcgctgcaagatccctttattcatgctaatgtcctttatgccggcctctgctgtccccccattcagctgtggtgtgatttccacgctgagaagccgggaggagggcgctgtggacaagagctactgcactttgttggattgcctctgctcctgggggcaggtggggcacattctggagcttgttgacaactggctgcccacagagcatgcccaggccaagagcaacacagcttctaaaggtagggtgcagatccatgacacacgcccagtcaaacctgaattggcattggtctacattgagtatctgctgactcatccaaagaaccgcgagtgcttgctctctgctcctcggaagaaacttaaccatcttttgaaagcccttgaaacgtcaaaggcagatctggagtcacttctgcagacaccgggtgggaagcctcgtggcttcagtgaagcagctgccccgcgagcctttggtctccactgtcgcctgagcatccatcttcagcacaagttctgctcagaaggaaaggtgtatttgtccatgttggaagacactggcttttggttagaaagcaaaattttatcttttattcaagatcaagaagaagactacctgaagcttcatagggtcatttatcagcaaattatccagacctacctgactgtgtgtaaagatgttgttatggtaggccttggtgaccatcagtttcagatgcaactcttacagcggagtcttggaatcatgcaaacagtgaagggatttttttatgtttcattacttcttgacattctgaaagagataactggaagttccttgattcagaaaacagattcagatgaagaagttgcaatgctgttggacacagtccagaaagtatttcagaaaatgttggaatgtattgcacggagcttcaggaagcagccggaagaaggcctgcgggtttctgacgtagaagagcttacccctccagagcatctttctgatcttccaccattttcaaggtgtttaataggaataataataaagtcttcgaatgtggtcaggtcatttttggatgaattaaaggcatgtgtggcttctaatgatattgaaggcattgtgtgcctcacggctgctgtgcatattatcctggttattaatgcaggtaaacataaaagctcaaaagtgagggaggttgcagccactgttcacagaaaactaaagacattcatggaaattactttggaagaggatagcattgaaagatttctctatgaatcatcatcaagaactctgggagaacttttgaattcataaccaagccaacatctccagacatgtaaaaatagggaaaagtgattcaaattgaaatgcctgtgtattttcctattgtttttaatgttaataacccatataatagggaaagggtgggatttttttgtgggaatgtgggaaggtgggggttatggaggagataactcaaaacttcttcaattttgcctagtgcctgcgtaaataatatatttaatataaaggactccaggtat

SEQ ID NO: 269720 - DNA, 2270 bp, Artificial Sequence
  derived and/or modified sequence
tttgggcgccagagcagaggaagaaggcagaacgtttgcgtttcagtccttatctttgcaagtgcaaggcagacagccatttggttgtgaggtgtctggaaagttttggaaaatatgtcccatggagcacattctggttcgtctggaaactgattctcgacctgtgtctcggcgcctggtgagcctcatctttaattctttcctgcctgtgaatcagccggaggaggtctggtgcgagcgctgtgtcaccctggtgcagatgaaccacgccgctgccaggaggttctatcagtacgcccacgaacacaccgcctgcaccaacatagcaaagctgattcacgttattcgtcattgcttaaatgcctgtatccagagggcagtgagagagcctccagaggacgaggaggaagaggacggaagggagaaggagaatgtgactgttctggacaaaacactgtcagtaaacgatgttgcatgcatggcaggtttactagaaatcattgtgattctctggaaaagtattgacagaagtatggaaaataataaagaggccaaactttacacgattaacaagtttgcctctgtgcttccagagtatctgaaagtatttaaggatgatcgctgcaagatccctttattcatgctaatgtcctttatgccggcctctgctgtccccccattcagctgtggtgtgatttccacgctgagaagccgggaggagggcgctgtggacaagagctactgcactttgttggattgcctctgctcctgggggcaggtggggcacattctggagcttgttgacaactggctgcccacagagcatgcccaggccaagagcaacacagcttctaaaggtagggtgcagatccatgacacacgcccagtcaaacctgaattggcattggtctacattgagtatctgctgactcatccaaagaaccgcgagtgcttgctctctgctcctcggaagaaacttaaccatcttttgaaagcccttgaaacgtcaaaggcagatctggagtcacttctgcagacaccgggtgggaagcctcgtggcttcagtgaagcagctgccccgcgagcctttggtctccactgtcgcctgagcatccatcttcagcacaagttctgctcagaaggaaaggtgtatttgtccatgttggaagacactggcttttggttagaaagcaaaattttatcttttattcaagatcaagaagaagactacctgaagcttcatagggtcatttatcagcaaattatccagacctacctgactgtgtgtaaagatgttgttatggtaggccttggtgaccatcagtttcagatgcaactcttacagcggagtcttggaatcatgcaaacagtgaagggatttttttatgtttcattacttcttgacattctgaaagagataactggaagttccttgattcagaaaacagattcagatgaagaagttgcaatgctgttggacacagtccagaaagtatttcagaaaatgttggaatgtattgcacggagcttcaggaagcagccggaagaaggcctgcgggtttctgacgtagaagagcttacccctccagagcatctttctgatcttccaccattttcaaggtgtttaataggaataataataaagtcttcgaatgtggtcaggtcatttttggatgaattaaaggcatgtgtggcttctaatgatattgaaggcattgtgtgcctcacggctgctgtgcatattatcctggttattaatgcaggtaaacataaaagctcaaaagtgagggaggttgcagccactgttcacagaaaactaaagacattcatggaaattactttggaagaggatagcattgaaagatttctctatgaatcatcatcaagaactctgggagaacttttgaattcataaccaagccaacatctccagacatgtaaaaatagggaaaagtgattcaaattgaaatgcctgtgtattttcctattgtttttaatgttaataacccatataatagggaaagggtgggatttttttgtgggaatgtgggaaggtgggggttatggaggagataactcaaaacttcttcaattttgcctagtgcctgcgtaaataatatatttaatataaaggactccaggtatgaatggtgtagaaatccatgattccaagaaaaaacacttttctagcaaacctggttgtttttaaaatgacttttatatatgtaatattgcttggaaactatgagtaataaagcaatgacaacatc

SEQ ID NO: 269721 - DNA, 2667 bp, Artificial Sequence
  derived and/or modified sequence
atgctgctggagtgcttcatcaacatcaactacatcaagaaggaggagggccgccgcttcctgagctgcctcttcaactggaacatcaacttcatcaagatgatccacggcaccatcaagaaccagctgcagggcctgcagaagagcctgatggtgtacatcgccgagatctacttccgggcctggaagaaggccagcggcaagatcctggaggccattgaaaatgactgcatccaggacttcatgttccacggcatccacctgccccggcgcagccctgtgcacagcaaggtgcgggaggtgctgagctacttccaccaccagaagaaggtgcggcagggcgtggaggagatgctgtaccgcctgtacaagcccatcctgtggaggggcctgaaggccaggaacagcgaggtgcgcagcaatgctgccctgctgtttgtggaggccttccccatccgggaccccaacctgcacgccatcgagatggacagcgagatccagaagcagtttgaggagctgtacagcctgctggaggacccctaccccatggtgcgcagcacaggcatcctgggcgtgtgcaagatcaccagcaagtactgggagatgatgccacccaccatcctgattgacctgctgaagaaggtgactggagagctggcctttgacaccagcagcgcagatgtgcgctgcagcgtcttcaagtgcctgcccatgatcctggacaacaagctgagccaccccctgctggagcagctgctgcctgccctgcgctacagcctgcatgacaacagcgagaaggtgcgggtggcctttgtggacatgctgctgaagatcaaggctgtgcgggccgccaagttctggaagatctgccccatggagcacatcctggtgcggctggagacagacagcaggcctgtgtcccggcggctggtgtccctcatcttcaacagcttcctgcctgtgaaccagcctgaggaggtgtggtgtgagcgctgtgtgaccctggtgcagatgaaccacgccgccgcccggcgcttctaccagtatgcccacgagcacacagcctgcaccaacatcgccaagctgatccacgtgatccgccactgcctgaatgcctgcatccagagagctgtgcgggagcccccagaagatgaggaggaggaggatggccgggagaaggaaaatgtgacagtgctggacaagaccctgtctgtgaatgatgtggcctgcatggccggcctgctggagatcatcgtcatcctgtggaagagcattgaccgctccatggagaacaacaaggaggccaagctgtacaccatcaacaagtttgcctctgtgctgcctgagtacctgaaggtgttcaaggatgaccgctgcaagatccccctcttcatgctgatgtccttcatgcctgccagcgctgtgccccccttcagctgtggggtcatcagcaccctgcggagccgggaggagggcgctgtggacaagagctactgcaccctgctggactgcctgtgctcctggggccaggtgggccacatcctggagctggtggacaactggctgcccacagagcacgcccaggccaagagcaacacagccagcaagggccgggtgcagatccatgacaccaggcctgtgaagccagagctggccctggtgtacatcgagtacctgctgacccaccccaagaacagagaatgtctgctgagcgcccccaggaagaagctgaaccacctgctgaaggccctggagaccagcaaggctgacctggagagcctgctgcagacccctgggggcaagccccggggcttcagcgaggccgccgccccccgggccttcggcctgcactgccgcctgagcatccacctgcagcacaagttctgcagcgagggcaaggtgtacctgtccatgctggaggacaccggcttctggctggagagcaagatcctgtccttcatccaggaccaggaggaggactacctgaagctgcacagggtcatctaccagcagatcatccagacctacctgactgtgtgcaaggatgtggtgatggtgggcctgggggaccaccagttccagatgcagctgctgcagaggagcctgggcatcatgcagacagtgaagggcttcttctacgtgtccctgctgctggacatcctgaaggagatcaccggcagcagcctcatccagaagacagacagtgatgaggaggtggccatgctgctggacacagtgcagaaggtgttccagaagatgctggagtgcatcgcccggagcttcaggaagcagcctgaggagggcctgcgggtgtctgatgtggaggagctgaccccacctgagcacctgagtgacctgccccccttcagccgctgcctgattggcatcatcatcaagagcagcaatgtggtgcgctccttcctggatgagctgaaggcctgtgtggccagcaatgacatcgagggcatcgtgtgcctgacagctgctgtgcacatcatcctggtgatcaatgctgggaagcacaagagcagcaaggtgcgggaggtggccgccaccgtgcacaggaagctgaagaccttcatggagatcaccctggaggaggacagcattgagcgcttcctgtatgagagcagcagcaggaccctgggggagctgctgaacagctag

SEQ ID NO: 269722 - DNA, 2697 bp, Artificial Sequence
  derived and/or modified sequence
tgactggaggagagcggggagatcaaggacatgctgctggagtgcttcatcaacatcaactacatcaagaaggaggagggccgccgcttcctgagctgcctcttcaactggaacatcaacttcatcaagatgatccacggcaccatcaagaaccagctgcagggcctgcagaagagcctgatggtgtacatcgccgagatctacttccgggcctggaagaaggccagcggcaagatcctggaggccattgaaaatgactgcatccaggacttcatgttccacggcatccacctgccccggcgcagccctgtgcacagcaaggtgcgggaggtgctgagctacttccaccaccagaagaaggtgcggcagggcgtggaggagatgctgtaccgcctgtacaagcccatcctgtggaggggcctgaaggccaggaacagcgaggtgcgcagcaatgctgccctgctgtttgtggaggccttccccatccgggaccccaacctgcacgccatcgagatggacagcgagatccagaagcagtttgaggagctgtacagcctgctggaggacccctaccccatggtgcgcagcacaggcatcctgggcgtgtgcaagatcaccagcaagtactgggagatgatgccacccaccatcctgattgacctgctgaagaaggtgactggagagctggcctttgacaccagcagcgcagatgtgcgctgcagcgtcttcaagtgcctgcccatgatcctggacaacaagctgagccaccccctgctggagcagctgctgcctgccctgcgctacagcctgcatgacaacagcgagaaggtgcgggtggcctttgtggacatgctgctgaagatcaaggctgtgcgggccgccaagttctggaagatctgccccatggagcacatcctggtgcggctggagacagacagcaggcctgtgtcccggcggctggtgtccctcatcttcaacagcttcctgcctgtgaaccagcctgaggaggtgtggtgtgagcgctgtgtgaccctggtgcagatgaaccacgccgccgcccggcgcttctaccagtatgcccacgagcacacagcctgcaccaacatcgccaagctgatccacgtgatccgccactgcctgaatgcctgcatccagagagctgtgcgggagcccccagaagatgaggaggaggaggatggccgggagaaggaaaatgtgacagtgctggacaagaccctgtctgtgaatgatgtggcctgcatggccggcctgctggagatcatcgtcatcctgtggaagagcattgaccgctccatggagaacaacaaggaggccaagctgtacaccatcaacaagtttgcctctgtgctgcctgagtacctgaaggtgttcaaggatgaccgctgcaagatccccctcttcatgctgatgtccttcatgcctgccagcgctgtgccccccttcagctgtggggtcatcagcaccctgcggagccgggaggagggcgctgtggacaagagctactgcaccctgctggactgcctgtgctcctggggccaggtgggccacatcctggagctggtggacaactggctgcccacagagcacgcccaggccaagagcaacacagccagcaagggccgggtgcagatccatgacaccaggcctgtgaagccagagctggccctggtgtacatcgagtacctgctgacccaccccaagaacagagaatgtctgctgagcgcccccaggaagaagctgaaccacctgctgaaggccctggagaccagcaaggctgacctggagagcctgctgcagacccctgggggcaagccccggggcttcagcgaggccgccgccccccgggccttcggcctgcactgccgcctgagcatccacctgcagcacaagttctgcagcgagggcaaggtgtacctgtccatgctggaggacaccggcttctggctggagagcaagatcctgtccttcatccaggaccaggaggaggactacctgaagctgcacagggtcatctaccagcagatcatccagacctacctgactgtgtgcaaggatgtggtgatggtgggcctgggggaccaccagttccagatgcagctgctgcagaggagcctgggcatcatgcagacagtgaagggcttcttctacgtgtccctgctgctggacatcctgaaggagatcaccggcagcagcctcatccagaagacagacagtgatgaggaggtggccatgctgctggacacagtgcagaaggtgttccagaagatgctggagtgcatcgcccggagcttcaggaagcagcctgaggagggcctgcgggtgtctgatgtggaggagctgaccccacctgagcacctgagtgacctgccccccttcagccgctgcctgattggcatcatcatcaagagcagcaatgtggtgcgctccttcctggatgagctgaaggcctgtgtggccagcaatgacatcgagggcatcgtgtgcctgacagctgctgtgcacatcatcctggtgatcaatgctgggaagcacaagagcagcaaggtgcgggaggtggccgccaccgtgcacaggaagctgaagaccttcatggagatcaccctggaggaggacagcattgagcgcttcctgtatgagagcagcagcaggaccctgggggagctgctgaacagctag

SEQ ID NO: 269723 - DNA, 2667 bp, Artificial Sequence
  derived and/or modified sequence
atgctgctggagtgcttcatcaacatcaactacatcaagaaggaggaaggtcggaggtttctgtcctgcctgttcaactggaacatcaacttcataaagatgatccacggcaccatcaagaaccagctacagggcctccagaagtctctgatggtatatattgctgaaatatactttcgggcctggaagaaagcaagcgggaaaatccttgaggccatcgaaaatgattgcatacaggatttcatgttccacggaatccatctgccgcgacgtagcccagtgcatagcaaagtgcgagaggtactttcttacttccaccaccagaaaaaagttaggcagggagtcgaggagatgctctaccgcttatataagcctattctctggaggggacttaaagcacggaatagcgaagttagaagcaatgccgctttactgtttgtggaggcatttcctatccgtgacccgaacctgcacgcaatcgagatggacagcgaaatccagaagcaattcgaggaactgtactccctgctggaggacccttacccaatggttagaagtactgggattctgggggtgtgcaagatcacaagcaaatactgggaaatgatgcccccaacgatcctcatagatttgttgaaaaaggtgactggggagctggcgtttgatacgtcatcagcggatgtccgttgctccgtgtttaaatgcctgcccatgattttagataataagctctctcacccgcttctggaacagctgctacctgcactgcgttactcactgcacgataatagcgaaaaagtgagagtggccttcgtggatatgttactgaagattaaggcggttagggcagccaagttttggaaaatttgccccatggagcatattttggtacgactggagacagattctcgacccgtctcacgtagactcgtgagcctcatctttaatagtttcctgccagttaatcagcctgaggaagtgtggtgcgaacgatgtgtgacactggttcagatgaatcacgccgccgctaggaggttttatcagtacgcccacgagcacacagcctgcacaaatatagccaaactcattcacgtcattagacattgtcttaatgcttgcatccaaagggctgtgcgggagccccctgaggatgaggaagaggaagatggaagggaaaaagaaaacgtgaccgtcctggataagacccttagcgtcaatgacgtcgcttgcatggctggtttgctcgaaatcattgtcatcctgtggaagagcatcgatcggagtatggagaataacaaagaggccaaactgtatactattaataagtttgcctcggtgctgcccgagtacttgaaagtgttcaaggatgaccggtgtaaaattcctctgttcatgctaatgtcattcatgcccgccagtgccgttccccccttctcctgtggagtgatctcaactcttcgaagccgcgaagagggagctgtggacaagtcatactgcaccctgctcgactgtctatgtagctgggggcaggtgggccatatactcgagctggtcgataattggctgcctactgagcacgctcaggctaaaagcaatacagcttcaaaggggcgggtacagatacatgacacacggccagtgaagcccgaactcgccttggtctacattgagtacctgctgactcatcccaaaaatcgagagtgccttctgtccgcaccaaggaaaaagctgaatcacctcctcaaggccctggagaccagcaaggctgacttagagtcattactgcagaccccaggcggaaaaccacgcggcttcagcgaagccgccgcgccaagggcgttcggactccattgccgcctgtccatccacctccagcataaattttgtagtgaagggaaagtctatctgtcaatgttggaggatacgggattctggctggagagtaaaatcttaagcttcatccaagaccaggaagaggactacttaaaattacaccgagtaatctaccagcagatcattcagacttacctcactgtgtgcaaggatgtggtaatggtggggctcggggatcaccagttccaaatgcagctgctgcagagaagcttggggattatgcagaccgtaaaaggcttcttctatgtaagcctgctcctcgatatacttaaagaaatcaccggatcaagcctaattcaaaagaccgactccgatgaggaggtggcgatgcttctagacaccgttcagaaggtgtttcagaagatgctcgagtgtatagcaagaagctttcggaagcaaccagaggaaggactgcgcgtgtccgacgtagaagagctgactccccctgagcacttgagtgatctgcctcccttctcccggtgtctgatcggcatcattatcaaatcaagtaacgtcgttagatcctttcttgacgagctcaaagcttgcgtggcatccaatgacatcgaaggaatcgtgtgtttgacagccgccgtacacattatactggtgatcaatgcaggcaagcacaaatcaagtaaagtgagggaagtggccgcaactgtccatcgaaaactcaagacttttatggaaattaccttagaagaagactccatcgagaggtttctgtacgaatcctccagtaggacactcggggagttgctgaatagctag

SEQ ID NO: 269724 - DNA, 2697 bp, Artificial Sequence
  derived and/or modified sequence
tgactggaggagagcggcgagatcaaggacatgctgctggagtgcttcataaatattaattacattaagaaggaagaaggacggcgatttctgtcctgtttgtttaactggaatatcaatttcataaagatgattcacgggaccattaaaaaccaactgcagggcctgcagaagtctctgatggtctatatcgcagagatctacttcagggcttggaaaaaagccagcggcaaaatcctggaggccatcgaaaacgactgcattcaagattttatgttccacggaatccacctacctcggcgatctcccgtgcattctaaagtccgggaggtcttgagttatttccatcatcaaaagaaagtgcgtcagggcgttgaggaaatgctgtaccgactctacaaaccgattttatggaggggactcaaggccagaaattccgaggtgcgaagtaacgcagcgctgctcttcgtagaagccttccccatccgcgaccccaacctccacgctatagagatggatagtgaaattcagaagcagtttgaggagctatacagtttgttagaggacccttaccccatggttaggagcacaggcatattgggggtctgtaagatcacaagtaaatactgggagatgatgcctcccacaattctgatagaccttttgaaaaaagtaacgggcgaactggcctttgatacctctagtgcggatgtgagatgcagtgtgttcaagtgcctcccaatgatcctagacaacaaactgagccatccactcctggaacaactcttacccgctctcaggtactccctgcatgataattctgaaaaagtgcgggtggcctttgtagatatgctgctgaaaattaaggctgtccgtgccgccaagttttggaaaatttgtcctatggagcacattctggtacggctcgagaccgatagccgccccgtttctcggcgattggtcagcctcatctttaattctttcctgcccgtcaaccagccagaggaagtatggtgcgagcgctgtgtgactttggtgcagatgaaccacgccgctgcacgtagattctatcagtacgcacacgagcacacagcatgcacaaacatcgctaagctgatccatgtgattcgacactgtctgaacgcttgcatccaacgcgcagttagggagcccccagaggacgaggaagaggaggacggcagagagaaggaaaatgttaccgtcctggacaagaccttgtccgtgaacgacgtcgcttgtatggctggcttacttgagataatagtcatattgtggaagtcaatagataggagcatggagaataataaggaagcaaagctctatactatcaacaaattcgctagcgtgcttccagagtaccttaaagtcttcaaagacgaccgctgtaagattcccctctttatgctgatgtctttcatgcctgcatcagccgtgccgcccttttcctgcggagtcattagcacactcaggagtagagaggagggtgccgtagataagagttactgtactttgctcgattgcctgtgttcctggggccaggtcggccatatattggagctggttgataattggctgcccaccgagcatgcgcaggccaaaagcaatactgcatctaaaggtagagtacagatccatgataccaggccggtgaagccagagctggcgctagtgtacattgagtacctgctcacacacccaaaaaacagggaatgtcttctctccgccccgcgcaaaaagttaaaccacttgttgaaggccctagagaccagcaaggcagatctcgaatcactcttgcagactcccggcggtaaacctcgaggcttcagtgaagcggccgcccctagagccttcggcctgcattgcagactctctattcatctccagcataaattctgttcagaagggaaagtttatctttccatgctggaagatacagggttttggctggaatccaaaattctgtcctttattcaagatcaggaggaggactatctgaaattgcatcgcgtcatctaccagcaaattatccagacgtatctgaccgtctgtaaggacgtagtgatggtgggcttgggggatcatcagtttcagatgcaactgctccagcgttcactgggtataatgcagaccgtgaagggctttttttatgtctcactgctgctggatatattgaaggagattactggcagctccctcattcaaaagacagattcagatgaggaggttgcaatgttgctggacaccgttcagaaagtttttcagaagatgctggagtgcatcgcccgttcttttagaaaacagccagaggaggggctacgtgtgagtgacgtggaggagctcacacctccagagcacttgtccgacttaccccccttcagccgatgtctgatcggcatcattatcaagtcaagtaacgtggtgcgtagtttcctggatgagttaaaagcgtgtgtggcatctaatgatatcgagggaatcgtttgcctaacggccgccgtccatatcatactggttatcaatgccgggaagcacaaatcttccaaggttcgtgaggtggccgccacagtacaccgcaaactcaagacgtttatggagataaccctggaggaagactcgattgagcgctttctctacgaatcctcttcacgtactctgggtgaactcctgaactcttag

SEQ ID NO: 269725 - DNA, 2667 bp, Artificial Sequence
  derived and/or modified sequence
atgttgctagagtgttttatcaatattaattacattaagaaggaggaagggagacgattccttagctgtctgtttaattggaatattaacttcatcaaaatgatccatgggaccatcaaaaatcagttacaaggtttacagaagagcctgatggtgtatattgccgagatttactttagggcctggaaaaaagcctccggcaagattctcgaagcgattgagaacgattgcatccaggacttcatgttccatgggatacacctccccaggaggtctcccgtccattctaaggtcagggaagtgctgagctatttccaccatcagaagaaagtgagacagggcgtcgaggagatgctgtacagactgtacaaacccatcctctggcggggtctgaaagctagaaattctgaagtgcgttcaaacgcggcactgctcttcgtggaggcattccccatccgcgatcccaatctgcacgccatagagatggactcagagatccagaaacagttcgaggaactgtattcgctgctggaagatccctaccccatggtcagatcgaccggaattttgggcgtgtgcaagatcacatccaagtattgggaaatgatgcctccgaccattctgatagacctgctcaaaaaggtgaccggagaacttgccttcgacacatccagcgccgatgtaaggtgttccgtctttaaatgtctccccatgattctagacaataagctttcacaccctctgctggaacagctgttgccggctctcagatactcattacacgataactcagaaaaggtgcgggttgctttcgtggatatgctgctaaaaattaaggccgttagagccgcaaagttctggaagatctgccctatggagcacattctcgtgcgtctggagacagactcccggcctgtttcccggcgacttgtgtctcttatctttaattcatttctgccggtgaaccagcccgaggaagtgtggtgtgagcggtgcgtgactctcgtgcagatgaatcacgctgccgcaagaaggttctatcaatatgcccacgagcatactgcgtgcacgaacatcgcaaagctgatccacgttattcggcactgtctgaacgcttgcattcaacgagccgttcgcgagccgccagaggacgaggaggaagaagacggccgagagaaggaaaatgtgaccgtcctggacaaaacacttagcgtgaacgatgtggcttgcatggccggacttcttgagatcatcgtgatcctctggaaatctatagatcgcagcatggagaacaataaagaggccaaactctacaccattaacaagttcgcgagtgtgctgccagaatacctcaaagttttcaaggacgatcgctgcaaaattccgctgttcatgctaatgagtttcatgcctgcgagcgccgtgcctccattcagctgtggagtcatcagtactctgcgtagtcgcgaagagggcgcagtcgacaaaagttactgcacgttgctagattgtctctgctcgtggggccaggtaggtcacatcttggaactggttgataattggctgcctactgagcacgcacaggccaaatccaatacggccagtaagggtagggtgcagatccacgacacccgcccagtgaaacccgagctggccctcgtgtatatcgagtacctcctaacacatcccaaaaatcgggagtgccttttatcggccccaaggaagaaactcaatcacttgcttaaggcccttgagacatccaaggccgacttggagtcattgctgcaaacaccaggaggaaagccacggggattttccgaagcagcagctcccagagcttttggcttgcactgtcgcctgagtattcacctgcagcacaaattctgcagcgagggcaaagtctacttgtccatgctggaggacaccggattctggttggaaagcaagatcctgtcattcatccaggatcaggaagaggactacctcaagttgcatagggtgatttaccaacaaatcatccagacgtacctgacagtctgcaaggatgttgtgatggtcgggctaggagatcaccagttccagatgcagctcctgcagcggtctctcggtatcatgcagactgtaaaaggcttcttttacgtttcacttctgctggatatcctcaaagagattacaggtagtagcttgattcagaaaacagattcagacgaggaggtggctatgctgctggacacagtgcagaaggtgtttcaaaaaatgctggagtgcattgccagaagctttcggaaacagccggaggagggactgcgtgtgagtgacgtggaggaacttactccgccagagcatctgtctgacctccccccattcagcaggtgtctgatcggcataatcataaagtccagtaacgtagtccgcagttttcttgacgagctcaaggcttgtgtggcttccaacgacatcgaaggtatcgtctgtctgactgccgctgttcacatcatcttggtaatcaacgccggaaagcacaaaagttccaaagttagagaggttgcagctacagtgcaccgcaaactgaaaactttcatggagattaccctcgaggaggacagtatagaaaggttcctgtatgagagcagctcccgcacactgggggagctgctgaattcctag

SEQ ID NO: 269726 - DNA, 2697 bp, Artificial Sequence
  derived and/or modified sequence
tgactggaggaatccggtgagattaaggatatgctgctagagtgcttcatcaacatcaactatattaagaaggaggagggtcgtcggttcctctcgtgtctattcaattggaatatcaactttattaagatgatccacggcacaataaagaatcagttacagggtcttcaaaaaagcctgatggtgtacattgcagagatttattttcgggcatggaagaaagcttctggtaaaatcctggaggccattgaaaatgattgtattcaggacttcatgttccacggaatccacctgccaagacgctcacccgttcactctaaagttcgggaggtgctctcttattttcatcatcaaaagaaggtgaggcagggcgtcgaggagatgctgtacaggttatataagcctatcctgtggcgcggactgaaggcccgtaattctgaggtgcgatcaaatgcggctctcttattcgtggaggcatttcccatccgggaccctaaccttcacgcgatcgaaatggatagtgagatccaaaagcagttcgaggagctgtacagtctattggaggacccgtaccccatggtgcgctcgaccggcatcctgggtgtttgtaagatcactagtaagtactgggagatgatgccgcctaccatccttatcgacttgttgaaaaaagtcacgggcgagctcgcgttcgacacctcttcagctgatgtgaggtgttccgtgtttaaatgcctgccgatgattctggacaataagttgagccatccactgctggaacagctcctgcctgctctgcggtacagtctccacgataattcggaaaaggtcagggtcgcattcgttgacatgctgctcaagattaaggcggtgcgagccgcaaagttttggaagatctgccctatggagcacattcttgtgcggctcgaaaccgattcaaggccggtgtcccgacgtctggtctccctcattttcaactccttcctgccagtcaatcagccagaggaagtgtggtgcgagcggtgtgttacacttgtgcagatgaaccatgcagcggctaggagattctaccagtatgcccacgaacacaccgcctgcacgaacatagccaagctaatacacgttattcgccactgcctcaacgcatgcatccagcgcgctgtgcgggagccccctgaagacgaagaagaggaggatggccgagaaaaggagaatgtgactgtgctggacaaaactctctctgtgaatgatgtcgcatgcatggccggactgttagaaataattgtgatcctctggaaatcaatcgaccgatctatggagaataacaaagaggcaaagctttacaccatcaacaaatttgcttccgtgctgcctgagtacctgaaagtgtttaaggatgacagatgcaaaatccccctctttatgcttatgtccttcatgccagcatcagccgttccgccattctcctgcggggtaatcagcacgctgcgcagccgggaggaaggcgctgtagacaagagctactgtacccttctagattgcctctgttcttggggtcaggtgggccatatcctggagttagtggacaactggttgcctaccgaacacgcccaggcaaaaagcaacacagcatcaaagggcagagtgcaaatacatgatacacgcccagttaagccagaactggccctggtgtatatagaatacctgctcacccaccccaagaacagggagtgtctactatccgctcctaggaagaaattaaatcatttgcttaaagccttagagacatctaaggctgatttggagagcttgctgcagacccctggtggcaagcctcggggtttttccgaggctgctgcgcctcgagccttcggcctacattgcagactgtctatccatctacaacacaagttctgttccgaggggaaggtgtatcttagtatgctggaagataccggcttttggctggaaagcaagatcctgtcttttattcaggaccaggaagaggattatctcaagctgcacagagtgatctaccaacaaatcatccagacatacctgactgtgtgtaaagatgtggtcatggtgggcttgggtgaccaccaattccaaatgcagcttcttcagagatcactgggcatcatgcagactgtgaaggggttcttctatgtctctctgctacttgatatattgaaagaaataacaggaagcagtttgatacagaagactgactcggatgaagaggtggccatgttattggatacagtccagaaagtctttcaaaaaatgctggagtgtattgcccgatcatttaggaaacagcctgaggagggactgcgggtttctgatgtggaggagctcactccacctgagcacctttcagatttacccccattttcccgctgcctaatcggcataattattaagtcaagcaatgtcgtaaggagctttctggatgaactgaaagcctgcgttgcctctaacgacatagaggggatcgtgtgtcttacagcagctgtgcacatcatactagtcatcaacgctggtaagcataagagctccaaggttcgagaggttgccgctaccgtacaccgtaaacttaaaacattcatggagataactctcgaggaggactcgattgaaaggtttctatacgaatcaagctctcgaacactcggggaactgctcaatagctag

SEQ ID NO: 269727 - DNA, 2667 bp, Artificial Sequence
  derived and/or modified sequence
atgctgctggagtgcttcatcaacatcaactacatcaagaaggaggagggcagaagattcctgagctgcctgttcaactggaacatcaacttcatcaagatgatccacggcaccatcaagaaccagctgcagggcctgcagaagagcctgatggtgtacatcgccgagatctacttcagagcctggaagaaggccagcggcaagatcctggaggccatcgagaacgactgcatccaggacttcatgttccacggcatccacctgcccagaagaagccccgtgcacagcaaggtgagagaggtgctgagctacttccaccaccagaagaaggtgagacagggcgtggaggagatgctgtacagactgtacaagcccatcctgtggagaggcctgaaggccagaaacagcgaggtgagaagcaacgccgccctgctgttcgtggaggccttccccatcagagaccccaacctgcacgccatcgagatggacagcgagatccagaagcagttcgaggagctgtacagcctgctggaggacccctaccccatggtgagaagcaccggcatcctgggcgtgtgcaagatcaccagcaagtactgggagatgatgccccccaccatcctgatcgacctgctgaagaaggtgaccggcgagctggccttcgacaccagcagcgccgacgtgagatgcagcgtgttcaagtgcctgcccatgatcctggacaacaagctgagccaccccctgctggagcagctgctgcccgccctgagatacagcctgcacgacaacagcgagaaggtgagagtggccttcgtggacatgctgctgaagatcaaggccgtgagagccgccaagttctggaagatctgccccatggagcacatcctggtgagactggagaccgacagcagacccgtgagcagaagactggtgagcctgatcttcaacagcttcctgcccgtgaaccagcccgaggaggtgtggtgcgagagatgcgtgaccctggtgcagatgaaccacgccgccgccagaagattctaccagtacgcccacgagcacaccgcctgcaccaacatcgccaagctgatccacgtgatcagacactgcctgaacgcctgcatccagagagccgtgagagagccccccgaggacgaggaggaggaggacggcagagagaaggagaacgtgaccgtgctggacaagaccctgagcgtgaacgacgtggcctgcatggccggcctgctggagatcatcgtgatcctgtggaagagcatcgacagaagcatggagaacaacaaggaggccaagctgtacaccatcaacaagttcgccagcgtgctgcccgagtacctgaaggtgttcaaggacgacagatgcaagatccccctgttcatgctgatgagcttcatgcccgccagcgccgtgccccccttcagctgcggcgtgatcagcaccctgagaagcagagaggagggcgccgtggacaagagctactgcaccctgctggactgcctgtgcagctggggccaggtgggccacatcctggagctggtggacaactggctgcccaccgagcacgcccaggccaagagcaacaccgccagcaagggcagagtgcagatccacgacaccagacccgtgaagcccgagctggccctggtgtacatcgagtacctgctgacccaccccaagaacagagagtgcctgctgagcgcccccagaaagaagctgaaccacctgctgaaggccctggagaccagcaaggccgacctggagagcctgctgcagacccccggcggcaagcccagaggcttcagcgaggccgccgcccccagagccttcggcctgcactgcagactgagcatccacctgcagcacaagttctgcagcgagggcaaggtgtacctgagcatgctggaggacaccggcttctggctggagagcaagatcctgagcttcatccaggaccaggaggaggactacctgaagctgcacagagtgatctaccagcagatcatccagacctacctgaccgtgtgcaaggacgtggtgatggtgggcctgggcgaccaccagttccagatgcagctgctgcagagaagcctgggcatcatgcagaccgtgaagggcttcttctacgtgagcctgctgctggacatcctgaaggagatcaccggcagcagcctgatccagaagaccgacagcgacgaggaggtggccatgctgctggacaccgtgcagaaggtgttccagaagatgctggagtgcatcgccagaagcttcagaaagcagcccgaggagggcctgagagtgagcgacgtggaggagctgaccccccccgagcacctgagcgacctgccccccttcagcagatgcctgatcggcatcatcatcaagagcagcaacgtggtgagaagcttcctggacgagctgaaggcctgcgtggccagcaacgacatcgagggcatcgtgtgcctgaccgccgccgtgcacatcatcctggtgatcaacgccggcaagcacaagagcagcaaggtgagagaggtggccgccaccgtgcacagaaagctgaagaccttcatggagatcaccctggaggaggacagcatcgagagattcctgtacgagagcagcagcagaaccctgggcgagctgctgaacagctag

SEQ ID NO: 269728 - DNA, 2697 bp, Artificial Sequence
  derived and/or modified sequence
tgactggaggagagcggcgagatcaaggacatgctgctggagtgcttcatcaacatcaactacatcaagaaggaggagggcagaagattcctgagctgcctgttcaactggaacatcaacttcatcaagatgatccacggcaccatcaagaaccagctgcagggcctgcagaagagcctgatggtgtacatcgccgagatctacttcagagcctggaagaaggccagcggcaagatcctggaggccatcgagaacgactgcatccaggacttcatgttccacggcatccacctgcccagaagaagccccgtgcacagcaaggtgagagaggtgctgagctacttccaccaccagaagaaggtgagacagggcgtggaggagatgctgtacagactgtacaagcccatcctgtggagaggcctgaaggccagaaacagcgaggtgagaagcaacgccgccctgctgttcgtggaggccttccccatcagagaccccaacctgcacgccatcgagatggacagcgagatccagaagcagttcgaggagctgtacagcctgctggaggacccctaccccatggtgagaagcaccggcatcctgggcgtgtgcaagatcaccagcaagtactgggagatgatgccccccaccatcctgatcgacctgctgaagaaggtgaccggcgagctggccttcgacaccagcagcgccgacgtgagatgcagcgtgttcaagtgcctgcccatgatcctggacaacaagctgagccaccccctgctggagcagctgctgcccgccctgagatacagcctgcacgacaacagcgagaaggtgagagtggccttcgtggacatgctgctgaagatcaaggccgtgagagccgccaagttctggaagatctgccccatggagcacatcctggtgagactggagaccgacagcagacccgtgagcagaagactggtgagcctgatcttcaacagcttcctgcccgtgaaccagcccgaggaggtgtggtgcgagagatgcgtgaccctggtgcagatgaaccacgccgccgccagaagattctaccagtacgcccacgagcacaccgcctgcaccaacatcgccaagctgatccacgtgatcagacactgcctgaacgcctgcatccagagagccgtgagagagccccccgaggacgaggaggaggaggacggcagagagaaggagaacgtgaccgtgctggacaagaccctgagcgtgaacgacgtggcctgcatggccggcctgctggagatcatcgtgatcctgtggaagagcatcgacagaagcatggagaacaacaaggaggccaagctgtacaccatcaacaagttcgccagcgtgctgcccgagtacctgaaggtgttcaaggacgacagatgcaagatccccctgttcatgctgatgagcttcatgcccgccagcgccgtgccccccttcagctgcggcgtgatcagcaccctgagaagcagagaggagggcgccgtggacaagagctactgcaccctgctggactgcctgtgcagctggggccaggtgggccacatcctggagctggtggacaactggctgcccaccgagcacgcccaggccaagagcaacaccgccagcaagggcagagtgcagatccacgacaccagacccgtgaagcccgagctggccctggtgtacatcgagtacctgctgacccaccccaagaacagagagtgcctgctgagcgcccccagaaagaagctgaaccacctgctgaaggccctggagaccagcaaggccgacctggagagcctgctgcagacccccggcggcaagcccagaggcttcagcgaggccgccgcccccagagccttcggcctgcactgcagactgagcatccacctgcagcacaagttctgcagcgagggcaaggtgtacctgagcatgctggaggacaccggcttctggctggagagcaagatcctgagcttcatccaggaccaggaggaggactacctgaagctgcacagagtgatctaccagcagatcatccagacctacctgaccgtgtgcaaggacgtggtgatggtgggcctgggcgaccaccagttccagatgcagctgctgcagagaagcctgggcatcatgcagaccgtgaagggcttcttctacgtgagcctgctgctggacatcctgaaggagatcaccggcagcagcctgatccagaagaccgacagcgacgaggaggtggccatgctgctggacaccgtgcagaaggtgttccagaagatgctggagtgcatcgccagaagcttcagaaagcagcccgaggagggcctgagagtgagcgacgtggaggagctgaccccccccgagcacctgagcgacctgccccccttcagcagatgcctgatcggcatcatcatcaagagcagcaacgtggtgagaagcttcctggacgagctgaaggcctgcgtggccagcaacgacatcgagggcatcgtgtgcctgaccgccgccgtgcacatcatcctggtgatcaacgccggcaagcacaagagcagcaaggtgagagaggtggccgccaccgtgcacagaaagctgaagaccttcatggagatcaccctggaggaggacagcatcgagagattcctgtacgagagcagcagcagaaccctgggcgagctgctgaacagctag

SEQ ID NO: 269729 - protein, 87 aa, Artificial Sequence
  derived and/or modified sequence
MVSSVVGFYSLRFFGNFTPKKDDTTMTKIIGNCVSILVLSSALPVMSRTLGLHKLHLPNTSRDSETASVMTSSARDTGFHHLQALMC

SEQ ID NO: 269730 - protein, 284 aa, Artificial Sequence
  derived and/or modified sequence
MLLLLALLILGIVWVASALIDNDAASMESLYDLWEFYLPYLYSCISLMGCLLLLLCTPVGLSRMFTVMGQLLVKPTILEDLDEQIYIITLEEEALQRRLNGLSSSVEYNIMELEQELENVKTLKTKLERRKKASAWERNLVYPAVMVLLLIETSISVLLVACNILCLLVDETAMPKGTRGPGIGNASLSTFGFVGAALEIILIFYLMVSSVVGFYSLRFFGNFTPKKDDTTMTKIIGNCVSILVLSSALPVMSRTLGLHKLHLPNTSRDSETAKPSVNGHQKAL

SEQ ID NO: 269731 - protein, 415 aa, Artificial Sequence
  derived and/or modified sequence
MKEDGRAGRGVGAGAALPQPSAGVHDEQEDEDAIVNRISLFLSTFTLAVSAGAVLLLPFSIISNEILLSFPQNYYIQWLNGSLIHGLWNLASLFSNLCLFVLMPFAFFFLESEGFAGLKKGIRARILETLVMLLLLALLILGIVWVASALIDNDAASMESLYDLWEFYLPYLYSCISLMGCLLLLLCTPVGLSRMFTVMGQLLVKPTILEDLDEQIYIITLEEEALQRRLNGLSSSVEYNIMELEQELENVKTLKTKLERRKKASAWERNLVYPAVMVLLLIETSISVLLVACNILCLLVDETAMPKGTRGPGIGNASLSTFGFVGAALEIILIFYLMVSSVVGFYSLRFFGNFTPKKDDTTMTKIIGNCVSILVLSSALPVMSRTLGLHKLHLPNTSRDSETAKPSVNGHQKAL

SEQ ID NO: 269732 - DNA, 264 bp, Artificial Sequence
  derived and/or modified sequence
atggtgtcctctgtggtgggcttctatagtctgaggtttttcgggaacttcacgcctaagaaagatgataccacgatgaccaagatcatcgggaattgcgtttccattttggtcctatctagcgcacttcctgttatgtccagaactctggggttgcataaattacatctccctaacactagtagagactccgagactgcaagcgttatgacaagctctgctcgcgatacagggtttcatcacctgcaggcattaatgtgttag

SEQ ID NO: 269733 - DNA, 855 bp, Artificial Sequence
  derived and/or modified sequence
atgctactgctgctcgcgctactgatcctggggatcgtttgggtggcctcggccttaatagacaacgacgcagcgagcatggagagcctgtatgatttgtgggagttctacttgccatatctgtattcctgtatcagcctgatgggctgtctgctgcttttgctctgcactccagttggcttgtcccgaatgtttactgttatgggtcaattgctggttaaaccaacgatcctcgaagatctggatgaacagatctatatcattacactggaggaagaggccctgcagcgacgcctcaacgggttaagctcgtctgtcgaatataatattatggagttagagcaggaactagagaacgtaaagaccctaaagacaaaactggaacgcaggaagaaggcctctgcctgggagagaaatctcgtgtatccagcagtgatggtgctgctgctcatcgagacatctatttccgtcttgctggttgcatgcaatattctgtgtctgcttgtggatgagaccgccatgcccaagggaactcgaggccctggcataggtaatgcctcgctttctactttcgggtttgtgggagctgctctggaaattattctgatcttctacctgatggtgtcttcagttgttggcttctatagtctgcgcttcttcggaaatttcacacctaaaaaggacgacacgaccatgaccaaaatcattggaaattgcgtaagcatcctggtgttgtccagtgcactacctgtaatgtctagaactctcggactgcataaactccacctaccaaatacttcaagggacagtgagacagctaagccatctgtaaacggtcaccaaaaagccctgtag

SEQ ID NO: 269734 - DNA, 1248 bp, Artificial Sequence
  derived and/or modified sequence
atgaaggaagatggccgggctgggcgcggtgttggggccggggctgctttaccacagccgtccgccggagtgcacgacgaacaggaagacgaggatgctatagtgaaccggatctctctctttttatcaacatttaccctcgcagtcagcgccggagctgtgctcctactgccattttcgataatttccaatgagatcctcctgagctttccccagaactactacatccaatggctcaacgggagcttgatccacggcctgtggaatttagcctcgttgttcagcaacctgtgcctgttcgtgctgatgcctttcgcattcttttttctagagtcagaagggtttgccggactcaagaaggggattagagcaaggattttggaaacacttgtcatgttactgctgctcgcactcctgattttgggaattgtctgggtggcaagcgctttaattgataacgatgccgctagcatggagtccttatatgatttatgggagttttacctcccctacctctattcttgtatctcactcatgggctgtttgctgctgttgctttgcactccggtgggcttgtcgcgcatgttcacggtgatgggtcagctactggttaagcccacaatcttagaggaccttgacgaacaaatctatatcataactctggaagaggaggccctgcaaagacgcctcaatggcctttcctcatcagtcgagtataacatcatggaactcgagcaggaactcgagaacgtaaagactctgaagactaagctggagaggaggaagaaagcctccgcctgggagcgcaatctggtttaccctgccgtgatggttctcctgcttattgagacatccatttcagtccttcttgtggcttgtaatattctttgcttgctagtggacgagacagccatgccaaaagggaccagaggccctggcattggaaatgcgagcctttcaacattcggatttgtcggcgccgccctcgagattatcctgattttttacctgatggtatccagtgtcgtgggattttatagtcttaggttctttggaaactttacccccaagaaagatgacacaactatgacaaagataatcggaaactgtgtgtccattctggtgctcagctctgcactccccgtgatgtcgcgaactctggggctgcacaagctccatcttcccaacacaagccgggacagtgaaaccgcgaagccctctgtcaacggccatcagaaggcactctag

SEQ ID NO: 269735 - DNA, 264 bp, Artificial Sequence
  derived and/or modified sequence
atggtgtcctctgtggtgggcttctacagcctgcgcttcttcggcaacttcacccccaagaaggatgacaccaccatgaccaagatcatcggcaactgtgtgtccatcctggtgctgagcagcgccctgcctgtgatgagcaggaccctgggcctgcacaagctgcacctgcccaacaccagccgggacagcgagacagcctctgtgatgaccagcagcgcccgggacaccggcttccaccacctgcaggccctgatgtgctag

SEQ ID NO: 269736 - DNA, 855 bp, Artificial Sequence
  derived and/or modified sequence
atgctgctgctgctggccctgctgatcctgggcatcgtgtgggtggccagcgccctgattgacaatgatgctgcctccatggagagcctgtatgacctgtgggagttctacctgccctacctgtacagctgcatcagcctgatgggctgcctgctgctgctgctgtgcacccctgtgggcctgagcaggatgttcaccgtgatgggccagctgctggtgaagcccaccatcctggaggacctggatgagcagatctacatcatcaccctggaggaggaggccctgcagaggcggctgaatggcctgagcagctctgtggagtacaacatcatggagctggagcaggagctggagaatgtgaagaccctgaagaccaagctggagaggaggaagaaggccagcgcctgggagaggaacctggtgtacccagctgtgatggtgctgctgctgattgagaccagcatctctgtgctgctggtggcctgcaacatcctgtgcctgctggtggatgaaacagccatgcccaagggcacccggggccctggcattggaaatgccagcctgagcacctttggatttgtgggcgccgccctggagatcatcctgatcttctacctgatggtgtcctctgtggtgggcttctacagcctgcgcttcttcggcaacttcacccccaagaaggatgacaccaccatgaccaagatcatcggcaactgtgtgtccatcctggtgctgagcagcgccctgcctgtgatgagcaggaccctgggcctgcacaagctgcacctgcccaacaccagccgggacagcgagacagccaagcccagcgtgaatggccaccagaaggccctgtag

SEQ ID NO: 269737 - DNA, 1248 bp, Artificial Sequence
  derived and/or modified sequence
atgaaggaggatggccgggccggccggggcgtgggcgctggggccgccctgccccagcccagcgctggggtgcatgatgagcaggaggatgaagatgccatcgtgaaccgcatcagcctcttcctgagcaccttcaccctggccgtgtctgctggagctgtgctgctgctgcccttcagcatcatcagcaatgagatcctgctgtccttcccccagaactactacatccagtggctgaatggcagcctcatccacggcctgtggaacctggccagcctcttcagcaacctgtgcctgtttgtgctgatgccctttgccttcttcttcctggagagcgagggctttgctggcctgaagaagggcatccgggcccgcatcctggagaccctggtgatgctgctgctgctggccctgctgatcctgggcatcgtgtgggtggccagcgccctgattgacaatgatgctgcctccatggagagcctgtatgacctgtgggagttctacctgccctacctgtacagctgcatcagcctgatgggctgcctgctgctgctgctgtgcacccctgtgggcctgagcaggatgttcaccgtgatgggccagctgctggtgaagcccaccatcctggaggacctggatgagcagatctacatcatcaccctggaggaggaggccctgcagaggcggctgaatggcctgagcagctctgtggagtacaacatcatggagctggagcaggagctggagaatgtgaagaccctgaagaccaagctggagaggaggaagaaggccagcgcctgggagaggaacctggtgtacccagctgtgatggtgctgctgctgattgagaccagcatctctgtgctgctggtggcctgcaacatcctgtgcctgctggtggatgaaacagccatgcccaagggcacccggggccctggcattggaaatgccagcctgagcaccttcggctttgtgggcgccgccctggagatcatcctgatcttctacctgatggtgtcctctgtggtgggcttctacagcctgcgcttctttggaaacttcacccccaagaaggatgacaccaccatgaccaagatcatcggcaactgtgtgtccatcctggtgctgagcagcgccctgcctgtgatgagcaggaccctgggcctgcacaagctgcacctgcccaacaccagccgggacagcgagacagccaagcccagcgtgaatggccaccagaaggccctgtag

SEQ ID NO: 269738 - DNA, 1363 bp, Artificial Sequence
  derived and/or modified sequence
ggcgcggcggcgggcatgaaggaggatggaagggcaggacgaggtgtcggcgcgggagcagcacttccacagccaagtgcgggagtccacgatatgtttccttctttttgccattctctacgttgtttcctacttcatcatcacaagatacaagagaaaatcagatgaacaagaagatgaagatgccatcgtcaacaggatttcgttgtttttgagcacgttcactctcgcagtgtcagctggggctgttttgcttttacccttctcaatcatcagcaatgaaatcctgctttcttttcctcagaactactatattcagtggctaaatggctccctgattcatggtttgtggaatcttgcttcccttttttccaacctttgtttatttgtattgatgccctttgcctttttctttctggaatcagaaggctttgctggcctgaaaaagggaatccgagcccgcattttagagactttggtcatgcttcttcttcttgcgttactcattcttgggatagtgtgggtagcttcagcactcattgacaacgatgccgcaagcatggaatctttatatgatctctgggagttctatctaccctatttatattcctgtatatcattgatgggatgtttgttacttctcttgtgtacaccagttggcctttctcgtatgttcacagtgatgggtcagttgctagtgaagccaacaattcttgaagacctggatgaacaaatttatatcattaccttagaggaagaagcactccagagacgactaaatgggctgtcttcatcggtggaatacaacataatggagttggaacaagaacttgaaaatgtaaagactcttaagacaaaattagagaggcgaaaaaaggcttcagcatgggaaagaaatttggtgtatcccgctgttatggttctccttcttattgagacatccatctcggtcctcttggtggcttgtaatattctttgcctattggttgatgaaacagcaatgccaaaaggaacaagggggcctggaataggaaatgcctctctttctacgtttggttttgtgggagctgcgcttgaaatcattttgattttctatcttatggtgtcctctgttgtcggcttctatagccttcgattttttggaaactttactcccaagaaagatgacacaactatgacaaagatcattggaaattgtgtgtccatcttggttttgagctctgctctgcctgtgatgtcgagaacactggggcttcataaacttcacttaccaaatacttcaagggattcagaaacagcctcagtgatgacctcgtctgccagggacacaggttttcatcatttacaggctcttatgtgctag

SEQ ID NO: 269739 - DNA, 3628 bp, Artificial Sequence
  derived and/or modified sequence
ggtttgtggaatcttgcttcccttttttccaacctttgtttatttgtattgatgccctttgcctttttctttctggaatcagaaggctttgctggcctgaaaaaggagggcaagatgtccaggcaaaaccttgtttaaatgttcatcaccatagaaacatgacagcttctccatagagcttttggaatccgagcccgcattttagagactttggtcatgcttcttcttcttgcgttactcattcttgggatagtgtgggtagcttcagcactcattgacaacgatgccgcaagcatggaatctttatatgatctctgggagttctatctaccctatttatattcctgtatatcattgatgggatgtttgttacttctcttgtgtacaccagttggcctttctcgtatgttcacagtgatgggtcagttgctagtgaagccaacaattcttgaagacctggatgaacaaatttatatcattaccttagaggaagaagcactccagagacgactaaatgggctgtcttcatcggtggaatacaacataatggagttggaacaagaacttgaaaatgtaaagactcttaagacaaaattagagaggcgaaaaaaggcttcagcatgggaaagaaatttggtgtatcccgctgttatggttctccttcttattgagacatccatctcggtcctcttggtggcttgtaatattctttgcctattggttgatgaaacagcaatgccaaaaggaacaagggggcctggaataggaaatgcctctctttctacgtttggttttgtgggagctgcgcttgaaatcattttgattttctatcttatggtgtcctctgttgtcggcttctatagccttcgattttttggaaactttactcccaagaaagatgacacaactatgacaaagatcattggaaattgtgtgtccatcttggttttgagctctgctctgcctgtgatgtcgagaacactggggcttcataaacttcacttaccaaatacttcaagggattcagaaacagccaagccttctgtaaatgggcatcagaaagcactgtgagacgcacagacggcgtcttctgccaccaagagacccgagaactccagattcacgacattcctgtcccatgtagaagcatttccattcaaccgtggcccctcttcagaacctagacctatcagtgccatttttttttcataatctacgaagaacttggctatggctgatcttttttaaatttaactttctgatggaccctgtagtttccagttaagtgcagattccttacagacatatagaacagcgcattcttctgtagacatttgctcatgttggtaaatacaatcacccatatgaaaaaattgttttcacctgatatgaaaatgttagaaaaggcaaactccgggacttctaaagatttacttaaatcccattatgtactttattcagaatgtagaagctgacttgaaaggcatccttggtactaagtgaagcttattcagaaaatgcatttttcaaatgcaatggcaactgcttgtagatatcatttttgcagtgtatgttggagctgtaatggttgcaattatgtttcttatttccttaaaagcaaaaagcgtagtttctgatttatgttatagaatgatactgattagactttgagccaaggggaaaatactaaattcttttaaacctggagccttagagagccacaggaatatcttctgttgtacagtctaataagctgtggtaggaagtatcatgtaatcacagtttaatgacagtttatgtatatatataattcagtattccctctgataacatagttgccagtgtttaatacacttgtaacttggatttttaccttataggctatatgtatactcagttttttaaagcatttttttcagagatcacttaattccccatgcttctgcaatgcatataaaaactataaatgccgagtggtagaaactcctctttcttcatagtcctcaggctttggttacatttgcatatgccatttgaagcctccagcttttaccagtttaacatccaaagttcacagcatcagcattcatggtgtaagaacagttttgcagtataacacgatctgataatcattcagttattaaattgtaaataattattgggatggtttcttggctttaagtccactgaataaaaactatgaaattgcactctgtgtcaaccatccactaggatagaataccgaaatctgtgcatgcaaaaataggagatgggcccatttgcacacaattcgtagttatgcagtctgctatataaatatgttcacatgcactgtgtgtatgaaaatagatggtctgtgttcagacaaaagtaaaacatttttttcaaattgttacatttaaaggttttctgggagaaatttatgaaacgcaggctgtgtctatttgacatcagaaatttccactttaaaccaaaataataagaaactttaatctgtatatttacaacctttgttgagtacacttcccccttatttatacgtctgcatttccttccgagcttcacatctttctaaaatgcagcttggttttaaaataaaagaacattcattttgtgattctaaacaagcttcagtaaataccaccagtatagtactggtgaatttctcagcataaaatcgacatacctaaaaagttaataaaattcagctcttttccaatttcattgttatgcctattgaagtattaattgccaggtttgatttttagtgaagcttggagtccatactttgagcagaccaagtgaagggaagaacagaaagaaactcaggagtagagtaatatcacttctcacttacaccactttcaggcacatccaaagagttcctagatacttggaaaatgtctgaaaatttttaagtaaaatactaaacttttcagtgtttagctcaactttttgttcatttggaagtttctctccatccgaggacttaagccagttttggatttgtaagccctgagtacaatacacttcctggaggcatcctcactgctgttgaagcaaaggatatgcatggggtggaaggacggcttcgaacctgggactcatatgccttgagaacaaatagattgttacagccttgggctgctgcgtaatcacggttcctcgaggctcttcctgagcacatgcccaagcatctgcctctggagagactgactccaaatgcaggtgcttccattggagctaggtcggaggctgctttatatgacgaactccagaaatggatgccagaatacggaggccaaacgttctgagtcctggtaaggacagtcgctctgggggtcctcattttactgcagttcctgcacgccagtgaaagagaggagatagaccctggaaggcagagctgcagatgctcatcatcaggtcaattctggagctacagttttgtttctgactggatagggatgcaccagtgactgtcacatcaagcagtccttttattctctctcctttagtatcgattttaaagggcattaggcactatggttccagagtttcttggggaaaacttgcagattcttattaattggttctgcaatacttaaataaattattttacaattat

SEQ ID NO: 269740 - DNA, 1942 bp, Artificial Sequence
  derived and/or modified sequence
agagctgctcgtctgaggctgctgaggcgacggccggtgtcgtggtcgcggtacctgttccaacacggctcgcgggcccgtgccggctccggtccccggcgcggctgtccgagcccctgcggcgggcggacgatggtgtggcggagcacgcggacgcgggcggcgcggcggcgggcatgaaggaggatggaagggcaggacgaggtgtcggcgcgggagcagcacttccacagccaagtgcgggagtccacgatgaacaagaagatgaagatgccatcgtcaacaggatttcgttgtttttgagcacgttcactctcgcagtgtcagctggggctgttttgcttttacccttctcaatcatcagcaatgaaatcctgctttcttttcctcagaactactatattcagtggctaaatggctccctgattcatggtttgtggaatcttgcttcccttttttccaacctttgtttatttgtattgatgccctttgcctttttctttctggaatcagaaggctttgctggcctgaaaaagggaatccgagcccgcattttagagactttggtcatgcttcttcttcttgcgttactcattcttgggatagtgtgggtagcttcagcactcattgacaacgatgccgcaagcatggaatctttatatgatctctgggagttctatctaccctatttatattcctgtatatcattgatgggatgtttgttacttctcttgtgtacaccagttggcctttctcgtatgttcacagtgatgggtcagttgctagtgaagccaacaattcttgaagacctggatgaacaaatttatatcattaccttagaggaagaagcactccagagacgactaaatgggctgtcttcatcggtggaatacaacataatggagttggaacaagaacttgaaaatgtaaagactcttaagacaaaattagagaggcgaaaaaaggcttcagcatgggaaagaaatttggtgtatcccgctgttatggttctccttcttattgagacatccatctcggtcctcttggtggcttgtaatattctttgcctattggttgatgaaacagcaatgccaaaaggaacaagggggcctggaataggaaatgcctctctttctacgtttggttttgtgggagctgcgcttgaaatcattttgattttctatcttatggtgtcctctgttgtcggcttctatagccttcgattttttggaaactttactcccaagaaagatgacacaactatgacaaagatcattggaaattgtgtgtccatcttggttttgagctctgctctgcctgtgatgtcgagaacactggggcttcataaacttcacttaccaaatacttcaagggattcagaaacagccaagccttctgtaaatgggcatcagaaagcactgtgagacgcacagacggcgtcttctgccaccaagagacccgagaactccagattcacgacattcctgtcccatgtagaagcatttccattcaaccgtggcccctcttcagaacctagacctatcagtgccatttttttttcataatctacgaagaacttggctatggctgatcttttttaaatttaactttctgatggaccctgtagtttccagttaagtgcagattccttacagacatatagaacagcgcattcttctgtagacatttgctcatgttggtaaatacaatcacccatatgaaaaaattgttttcacctgatatgaaaatgttagaaaaggcaaactccgggacttctaaagatttacttaaatcccattatgtactttattcagaatgtagaagctgacttgaaaggcatccttggtactaagtgaagcttattcagaaaatgcatttttcaaatgcaatggcaactgcttgtagatatcatttttgcagtgtatgttggagctgtaatggt

SEQ ID NO: 269741 - DNA, 264 bp, Artificial Sequence
  derived and/or modified sequence
atggtgagcagcgtggtgggcttctacagcctgcggttcttcggcaattttacacccaaaaaagacgacaccacgatgaccaaaatcattggcaattgtgtgagcattctcgtgctgagctccgctctgcctgtgatgtcccgcacactggggctgcacaaattgcatctgcctaacacttccagggacagcgagacagctagcgtgatgacttcctccgcaagggacacgggcttccaccacttgcaagcactgatgtgctag

SEQ ID NO: 269742 - DNA, 855 bp, Artificial Sequence
  derived and/or modified sequence
atgctgctgctgctggccctgctgatcctgggcatcgtgtgggtggcttctgcattaatcgacaacgacgcagcatccatggagtcactatatgacctgtgggaattctacctgccttatctttactcatgcatctctctgatgggatgcctcttgttgcttttgtgcacacccgtaggcctctctcgcatgttcaccgtcatggggcaacttctcgtgaagccgaccatactggaagatctggatgagcaaatatatattattactcttgaggaggaggcattgcaacggaggctcaatggcctgtcatccagtgttgagtacaacattatggagctcgagcaagagctggagaacgtgaagacactgaagactaaactggaaagaagaaaaaaggcgtcagcttgggaaagaaacttggtgtatccagccgtcatggtcttgctgctcattgagacatcgattagtgtgcttctggtcgcctgtaatattctgtgcctgttggtagacgagaccgctatgccaaaagggaccaggggtcccggcattggaaacgcctctttgagtacttttggttttgttggagctgcactcgagatcattcttattttctacctgatggtgagttctgtggttggattctattcactgcggttcttcgggaatttcaccccgaagaaggacgacactacaatgaccaagataataggtaactgtgtctcaatccttgtgctgagctccgctctgccagtaatgtcaaggaccctgggtctccataaacttcacttgccaaacacgtctagggactccgagacagccaagcccagcgttaacgggcaccagaaggccctttag

SEQ ID NO: 269743 - DNA, 1248 bp, Artificial Sequence
  derived and/or modified sequence
atgaaggaggacggccgggccggccggggcgtgggcgccggcgccgccctgcctcagccaagtgccggagttcatgacgagcaagaagatgaggatgccattgttaacagaatttccctattcctgagtacttttacattggccgtttctgccggagctgtgttactcctgccattctccatcatttccaatgaaattctgcttagtttcccacaaaattattatattcagtggctcaatggcagcctgattcacggactgtggaatctagcttccctgttttctaatctttgcctgtttgtccttatgcccttcgctttttttttcctggagtccgagggctttgccggtctcaagaaggggatccgcgcgagaatcctcgagactctcgtcatgttattgcttctggccttactgatactggggatcgtttgggttgcctctgctctgattgacaatgacgcagccagcatggaatctttgtacgatctatgggaattttaccttccatatctgtatagctgcatctccctaatgggatgcctgcttctattactgtgtacccccgttggcctatccagaatgttcactgtgatgggtcaactgctagtgaaaccaaccatattggaggacttggatgagcagatctacatcatcacccttgaggaagaagccctgcaacgcagactgaacgggcttagcagcagtgttgaatacaatatcatggagctcgaacaggagctggagaacgtcaaaacattgaaaaccaagctggagcggcggaagaaagcatctgcgtgggagcgtaatttggtttatccagcagtcatggtgttgctgctaattgagacttctatatctgtcctactggtcgcctgcaatatcttgtgtctgctcgtggacgagacagcaatgcctaaaggaaccagaggccctgggatcgggaacgcatccttaagtacattcggctttgtgggggccgcactcgagatcatcctcatcttctacctgatggtctcatctgtggtcggcttctacagtcttaggtttttcgggaatttcactcctaagaaagatgacacaactatgaccaaaataattgggaactgtgtcagcattcttgtcctgagctctgccttgcctgtgatgtcccgaacattggggctgcataaactgcatctgccgaatacgagcagagactccgaaaccgcaaaaccgagtgtcaatgggcaccaaaaggctctttag

SEQ ID NO: 269744 - DNA, 264 bp, Artificial Sequence
  derived and/or modified sequence
atggtgagtagcgtggtcggcttttattctttgaggttcttcggcaactttacacccaagaaagacgatacaacaatgacaaagataatcggcaactgcgtgtctatacttgttctgagttccgcccttccggttatgagtagaacactcggccttcacaaactgcacctcccaaacacttcacgggatagtgagacagctagtgtgatgacttcctccgcacgggacacaggattccatcacctacaggctttaatgtgctag

SEQ ID NO: 269745 - DNA, 855 bp, Artificial Sequence
  derived and/or modified sequence
atgctgctgttgttagcactgttgattctagggattgtgtgggtggcatcggccctgattgacaacgacgccgcttctatggagagtctgtatgacctgtgggagttttatttgccatatctgtactcatgtatcagtctgatgggctgtttactcttgctcctttgtactccggtcgggctctctagaatgttcacggttatgggacagctgctcgtgaaacctacaatcctagaggatttggacgagcaaatctacataatcacactcgaagaggaggctctgcaaaggcgcctcaatggtctctcatcaagtgtcgaatacaatatcatggagctcgagcaggagctggagaacgtgaagaccttgaagactaagttggagaggaggaaaaaagcctctgcttgggagaggaacctcgtttatccggctgtcatggtcctgctccttatcgagacaagcatctctgttttgctggtagcatgtaatatcctgtgcttactggtagacgaaacagccatgcccaagggcacaagagggcctggcataggaaatgccagcctaagcactttcggctttgtgggcgctgctctcgaaatcatcttaatcttctatttgatggtgtctagtgtcgttggcttttacagcctgcgcttttttggaaacttcactcccaaaaaggatgacacgacaatgactaaaatcataggcaactgcgtcagtattctcgtcttgtccagcgccctgcctgtgatgagccgcacattaggcctccataagctgcaccttcccaatactagtcgggatagcgaaaccgccaagcccagtgttaacggacatcagaaggcgctttag

SEQ ID NO: 269746 - DNA, 1248 bp, Artificial Sequence
  derived and/or modified sequence
atgaaggaagacgggcgtgcgggtaggggagtgggcgcaggcgcagctttgccccagccaagtgcaggggtccacgacgagcaggaagatgaagacgctatagtgaataggatatcattgttcttatcgacgtttacactggctgtgagcgcaggagcggtcctcttacttccttttagcataatcagcaacgaaattcttttatcgtttccacagaattactatatccaatggctcaatgggtctctgattcacgggctgtggaatctcgccagtctgttcagcaacctgtgtctgttcgtcttaatgccattcgcctttttcttccttgagagcgagggttttgctggactcaaaaaggggatccgagctagaatcttagaaacgctggtgatgctgcttttgctggctcttctcattttggggattgtctgggtggcaagtgcactgattgacaacgacgccgcttccatggagtccctgtacgatctatgggaattttacctgccatacttgtatagttgcatctctctgatggggtgcctgctgctgttgctctgtacccccgttgggctcagcagaatgttcaccgtcatggggcagctactggtcaagccaaccatcctggaagatttggacgaacagatttacatcatcaccctcgaagaggaggccttgcagcggagactcaacggactgtcctccagtgtggagtacaacattatggaactggagcaggaactggagaacgtgaaaacactgaaaacaaagctggagaggaggaagaaagccagcgcttgggagcgcaacttagtctatcccgcagtgatggtgctgctcctcattgagacaagcatttcagtcctcctggtggcatgtaatatattgtgcctgctggtggacgagaccgccatgccaaaaggcacacgtggtccagggatcggaaacgctagcctgtctaccttcggctttgtgggagcggcactggagatcatcctgatcttctatttaatggtgtcctcagtggtgggattctattccctaaggttttttgggaacttcactccaaaaaaggacgataccacgatgacaaaaattataggaaactgtgtctctattctagtcctctcctccgctctccccgttatgtcccggaccttaggtttacacaagctgcacttgcccaacacctcacgcgacagcgaaactgctaaaccctcagtgaacggacaccagaaggctttgtag

SEQ ID NO: 269747 - DNA, 264 bp, Artificial Sequence
  derived and/or modified sequence
atggtgagcagcgtggtgggcttctacagcctgagattcttcggcaacttcacccccaagaaggacgacaccaccatgaccaagatcatcggcaactgcgtgagcatcctggtgctgagcagcgccctgcccgtgatgagcagaaccctgggcctgcacaagctgcacctgcccaacaccagcagagacagcgagaccgccagcgtgatgaccagcagcgccagagacaccggcttccaccacctgcaggccctgatgtgctag

SEQ ID NO: 269748 - DNA, 855 bp, Artificial Sequence
  derived and/or modified sequence
atgctgctgctgctggccctgctgatcctgggcatcgtgtgggtggccagcgccctgatcgacaacgacgccgccagcatggagagcctgtacgacctgtgggagttctacctgccctacctgtacagctgcatcagcctgatgggctgcctgctgctgctgctgtgcacccccgtgggcctgagcagaatgttcaccgtgatgggccagctgctggtgaagcccaccatcctggaggacctggacgagcagatctacatcatcaccctggaggaggaggccctgcagagaagactgaacggcctgagcagcagcgtggagtacaacatcatggagctggagcaggagctggagaacgtgaagaccctgaagaccaagctggagagaagaaagaaggccagcgcctgggagagaaacctggtgtaccccgccgtgatggtgctgctgctgatcgagaccagcatcagcgtgctgctggtggcctgcaacatcctgtgcctgctggtggacgagaccgccatgcccaagggcaccagaggccccggcatcggcaacgccagcctgagcaccttcggcttcgtgggcgccgccctggagatcatcctgatcttctacctgatggtgagcagcgtggtgggcttctacagcctgagattcttcggcaacttcacccccaagaaggacgacaccaccatgaccaagatcatcggcaactgcgtgagcatcctggtgctgagcagcgccctgcccgtgatgagcagaaccctgggcctgcacaagctgcacctgcccaacaccagcagagacagcgagaccgccaagcccagcgtgaacggccaccagaaggccctgtag

SEQ ID NO: 269749 - DNA, 1248 bp, Artificial Sequence
  derived and/or modified sequence
atgaaggaggacggcagagccggcagaggcgtgggcgccggcgccgccctgccccagcccagcgccggcgtgcacgacgagcaggaggacgaggacgccatcgtgaacagaatcagcctgttcctgagcaccttcaccctggccgtgagcgccggcgccgtgctgctgctgcccttcagcatcatcagcaacgagatcctgctgagcttcccccagaactactacatccagtggctgaacggcagcctgatccacggcctgtggaacctggccagcctgttcagcaacctgtgcctgttcgtgctgatgcccttcgccttcttcttcctggagagcgagggcttcgccggcctgaagaagggcatcagagccagaatcctggagaccctggtgatgctgctgctgctggccctgctgatcctgggcatcgtgtgggtggccagcgccctgatcgacaacgacgccgccagcatggagagcctgtacgacctgtgggagttctacctgccctacctgtacagctgcatcagcctgatgggctgcctgctgctgctgctgtgcacccccgtgggcctgagcagaatgttcaccgtgatgggccagctgctggtgaagcccaccatcctggaggacctggacgagcagatctacatcatcaccctggaggaggaggccctgcagagaagactgaacggcctgagcagcagcgtggagtacaacatcatggagctggagcaggagctggagaacgtgaagaccctgaagaccaagctggagagaagaaagaaggccagcgcctgggagagaaacctggtgtaccccgccgtgatggtgctgctgctgatcgagaccagcatcagcgtgctgctggtggcctgcaacatcctgtgcctgctggtggacgagaccgccatgcccaagggcaccagaggccccggcatcggcaacgccagcctgagcaccttcggcttcgtgggcgccgccctggagatcatcctgatcttctacctgatggtgagcagcgtggtgggcttctacagcctgagattcttcggcaacttcacccccaagaaggacgacaccaccatgaccaagatcatcggcaactgcgtgagcatcctggtgctgagcagcgccctgcccgtgatgagcagaaccctgggcctgcacaagctgcacctgcccaacaccagcagagacagcgagaccgccaagcccagcgtgaacggccaccagaaggccctgtag

SEQ ID NO: 269750 - protein, 228 aa, Artificial Sequence
  derived and/or modified sequence
MEGQDEVSAREQHFHSQVRESTICFLLFAILYVVSYFIITRYKRKSDEQEDEDAIVNRISLFLSTFTLAVSAGAVLLLPFSIISNEILLSFPQNYYIQWLNGSLIHGLWNLASLFSNLCLFVLMPFAFFFLESEGFAGLKKGIRARILETLVMLLLLALLILGIVWVASALIDNDAASMESLYDLWEFYLPYLYSCISLMGCLLLHLPNTSRDSETAKPSVNGHQKAL

SEQ ID NO: 269751 - DNA, 687 bp, Artificial Sequence
  derived and/or modified sequence
atggaggggcaggatgaagtctccgcaagggagcagcacttccacagtcaggttcgtgagtctaccatttgtttcctgctcttcgcaatattgtatgtggtaagctattttatcatcactcgatacaaacggaagtcggacgagcaagaagatgaggacgcaatcgtcaacagaatatcactgttcctgtccactttcacactggctgtctccgctggtgctgtgctccttctgccgtttagtattatctctaatgaaattctgctctcgttcccccagaactattatattcagtggcttaacggctccctgatacacggtctgtggaacctcgcctctttgttctctaatttgtgcttgttcgttcttatgccattcgccttcttttttctcgagagcgaaggatttgctggcctgaagaagggaatcagagccaggatacttgaaaccctcgtcatgcttctgctcctcgccctgctgatcctgggaatcgtctgggtggcttcagcactgatcgacaacgatgcagccagcatggagtcactgtacgacctgtgggaattctacttaccttatctgtattcttgtataagcctcatgggttgccttctgctgcatttgcctaatacgagcagagacagcgaaacggctaagccgagtgtcaatgggcatcaaaaggccctgtag

SEQ ID NO: 269752 - DNA, 687 bp, Artificial Sequence
  derived and/or modified sequence
atggagggccaggatgaggtgtctgcccgggagcagcacttccacagccaggtgcgggagagcaccatctgcttcctgctgtttgccatcctgtatgtggtgtcctacttcatcatcacccgctacaagaggaagagtgatgagcaggaggatgaagatgccatcgtgaaccgcatcagcctcttcctgagcaccttcaccctggccgtgtctgctggagctgtgctgctgctgcccttcagcatcatcagcaatgagatcctgctgtccttcccccagaactactacatccagtggctgaatggcagcctcatccacggcctgtggaacctggccagcctcttcagcaacctgtgcctgtttgtgctgatgccctttgccttcttcttcctggagagcgagggctttgctggcctgaagaagggcatccgggcccgcatcctggagaccctggtgatgctgctgctgctggccctgctgatcctgggcatcgtgtgggtggccagcgccctgattgacaatgatgctgcctccatggagagcctgtatgacctgtgggagttctacctgccctacctgtacagctgcatcagcctgatgggctgcctgctgctgcacctgcccaacaccagccgggacagcgagacagccaagcccagcgtgaatggccaccagaaggccctgtag

SEQ ID NO: 269753 - DNA, 841 bp, Artificial Sequence
  derived and/or modified sequence
gccggtgtcgtggtcgcggtacctgttccaacacggctcgcgggcccgtgccggctccggtccccggcgcggctgtccgagcccctgcggcgggcggacgatggtgtggcggagcacgcggacgcgggcggcgcggcggcgggcatgaaggaggatggaagggcaggacgaggtgtcggcgcgggagcagcacttccacagccaagtgcgggagtccacgatatgtttccttctttttgccattctctacgttgtttcctacttcatcatcacaagatacaagagaaaatcagatgaacaagaagatgaagatgccatcgtcaacaggatttcgttgtttttgagcacgttcactctcgcagtgtcagctggggctgttttgcttttacccttctcaatcatcagcaatgaaatcctgctttcttttcctcagaactactatattcagtggctaaatggctccctgattcatggtttgtggaatcttgcttcccttttttccaacctttgtttatttgtattgatgccctttgcctttttctttctggaatcagaaggctttgctggcctgaaaaagggaatccgagcccgcattttagagactttggtcatgcttcttcttcttgcgttactcattcttgggatagtgtgggtagcttcagcactcattgacaacgatgccgcaagcatggaatctttatatgatctctgggagttctatctaccctatttatattcctgtatatcattgatgggatgtttgttacttcacttaccaaatacttcaagggattcagaaacagccaagccttctgtaaatgggcatcagaaagcactgtga

SEQ ID NO: 269754 - DNA, 687 bp, Artificial Sequence
  derived and/or modified sequence
atggagggccaggacgaggtgagcgcccgggagcagcacttccacagtcaggtacgcgagagcactatttgttttctcctgtttgcaatcttatatgtcgtgagctattttataatcactagatataagcgcaagagtgatgaacaggaggacgaggacgcaattgtcaataggatctctttgttcctctcaaccttcacccttgcagtgtccgcaggagccgtattgctgttgcccttttctatcatctcaaacgagatcctcctgtccttccctcaaaattattacattcagtggctgaacggcagtctgatacatggcctttggaatttagcttccctgttcagcaacctgtgcctgtttgttctgatgcctttcgcatttttttttttggagagcgaaggcttcgccggcctgaagaaaggtatcagggctaggattctggagacattggttatgcttcttttgctcgctctcttaatcctgggaatcgtgtgggtggcctccgctctgatcgacaacgatgcagcaagcatggaatccctgtacgatctgtgggagttttatctgccatacctgtactcctgcatctcattaatgggatgtctcctgctccatctgcctaacacatccagggatagtgagacagcaaagccgtctgttaatggccaccaaaaagccctgtag

SEQ ID NO: 269755 - DNA, 687 bp, Artificial Sequence
  derived and/or modified sequence
atggaagggcaggacgaggtgtccgctcgcgagcagcacttccactcacaggttcgagagagtaccatctgctttcttttgttcgctatcctctacgtggttagctacttcatcattacccggtataagagaaagtctgacgagcaagaagacgaagacgcaatcgtaaacaggataagcctattcttgtctacctttaccctggccgtgagcgctggcgctgttctgctcctgccatttagcataatttctaatgagatccttctgagtttcccccagaactattatattcagtggctaaacggctcacttattcacggactctggaatttggccagtttgttctctaacctttgtctcttcgtgctaatgccctttgcatttttctttctggagtcagaaggcttcgcgggactgaagaagggaataagggcccgaatcctggaaacgttagtgatgttgctattgctggccttgctgattctcggcatcgtgtgggtcgcaagtgcattgatcgacaatgacgccgcttcaatggaatctctatatgacctatgggagttttacctaccatacctctatagttgcatctccttgatgggctgcctattgctccacctgccgaatacaagtagggatagtgaaactgcaaagccctctgttaacggccaccagaaagcgctgtag

SEQ ID NO: 269756 - DNA, 687 bp, Artificial Sequence
  derived and/or modified sequence
atggagggccaggacgaggtgagcgccagagagcagcacttccacagccaggtgagagagagcaccatctgcttcctgctgttcgccatcctgtacgtggtgagctacttcatcatcaccagatacaagagaaagagcgacgagcaggaggacgaggacgccatcgtgaacagaatcagcctgttcctgagcaccttcaccctggccgtgagcgccggcgccgtgctgctgctgcccttcagcatcatcagcaacgagatcctgctgagcttcccccagaactactacatccagtggctgaacggcagcctgatccacggcctgtggaacctggccagcctgttcagcaacctgtgcctgttcgtgctgatgcccttcgccttcttcttcctggagagcgagggcttcgccggcctgaagaagggcatcagagccagaatcctggagaccctggtgatgctgctgctgctggccctgctgatcctgggcatcgtgtgggtggccagcgccctgatcgacaacgacgccgccagcatggagagcctgtacgacctgtgggagttctacctgccctacctgtacagctgcatcagcctgatgggctgcctgctgctgcacctgcccaacaccagcagagacagcgagaccgccaagcccagcgtgaacggccaccagaaggccctgtag

SEQ ID NO: 269757 - protein, 404 aa, Artificial Sequence
  derived and/or modified sequence
MFSFEGDFKTRPKVSLGGASRKYSIQRSAFDRCATLSQSGGAFPIANGPNLTLLVRQLLFFYKQNEDSKRLIWLYQNLIKHSSLFVKQLDGSERLTCLFQIKRLMSLCCRLLQNCNDDSLNVALPMRMLEVFSSENTYLPVLQDASYVVSVIEQILHYMIHNGYYRSLYLLINSKLPSSIEYSDLSRVPIAKILLENVLKPLHFTYNSCPEGARQQVFTAFTEEFLAAPFTDQIFHFIIPALADAQTVFPYEPFLNALLLIESRCSRKSGGAPWLFYFVLTVGENYLGALSEEGLLVYLRVLQTFLSQLPVSPASASCHDSASDSEEESEEADKPSSPEDGRLSVSYITEECLKKLDTKQQTNTLLNLVWRDSASEEVFTTMASVCHTLMVQHRMMVPKVRVYK

SEQ ID NO: 269758 - DNA, 1215 bp, Artificial Sequence
  derived and/or modified sequence
atgttcagcttcgagggcgacttcaagaccagacccaaggtgagcctgggcggcgccagcagaaagtacagcatccagagaagcgccttcgacagatgcgccaccctgagccagagcggcggcgccttccccatcgccaacggccccaacctgaccctgctggtgagacagctgctgttcttctacaagcagaacgaggacagcaagagactgatctggctgtaccagaacctgatcaagcacagcagcctgttcgtgaagcagctggacggcagcgagagactgacctgcctgttccagatcaagagactgatgagcctgtgctgcagactgctgcagaactgcaacgacgacagcctgaacgtggccctgcccatgagaatgctggaggtgttcagcagcgagaacacctacctgcccgtgctgcaggacgccagctacgtggtgagcgtgatcgagcagatcctgcactacatgatccacaacggctactacagaagcctgtacctgctgatcaacagcaagctgcccagcagcatcgagtacagcgacctgagcagagtgcccatcgccaagatcctgctggagaacgtgctgaagcccctgcacttcacctacaacagctgccccgagggcgccagacagcaggtgttcaccgccttcaccgaggagttcctggccgcccccttcaccgaccagatcttccacttcatcatccccgccctggccgacgcccagaccgtgttcccctacgagcccttcctgaacgccctgctgctgatcgagagcagatgcagcagaaagagcggcggcgccccctggctgttctacttcgtgctgaccgtgggcgagaactacctgggcgccctgagcgaggagggcctgctggtgtacctgagagtgctgcagaccttcctgagccagctgcccgtgagccccgccagcgccagctgccacgacagcgccagcgacagcgaggaggagagcgaggaggccgacaagcccagcagccccgaggacggcagactgagcgtgagctacatcaccgaggagtgcctgaagaagctggacaccaagcagcagaccaacaccctgctgaacctggtgtggagagacagcgccagcgaggaggtgttcaccaccatggccagcgtgtgccacaccctgatggtgcagcacagaatgatggtgcccaaggtgagagtgtacaagtag

SEQ ID NO: 269759 - DNA, 1215 bp, Artificial Sequence
  derived and/or modified sequence
atgttctcgttcgagggagactttaagacaagaccgaaggttagcctcggcggggcttcccgaaaatattcgatacagcggagtgcctttgaccgatgcgctacgctctcccagtctggaggagcctttccaatcgctaacggccctaacttgaccttactcgttcgacagctactgttcttttataagcagaacgaggattcaaagcggctgatctggctgtatcagaacctcatcaagcatagtagcctgtttgtaaaacaattggacggcagtgagcgcctgacttgccttttccagattaaacgcctaatgagtctgtgttgccgtctactccaaaactgtaatgacgattcgttgaacgtggcgcttccaatgcgtatgctcgaggtcttttccagcgagaacacttatttgcctgtgctgcaagatgcaagttatgtggtctctgttatcgagcagatcctgcactacatgatacataacggttactaccgcagcttgtacttgctgattaattcaaagctgcccagcagcattgagtacagcgatctgtcccgcgtgcccatcgccaagattttgcttgagaatgtgttgaagccccttcacttcacatataacagttgtccagagggcgccagacaacaggttttcaccgccttcactgaggagtttttggccgccccattcaccgatcaaattttccatttcatcatcccagcgctggcagacgctcagactgtttttccttatgagcccttcctgaatgccctgctcctaatcgaatctaggtgttctaggaagtccggcggagccccctggctgttctattttgtgctgacagtgggggaaaattacctcggggcgctctcggaggaggggttattggtgtacctcagagtcctgcagacgtttttgtcccaactcccggtgtcacccgcatccgcatcttgtcacgatagcgcgagcgactcagaagaagagtcggaagaagcggacaaaccctcatccccagaggacggtcggctgagcgtcagctatataacagaagaatgcctcaagaagttggataccaagcagcaaactaacaccctcctaaacctagtgtggcgcgatagtgcctctgaggaagtgtttaccacaatggctagcgtgtgccacactctgatggtacagcacagaatgatggtgcccaaggtgagggtgtacaagtag

SEQ ID NO: 269760 - DNA, 1215 bp, Artificial Sequence
  derived and/or modified sequence
atgttctcctttgaaggagacttcaagacccggcccaaggtgtccctgggcggggccagcaggaagtacagcatccagaggtctgcctttgacagatgtgccaccctgagccagagcggcggggccttccccatcgccaacggccccaacctgaccctgctggtgcggcagctgctcttcttctacaagcagaatgaagacagcaagaggctcatctggctgtaccagaacctgatcaagcacagcagcctgtttgtgaagcagctggatggcagcgagcggctgacctgcctcttccagatcaagaggctgatgagcctgtgctgccgcctgctgcagaactgcaatgatgacagcctgaatgtggccctgcccatgaggatgctggaggtgttcagcagcgagaacacctacctgcctgtgctgcaggatgccagctatgtggtgtctgtcatcgagcagatcctgcactacatgatccacaacggctactaccgcagcctgtacctgctgatcaacagcaagctgcccagcagcattgagtacagcgacctgagccgggtgcccatcgccaagatcctgctggagaatgtgctgaagcccctgcacttcacctacaacagctgcccagagggcgcccggcagcaggtgttcaccgccttcacagaggagttcctggccgcccccttcacagaccagatcttccacttcatcatcccagccctggctgatgcccagacagtgttcccctatgagcccttcctgaatgccctgctgctgattgagagccgctgcagcaggaagtctggaggagccccctggctgttctactttgtgctgactgtgggggagaactacctgggcgccctgtctgaggagggcctgctggtgtacctgcgggtgctgcagaccttcctgagccagctgcctgtgtccccagccagcgccagctgccatgattctgccagtgacagcgaggaggagagcgaggaggccgacaagcccagcagcccagaagatggccgcctgtctgtgtcctacatcacagaagaatgtctgaagaagctggacaccaagcagcagaccaacaccctgctgaacctggtgtggagggacagcgccagcgaggaggtgttcaccaccatggcctctgtgtgccacaccctgatggtgcagcacaggatgatggtgcccaaggtgcgggtgtacaagtag

SEQ ID NO: 269761 - DNA, 1215 bp, Artificial Sequence
  derived and/or modified sequence
atgttcagcttcgagggcgacttcaagacccggcccaaggtgagcctaggcggagcctctaggaagtactccattcagcgaagtgcgtttgaccggtgcgcgacactgtctcagtccggaggggcgttcccaattgcaaacgggcctaacctaacactgttggtgaggcagctcctcttcttctacaagcagaatgaggactcgaagcggctgatttggctgtaccaaaatctcatcaagcacagttcccttttcgtgaaacagctggacgggtctgaacgtctgacctgtctgtttcagatcaagcggttgatgagcctctgctgcagacttctgcaaaactgcaacgacgactctcttaacgttgctttgccaatgagaatgctggaggttttctcctctgaaaatacctatctgccagtcctgcaggatgcctcgtacgtcgtgtcagttatcgaacagatactacactatatgatccataacggatactacagaagcttatatttattaatcaacagcaagttacctagctccattgagtattcagatctgtctcgggtcccaatcgccaagattctactggagaatgtcttgaaacctcttcattttacgtacaactcctgccccgaaggagcacgccagcaagtcttcaccgcgtttaccgaggaattccttgccgctcctttcaccgaccaaatcttccacttcatcattccagctcttgcagatgcccaaacagtgtttccctacgagcctttcctcaatgcgctgctgcttatcgaatcccgatgtagccggaagagcgggggagcaccgtggctattttacttcgtgctgactgtgggtgagaattacctgggagccttgtctgaagaaggcctgttagtgtatctcagggtgctccagaccttcttgagccagctgcccgtgagccccgccagtgcatcctgtcatgactctgctagtgacagcgaagaggagtccgaggaggcagataaaccttcctcacccgaggatgggcggcttagcgtctcttatatcaccgaggagtgcctcaagaagctcgacacaaagcaacaaactaacaccctcttgaacttggtgtggagagattccgccagcgaagaagtgttcacaacaatggccagtgtttgccacactttgatggtccaacacaggatgatggtccctaaggtcagagtttacaagtag

SEQ ID NO: 269762 - DNA, 1215 bp, Artificial Sequence
  derived and/or modified sequence
atgttcagttttgagggggatttcaagacaagacccaaggtttccctgggcggagcaagcagaaagtattctattcagcgttccgctttcgatcggtgcgccacactgagtcagagtggcggagcctttccaatcgctaatggtccaaatcttacgctgctggtgagacagcttttgttcttttacaagcagaatgaagatagtaagcgactcatctggctgtatcagaacctgataaagcactcatccctgtttgtcaagcagttagacggatccgagcggttaacatgcttgttccagattaaacggcttatgagtctgtgctgtcgattgctccagaattgcaacgacgatagtctaaatgttgcacttcccatgagaatgttggaggtgttctctagcgaaaatacctacctacccgtcttacaggacgccagctatgtggtctcagtcatcgagcaaattctgcactacatgatccacaatgggtactaccgaagtctttaccttctaatcaattctaagctaccttcttccatcgagtatagcgaccttagtagagtgcccatcgcaaaaatcctactagaaaacgttcttaagcccctccactttacatataattcctgccctgagggtgcccgacaacaagttttcacagcgtttacagaggaatttctcgcggcaccatttacagaccagattttccacttcattattccagcccttgccgatgcccagacagtctttccatatgaaccattcctgaatgctctgctactcatcgaatcgcgctgtagtagaaagtctggtggtgctccgtggctgttctattttgttctgactgtgggcgaaaactatcttggcgcactatcagaagaagggctccttgtgtacctcagggttctccagacttttctttcccaactcccggtaagccccgcttccgctagctgccacgactcagcttccgactctgaggaggaatccgaggaggctgataaaccatcaagcccagaagatggcaggttgtcggttagttacataaccgaagagtgtttaaaaaagctcgacacaaagcagcagacgaatacattgctgaacctcgtgtggcgcgattcagcatccgaggaggttttcaccacaatggcctctgtgtgccacaccctgatggtccaacaccgcatgatggtgccgaaggttcgggtgtacaagtag

SEQ ID NO: 269763 - DNA, 1626 bp, Artificial Sequence
  derived and/or modified sequence
cctcccagcccgccccgtgccccgcccgcccggctgcttccgcggcggcgctgcccgcacatgggctaggctgccaggatgttcagcttcgaaggcgacttcaagacgcggcccaaggtgtcccttggcggcgcgagcaggaagtattccatccaaagaagtgcatttgatcgctgtgctaccttgtcacagtccgggggcgcttttcccattgctaatggccccaaccttacccttttggtaaggcagcttctgtttttttacaaacaaaatgaagactcaaaacgtttgatatggctgtatcagaacttaattaaacacagctctctgtttgtcaagcagttggatggatctgagagacttacatgcttatttcagataaaaagattgatgagcctctgttgcaggttgctgcaaaactgtaatgatgacagtttgaatgttgcacttccaatgagaatgcttgaagtattttcgtctgagaatacttacttgcctgttttacaagatgctagctatgtggtgtcagtgattgaacaaattttgcactacatgattcacaatgggtattataggtctctatatttgttgattaacagcaagcttccatcaagtattgaatattctgatttatctcgagttcctatagcaaaaattttgctagagaatgttctaaaaccattgcactttacttacaactcctgtccggaaggtgcgaggcaacaagtttttacagccttcacagaggagtttctggcagcaccttttacagatcagatttttcatttcatcattccggcgcttgcagatgcgcagaccgttttcccttacgagccctttctgaatgcactgttgttaatagagagtagatgttcaagaaagagtggtggagcaccctggcttttctatttcgttttaactgttggcgaaaattatttgggggccctctctgaggaagggctgctggtgtatttgcgggtgctgcagaccttcctctctcagttaccagtctctcctgccagcgcgagctgtcacgactcagccagtgactctgaggaggagagtgaagaagccgacaagccctcaagcccggaggatggcagactgtcagtatcatacataacagaggaatgcctgaagaagctggacacaaagcagcagaccaacaccctgctcaacctggtgtggagggactctgcgagcgaggaggtcttcaccaccatggcctccgtctgccacacgctgatggtgcagcaccgcatgatggtacccaaagtcagggtgtacaaatgaatgtggagacctttgtaccctgacatggaaagatttccgagacagatgcgtacatgaaaaccgggaagacacaggacagtatgtagaagaaccggcttttcctataagaaggatggaaaaaataggaatatatattcatattgcataaagaaacttggaagcatatacaagaaactcatgaaagtgaacactcgtgtctgaatatgccgaggaagctggggctggagcagaagtgctcttctgagtacactatttttatatcacttttaagttttggattaggtgaatgacttaatattttaaaattggttaagtaataaatgaattgccagc

SEQ ID NO: 269764 - protein, 206 aa, Artificial Sequence
  derived and/or modified sequence
MECLYYFLGFLLLAARLPLDAAKRFHDVLGNERPSAYMREHNQLNGWSSDENDWNEKLYPVWKRGDMRWKNSWKGGRVQAVLTSDSPALVGSNITFAVNLIFPRCQKEDANGNIVYEKNCRNEAGLSADPYVYNWTAWSEDSDGENGTGQSHHNVFPDGKPFPHHPGWRRWNFIYVFHTLGWLLQTPKLLLYLSLKFQPSLFLLYN

SEQ ID NO: 269765 - DNA, 621 bp, Artificial Sequence
  derived and/or modified sequence
atggagtgcctgtactacttcctgggcttcctgctgctggccgccagactgcccctggacgccgccaagagattccacgacgtgctgggcaacgagagacccagcgcctacatgagagagcacaaccagctgaacggctggagcagcgacgagaacgactggaacgagaagctgtaccccgtgtggaagagaggcgacatgagatggaagaacagctggaagggcggcagagtgcaggccgtgctgaccagcgacagccccgccctggtgggcagcaacatcaccttcgccgtgaacctgatcttccccagatgccagaaggaggacgccaacggcaacatcgtgtacgagaagaactgcagaaacgaggccggcctgagcgccgacccctacgtgtacaactggaccgcctggagcgaggacagcgacggcgagaacggcaccggccagagccaccacaacgtgttccccgacggcaagcccttcccccaccaccccggctggagaagatggaacttcatctacgtgttccacaccctgggctggctgctgcagacccccaagctgctgctgtacctgagcctgaagttccagcccagcctgttcctgctgtacaactag

SEQ ID NO: 269766 - DNA, 1673 bp, Artificial Sequence
  derived and/or modified sequence
ccatcacatgatcctccccgaggccctgtatttaattaaaatagagagggaggcaccacagatgccagaagaacactgttgctcttggtggacgggcccagaggaattcagagttaaaccttgagtgcctgcgtccgtgagaattcagcatggaatgtctctactatttcctgggatttctgctcctggctgcaagattgccacttgatgccgccaaacgatttcatgatgtgctgggcaatgaaagaccttctgcttacatgagggagcacaatcaattaaatggctggtcttctgatgaaaatgactggaatgaaaaactctacccagtgtggaagcggggagacatgaggtggaaaaactcctggaagggaggccgtgtgcaggcggtcctgaccagtgactcaccagccctcgtgggctcaaatataacatttgcggtgaacctgatattccctagatgccaaaaggaagatgccaatggcaacatagtctatgagaagaactgcagaaatgaggctggtttatctgctgatccgtatgtttacaactggacagcatggtcagaggacagtgacggggaaaatggcaccggccaaagccatcataacgtcttccctgatgggaaaccttttcctcaccaccccggatggagaagatggaatttcatctacgtcttccacacacttggttggcttttacaaacccctaagcttcttctttacctttccttaaaatttcaaccttctcttttcttactctataattgagaatgataacacagagagttaataacagtcaccctgctaactttccttagcatgagtgaacagtgagagataaaaatgaaatcttggttaaccttgccaaatctccaggacaccgaagagttaaaaagagagaaaaacaaaaagattaagctctttttcaaaaaaacaaaaccacttaatttttttctacctaaaaccataacaagaaaaaatgctaacacttatttatttgaatggcacatggagaccgggcatgtggctcacacttgtaatcccagcaccttggaaggcggaggcgggtggatcacctgaagtcaggagttcaagaccagcctggccaacatggtgaagtcccgtccctactaaaaatacaaaaattagccaggtgtggtggtgcgcacctgtaatcccagctactcaggaggctgaggcaggagaatcacttgaatccgggaggtggaggttgcagtgagaggagattgagccattgcactccagcctgggcaacagagtgagactccatctcgaaaaacaaacaaacaaacaaaaaacagaatggcacattgatgagcattcattgattgattctttagtttttttatgttctctaaagaatttttaagatttaaagaagcatgtgctatttatttgtaggaaatcctcagaaaaggtacaaataaaaaataaaaattatccataattaataccagagattataattgttaattattatggtgttttctttgctagtatttaagatcattattaagatcacatacacatttttgcttactatcattagcatttgatgatatgatttttttaatttttatacattgttttaatggctgcacgatatttcattgtgtacaaataaaataactactgttccgctttgaccta

SEQ ID NO: 269767 - DNA, 621 bp, Artificial Sequence
  derived and/or modified sequence
atggagtgcctgtactatttcctaggtttccttttattggccgcacggcttcccctcgacgccgccaagaggtttcacgatgtactcggcaatgaacggccttcagcttatatgagggagcacaaccagcttaacggatggagcagcgatgagaacgattggaatgaaaagctctaccccgtctggaaaaggggggatatgaggtggaagaactcgtggaagggtggaagggtgcaggccgtgctcacatccgattctcctgccttggtgggcagcaatataactttcgcggttaacctcatcttcccacgttgccagaaagaagatgccaacggcaatatcgtttacgaaaagaactgtcggaatgaggccgggctgagcgcagacccatacgtctacaactggacagcatggagcgaagactctgatggcgagaacggtacaggtcagagtcatcacaatgtgttccccgatggaaagccctttcctcatcatcctggctggcggcgctggaacttcatctatgtgttccacacacttggctggctgctgcagaccccaaagttactcctctatctgtccctgaagtttcaaccatcgctcttcctcctttataactag

SEQ ID NO: 269768 - DNA, 621 bp, Artificial Sequence
  derived and/or modified sequence
atggagtgcctgtactacttcctgggcttcctgctgctggccgcccggctgcccctggatgctgccaagcgcttccatgatgtgctgggcaatgaaagaccttctgcctacatgagggagcacaaccagctgaatggctggagcagtgatgaaaatgactggaatgagaagctgtaccctgtgtggaagagaggagacatgcgctggaagaacagctggaagggcggccgggtgcaggccgtgctgaccagtgacagccctgccctggtgggcagcaacatcacctttgctgtgaacctgatcttcccccgctgccagaaggaggatgccaatggaaacatcgtgtatgagaagaactgcagaaatgaggccggcctgtctgctgacccctacgtgtacaactggacagcctggagcgaggacagtgatggagaaaatggcaccggccagagccaccacaacgtgtttcctgatggcaagcccttcccccaccaccctggctggaggcgctggaacttcatctacgtgttccacaccctgggctggctgctgcagacccccaagctgctgctgtacctgagcctgaagttccagcccagcctcttcctgctgtacaactag

SEQ ID NO: 269769 - DNA, 621 bp, Artificial Sequence
  derived and/or modified sequence
atggagtgcctgtactacttcctgggcttcctgctgctggccgccagacttccgcttgatgcagctaagcgttttcacgatgtgctgggcaatgagcggccgagtgcttatatgcgtgaacacaaccagctgaacggatggtccagtgatgagaacgattggaacgaaaagttgtacccagtgtggaaaagaggagacatgcggtggaagaatagctggaagggggggagggtgcaggccgtattaacatcagatagtcctgcactcgtgggatccaacattacatttgcagtcaacctcatttttccgcggtgtcagaaagaagacgcaaacggcaacatcgtgtacgaaaaaaactgccgcaacgaggcgggtttgtccgccgatccttatgtgtacaactggaccgcctggtctgaggacagtgacggggaaaacggaacggggcagtcccaccataatgtctttccggacggcaaacctttcccccatcacccagggtggcgccggtggaactttatctatgtgtttcacacactcggttggcttttgcagacccctaagttgctcctctatctctcactgaaattccaacccagcttgttcctgctgtataattag

SEQ ID NO: 269770 - DNA, 621 bp, Artificial Sequence
  derived and/or modified sequence
atggaatgcttatattactttttaggatttctcctcctggctgccaggctgccactcgatgctgccaaaagatttcacgatgtgttagggaacgagcgtccttccgcttatatgcgagaacataaccaacttaacggctggagctcagacgagaacgactggaatgagaaactttatcctgtatggaagagaggggatatgcggtggaaaaattcctggaagggaggcagagtgcaggctgttctgacctcagacagtccagctctagtggggagcaacatcacctttgccgtcaacctgatcttcccgaggtgccaaaaagaagatgccaatggcaatatcgtttacgagaaaaactgccggaacgaggccggtctgtcagccgacccatacgtctacaactggactgcgtggtctgaagattccgatggggagaatggcaccggacagtctcaccacaacgtcttccctgatgggaagccttttccccaccatcccggttggcggaggtggaacttcatttatgtatttcatacactgggctggttgctccagaccccaaagctcctgctttacctgtctttgaaatttcagccgtctcttttccttctgtataattag

SEQ ID NO: 269771 - protein, 101 aa, Artificial Sequence
  derived and/or modified sequence
MASNKTTLQKMGKKQNGKSKKVEEAEPEEFVVEKVLDRRVVNGKVEYFLKWKGFTEKLAKKKMVQKENLYLTVNLMTANQRRKEMLLTNQEDLPEVLILKE

SEQ ID NO: 269772 - DNA, 306 bp, Artificial Sequence
  derived and/or modified sequence
atggcctcaaacaaaactactctgcagaaaatggggaaaaaacagaacggcaaatccaaaaaggtcgaggaggccgagccggaagaatttgtggtggaaaaggtgctcgacagacgcgtcgttaacgggaaggtagaatacttcctgaagtggaagggtttcaccgaaaagctggcaaagaagaagatggtccagaaagagaacctttacctaaccgtgaatctgatgactgccaaccagagacgaaaggaaatgctgctcaccaaccaggaagacctgcccgaagtgctgatcctaaaggagtag

SEQ ID NO: 269773 - DNA, 306 bp, Artificial Sequence
  derived and/or modified sequence
atggccagcaacaagaccaccctgcagaagatgggcaagaagcagaatggcaagagcaagaaggtggaggaggccgagcctgaggagtttgtggtggagaaggtgctggaccggcgggtggtgaatggcaaggtggagtacttcctgaagtggaagggcttcacagagaagctggccaagaagaagatggtgcagaaggaaaatctctacctgactgtgaacctgatgacagccaaccagaggaggaaggagatgctgctgaccaaccaggaggacctgcctgaggtgctgatcctgaaggagtag

SEQ ID NO: 269774 - DNA, 306 bp, Artificial Sequence
  derived and/or modified sequence
atggccagcaacaagaccaccctgcagaagatgggcaagaagcagaatggaaaaagcaagaaagtggaagaagccgaacctgaggagtttgttgtggagaaagtccttgatcgcagggtggtgaatggtaaagtggagtactttcttaagtggaagggcttcacagaaaagcttgctaaaaagaaaatggtacagaaggagaatctgtatctgaccgtgaatcttatgaccgccaaccaacggaggaaggaaatgttattaacaaaccaggaagatctacccgaagtcctgatattaaaggaatag

SEQ ID NO: 269775 - DNA, 306 bp, Artificial Sequence
  derived and/or modified sequence
atggcctcaaataagaccaccctgcagaagatggggaagaagcaaaatggcaagtctaagaaggtggaggaggcagagccagaggagttcgtagtcgaaaaggtgttagacaggcgcgtggtcaatgggaaagtcgagtattttctcaagtggaaaggatttacggagaagctggctaagaagaagatggtgcagaaggagaatctgtatttgactgtcaatctgatgaccgccaaccagcggaggaaggagatgctcctgacaaaccaggaagatctgccagaggtgcttattctcaaggagtag

SEQ ID NO: 269776 - DNA, 306 bp, Artificial Sequence
  derived and/or modified sequence
atggccagcaacaagaccaccctgcagaagatgggcaagaagcagaacggcaagagcaagaaggtggaggaggccgagcccgaggagttcgtggtggagaaggtgctggacagaagagtggtgaacggcaaggtggagtacttcctgaagtggaagggcttcaccgagaagctggccaagaagaagatggtgcagaaggagaacctgtacctgaccgtgaacctgatgaccgccaaccagagaagaaaggagatgctgctgaccaaccaggaggacctgcccgaggtgctgatcctgaaggagtag

SEQ ID NO: 269777 - protein, 803 aa, Artificial Sequence
  derived and/or modified sequence
MTNQEKWAHLSPSEFSQLQKYAEYSTKKLKDVLEEFHGNGVLAKYNPEGKQDILNQTIDFEGFKLFMKTFLEAELPDDFTAHLFMSFSNKFPHSSPMVKSKPALLSGGLRMNKGAITPPRTTSPANTCSPEVIHLKDIVCYLSLLERGRPEDKLEFMFRLYDTDGNGFLDSSELENIISQMMHVAEYLEWDVTELNPILHEMMEEIDYDHDGTVSLEEWIQGGMTTIPLLVLLGLENNVKDDGQHVWRLKHFNKPAYCNLCLNMLIGVGKQGLCCSFCKYTVHERCVARAPPSCIKTYVKSKRNTDVMHHYWVEGNCPTKCDKCHKTVKCYQGLTGLHCVWCQITLHNKCASHLKPECDCGPLKDHILPPTTICPVVLTLPTSGVSVPEERQSTVKKEKSGSQQPNKVIDKNKMQRANSVTVDGQGLQVTPVPGTHPLLVFVNPKSGGKQGERIYRKFQYLLNPRQVYSLSGNGPMPGLNFFRDVPDFRVLACGGDGTVGWVLDCIEKANVGKHPPVAILPLGTGNDLARCLRWGGGYEGENLMKILKDIENSTEIMLDRWKFEVIPNDKDEKGDPVPYSIINNYFSIGVDASIAHRFHIMREKHPEKFNSRMKNKFWYFEFGTSETFSATCKKLHESVEIECDGVQIDLINISLEGIAILNIPSMHGGSNLWGESKKRRSHRRIEKKGSDKRTTVTDAKELKFASQDLSDQLLEVVGLEGAMEMGQIYTGLKSAGRRLAQCSCVVIRTSKSLPMQIDGEPWMQTPCTIKITHKNQAPMLMGPPPKTGLFCSLVKRTRNRSKE

SEQ ID NO: 269778 - protein, 75 aa, Artificial Sequence
  derived and/or modified sequence
MTNQEKWAHLSPSEFSQLQKYAEYSTKKLKDVLEEFHGNGVLAKYNPEGKQDILNQTIDFEGFKLFMKTFLEAEL

SEQ ID NO: 269779 - DNA, 2412 bp, Artificial Sequence
  derived and/or modified sequence
atgaccaatcaggagaaatgggctcacctctcgccttccgagttcagtcagctccaaaagtatgctgaatattctactaagaagctcaaggatgtcctcgaggagttccacggaaacggagtgctggctaaatacaatccagaggggaagcaggacatcttgaaccagacaattgattttgaggggtttaagctgtttatgaagaccttccttgaagctgaacttcctgatgatttcacggcacatttattcatgtctttttccaataaattccctcatagctctcccatggttaagtctaagccagcacttcttagcggaggcctccgaatgaacaaaggcgcgatcacaccacccaggactactagccccgctaacacctgcagcccggaggtcattcacctgaaagatattgtgtgctacctgtctcttctcgaacggggccgtccagaggataagttggagtttatgtttcgtctctacgacaccgatgggaacgggtttttggacagcagtgaacttgagaatatcatatcccagatgatgcacgtcgccgaataccttgagtgggacgttactgagctcaatcctatactgcacgagatgatggaggagattgattacgaccacgatggaaccgtgagtctggaggagtggatccagggaggcatgacaacaatccccttgctggtgctgctcggactggagaataacgtaaaagatgacggtcagcatgtctggagactgaagcactttaataaacccgcttactgtaatttatgtctcaacatgcttattggtgtcggcaaacagggcctgtgctgcagcttctgtaagtataccgtccacgagcgctgcgtggcccgcgcccctcccagctgcatcaaaacttatgtcaagagcaagcgtaatacggatgtaatgcaccattactgggtggaaggcaactgtccgacaaagtgtgacaaatgtcataaaactgtgaaatgctaccagggtctgactggcctccactgcgtgtggtgtcaaataactttacataataaatgtgcctcacatctaaagcccgaatgcgattgtggcccacttaaggaccatatcctcccccctaccaccatctgtcccgtagtcttgacgttacccacgtccggagttagtgtgcctgaggagaggcaatcgacggtgaagaaagagaaatccggcagccaacaaccgaataaggtcattgataaaaacaaaatgcagagagcgaattctgtgaccgtggatggccagggcctgcaggtgaccccagtgccagggacccatccacttctggtgttcgttaacccgaaatcaggcggcaaacagggggaacgcatctacagaaagttccaatacttactgaacccgcgacaggtgtattccctctctggtaacggtccgatgcctggcctgaatttttttcgtgacgttcccgacttccgggttctggcatgtggaggcgacggcacggtgggctgggtgctggattgcatcgagaaagctaatgtggggaagcacccgccagtcgctatcctcccattgggtaccggcaatgacctcgccagatgtctgcgctggggcgggggctatgaaggggaaaaccttatgaaaattctgaaggatattgaaaatagcactgaaattatgctcgatcggtggaaattcgaagtaatccccaatgataaagacgaaaagggcgacccagtgccttatagtatcatcaacaattatttcagtattggggtggatgccagtattgctcatcgattccacatcatgcgcgagaagcatcccgaaaagttcaacagcagaatgaaaaacaaattttggtacttcgagttcggaacatcagagactttttctgccacctgcaagaagctgcacgaaagcgtggagattgagtgtgacggggttcagatcgacctgatcaatatctcccttgaaggcattgcaattctcaatatcccgtcaatgcacggagggtcaaacctctggggcgagagcaaaaaaagaaggtcacatcgccggattgagaaaaaaggctcagataagagaacaacagtgacagacgcgaaagaactgaaatttgcttcccaggacctgagcgatcaactgctagaagtggtcggactggaaggcgctatggaaatggggcagatctacaccggtctgaagtccgccgggcggaggctggcacagtgttcctgcgtggtgattagaaccagtaagagcttgcccatgcagattgatggcgaaccttggatgcagaccccttgcacaattaagatcacgcataagaaccaggcacccatgcttatgggccctcctccaaaaacaggccttttttgctcgttagtcaaacgcactcgtaatcgcagcaaggagtag

SEQ ID NO: 269780 - DNA, 2412 bp, Artificial Sequence
  derived and/or modified sequence
atgaccaaccaggagaagtgggcccacctgagccccagcgagttcagccagctgcagaagtatgcagagtacagcaccaagaagctgaaggatgtgctggaggagttccatggaaatggagtgctggccaagtacaaccctgagggcaagcaggacatcctgaaccagaccatcgactttgagggcttcaagctgttcatgaagaccttcctggaggccgagctgcctgatgacttcaccgcccacctgttcatgtccttcagcaacaagttcccccacagcagccccatggtgaagagcaagccagccctgctgagcggcggcctgaggatgaacaagggggccatcaccccacccaggaccaccagccctgccaacacctgcagccctgaggtgatccacctgaaggacatcgtgtgctacctgagcctgctggagcggggccggcctgaggacaagctggagttcatgttccggctgtatgacacagatggaaatggcttcctggacagcagcgagctggagaacatcatcagccagatgatgcacgtggccgagtacctggagtgggatgtgacagagctgaaccccatcctgcacgagatgatggaggagattgattatgaccatgatggcaccgtgtccctggaggagtggatccagggcggcatgaccaccatccccctgctggtgctgctgggcctggagaacaacgtgaaggatgatggccagcacgtgtggaggctgaagcacttcaacaagccagcctactgcaacctgtgcctgaacatgctgattggagtgggcaagcagggcctgtgctgcagcttctgcaagtacacagtgcatgagcgctgtgtggcccgggccccacccagctgcatcaagacctacgtgaagagcaagaggaacacagatgtgatgcaccactactgggtggagggcaactgccccaccaagtgtgacaagtgccacaagacagtgaagtgctaccagggcctgaccggcctgcactgtgtgtggtgccagatcaccctgcacaacaagtgtgccagccacctgaagccagaatgtgactgtggccccctgaaggaccacatcctgccccccaccaccatctgccctgtggtgctgaccctgcccaccagcggcgtgtctgtgcctgaggagcggcagagcacagtgaagaaggagaagagcggcagccagcagcccaacaaggtgattgacaagaacaagatgcagagggccaacagcgtgacagtggatggccagggcctgcaggtgacccctgtgcccggcacccaccccctgctggtgtttgtgaaccccaagagcggcggcaagcagggcgagcgcatctacaggaagttccagtacctgctgaacccccggcaggtgtacagcctgtctggaaatggccccatgcctggcctgaacttcttcagagatgtgcctgacttccgggtgctggcctgtggaggagatggcaccgtgggctgggtgctggactgcatcgagaaggccaacgtgggcaagcacccccctgtggccatcctgcccctgggcactggaaatgacctggcccgctgcctgcgctggggcggcggctatgaaggagagaacctgatgaagatcctgaaggacatcgagaacagcacagagatcatgctggaccgctggaagtttgaagtcatccccaatgacaaggatgagaagggggaccctgtgccctacagcatcatcaacaactacttcagcattggagtggatgccagcatcgcccaccgcttccacatcatgagggagaagcaccctgagaagttcaacagcaggatgaagaacaagttctggtactttgaatttggcaccagcgagaccttcagcgccacctgcaagaagctgcacgagagcgtggagattgaatgtgatggagtgcagattgacctgatcaacatcagcctggagggcatcgccatcctgaacatccccagcatgcatggaggcagcaacctgtggggcgagagcaagaagagaagaagccacagaagaattgagaagaagggcagtgacaagaggaccaccgtgacagatgccaaggagctgaagtttgccagccaggacctgagtgaccagctgctggaggtggtgggcctggagggcgccatggagatgggccagatctacacaggcctgaagtctgctggaagaaggctggcccagtgcagctgtgtggtgatccgcaccagcaagagcctgcccatgcagattgatggagagccctggatgcagaccccctgcaccatcaagatcacccacaagaaccaggcccccatgctgatgggccccccacccaagacaggcctcttctgcagcctggtgaagaggaccaggaacagaagcaaggagtag

SEQ ID NO: 269781 - DNA, 2412 bp, Artificial Sequence
  derived and/or modified sequence
atgaccaaccaggagaagtgggcccacctgagccccagcgagttctcacagctccaaaaatatgccgaatactcaacgaagaaactaaaagacgtcctggaagagttccatggcaacggagtgcttgctaagtacaatcccgaagggaagcaggatatcttgaaccagaccatagacttcgagggtttcaaactgttcatgaaaacctttcttgaagctgaactaccagacgactttactgcacatctatttatgtctttcagcaacaagttcccacatagttctccaatggtcaaatcaaagccagccttgctgtccggtggcttgaggatgaacaaaggcgccattactccacctcgcactacaagccctgcgaatacatgcagtccggaggtgatccacctcaaggacatcgtgtgttatttatcgctcttagagcgggggcggccagaggataagctggagttcatgtttcggctgtatgacacggatggcaacggctttctagattcatcggaattggagaatattatctcccagatgatgcatgtggcagaatatctggagtgggacgttaccgaactgaaccccattcttcacgagatgatggaggagattgattacgaccatgacggaaccgtttccctggaggagtggattcagggtggaatgaccaccatccctcttctcgtgctactcggcttggagaacaatgtcaaagatgatgggcagcacgtgtggcgactcaaacactttaacaagcccgcatattgtaacctctgcctaaatatgctaattggcgtgggcaaacagggcctgtgctgttccttttgcaagtacactgtgcatgaaaggtgcgtggcacgggcccctccttcatgcatcaagacttacgtcaagtctaagcgcaacacggacgtcatgcaccactattgggtggagggtaattgccctaccaagtgcgataagtgccataaaactgtcaagtgctaccagggactgaccgggctccactgtgtgtggtgtcagatcactctccataacaaatgcgcatcgcaccttaaaccagagtgtgactgcggcccacttaaggaccacatactcccacctactaccatatgtcctgtggtactgactctccccacgagtggtgtatcagtgccagaggaacggcagtctactgtgaagaaagaaaaatccggctcccagcagcctaacaaggtgattgacaagaacaaaatgcaacgtgccaatagtgtcacagttgacgggcagggcctccaagttacacctgttccaggaactcaccctttgttggtttttgttaatccaaagtccggtggcaagcagggtgaaagaatatacagaaaattccagtatctgcttaatcctcgccaggtctactcactttccggcaacggaccgatgcccgggctaaacttctttagagatgtccctgactttagggtccttgcatgtgggggcgatggaaccgtgggatgggtgttggattgcatcgagaaggccaacgtgggcaaacacccacccgtcgctatcctcccgctcgggaccgggaatgacctggcaaggtgtctccggtggggaggaggctatgaaggtgagaacctgatgaagatcctcaaagatatcgaaaactcgactgaaatcatgctggatcgctggaagttcgaggtgatccccaatgataaggacgaaaaaggggatcccgtcccctactccatcatcaataattacttttcaatcggcgtggatgctagcattgcccaccggtttcacataatgcgagagaagcaccctgagaagttcaactccagaatgaaaaataaattttggtacttcgaatttggcacatctgaaacgttcagtgccacctgcaagaagctgcacgagtcagtggaaatcgagtgtgatggcgtgcagatcgatcttatcaatatcagtctcgagggaatcgcaattctgaacatcccgagcatgcacggtggaagcaatctgtggggggagtcgaaaaagcggcggagtcacagaagaattgagaaaaaaggtagtgataagcggaccactgtgactgacgctaaggagctcaaattcgcatcgcaggacctgtccgaccagctacttgaagttgtgggtttggagggagccatggagatgggccaaatctacaccgggcttaagtccgccggcaggagacttgctcagtgttcctgcgtcgtcatccgtacgagtaagtcactgcctatgcagatcgacggagagccatggatgcaaacgccatgcacgatcaaaattacacataagaatcaggcaccaatgctcatgggtcccccacctaagaccggccttttctgttccctagttaagcgcacacggaaccggtctaaggagtag

SEQ ID NO: 269782 - DNA, 2412 bp, Artificial Sequence
  derived and/or modified sequence
atgaccaatcaggagaaatgggcacacctctcccccagcgagttttctcagttgcagaagtatgctgaatactcgactaagaagctgaaggacgtcctagaagagttccacggtaatggggtgctggcaaagtacaatcccgagggtaagcaggacattctgaaccagaccattgatttcgagggcttcaagctattcatgaagacatttctcgaagccgagctgcctgatgacttcactgctcacctctttatgtcattttccaataagttccctcacagttccccgatggttaagtccaagcccgctctgctcagtgggggtctgaggatgaataaaggggcaatcacaccaccgcgaacaacttcaccagcgaacacctgcagccctgaagtgattcacctgaaagatatcgtgtgttatcttagtttacttgagagaggcaggcccgaagataagttggagtttatgttcagactttacgacaccgacggaaatggattcctagactcttccgagctggagaatattatatcccagatgatgcacgtcgcagagtatcttgagtgggacgttaccgagctcaatccaatcctccatgagatgatggaggagattgactacgaccatgacggcacggtctccctggaagagtggatccagggaggaatgacgacaattccattgctggtgttacttgggctggagaacaacgtcaaggatgacgggcagcacgtttggcgcttgaaacatttcaataaacccgcatactgtaatttatgtctcaatatgctgataggcgtcggtaagcaagggctgtgttgtagcttctgcaagtacacggttcacgagcggtgcgtggctagagccccaccgtcttgcattaaaacctatgtgaaaagtaagcggaatactgacgtcatgcaccactattgggtcgagggcaactgccctacaaaatgcgataagtgccataagacggtgaaatgttaccagggcctcaccggattgcattgcgtgtggtgccagatcacgttgcataacaagtgcgcatctcacctgaagccagaatgcgactgcgggccactaaaggaccacatcctcccccctactacaatctgccccgtcgtgcttacactaccaacctccggagtatccgttcccgaggaacgccagtctacagtgaagaaagaaaaatcagggtcgcagcagcccaataaggtcatagacaaaaacaaaatgcagagggccaattctgtgactgttgacgggcagggcctgcaggtcactccggttcctggcactcacccactgttggttttcgtgaatccaaagtccgggggaaaacaaggagagaggatttatagaaaatttcaatacctcttaaatcctagacaggtttattccctatctggcaatggccctatgcctggcctcaacttctttcgggatgtccctgacttcagggtgctggcctgcgggggagatggcaccgtaggttgggtgctcgattgtattgagaaagctaacgtcggcaagcaccctcccgtagcaattctcccgcttggcactggaaatgatctggccaggtgtctacgctggggaggcggatacgaaggcgagaacctgatgaagatcctgaaagacattgagaactcaacagagatcatgttagaccggtggaagttcgaagtaatacctaacgacaaagacgagaagggtgacccagtgccgtattccattataaacaattattttagtattggtgtggacgcttcaatagcacaccgatttcatatcatgcgcgaaaagcacccagagaagttcaatagccgcatgaagaacaagttttggtacttcgagttcggtacttccgaaactttctcagctacctgtaagaaactgcacgagagcgtggagatcgaatgcgacggtgtgcagatcgatctgattaacatctctcttgagggtattgcgatcctgaacattccatcgatgcatgggggttcaaatctctggggcgagagtaaaaaacgtaggtctcatagacgaattgaaaaaaaaggatctgataagagaactactgtgaccgatgcgaaggaactcaaatttgctagtcaagacttgtccgaccaactgctcgaggttgttggcctcgagggggcaatggaaatgggccagatttatacagggctcaagagcgctggaagacgacttgcccagtgcagctgtgtggttatccgcactagtaaaagccttccgatgcaaattgacggagaaccatggatgcaaaccccatgcacaattaagataacccataaaaatcaggctccaatgttaatgggacctcctccaaaaactggactattttgctctctcgtgaagagaacaagaaatcggagcaaggagtag

SEQ ID NO: 269783 - DNA, 2412 bp, Artificial Sequence
  derived and/or modified sequence
atgaccaaccaggagaagtgggcccacctgagccccagcgagttcagccagctgcagaagtacgccgagtacagcaccaagaagctgaaggacgtgctggaggagttccacggcaacggcgtgctggccaagtacaaccccgagggcaagcaggacatcctgaaccagaccatcgacttcgagggcttcaagctgttcatgaagaccttcctggaggccgagctgcccgacgacttcaccgcccacctgttcatgagcttcagcaacaagttcccccacagcagccccatggtgaagagcaagcccgccctgctgagcggcggcctgagaatgaacaagggcgccatcaccccccccagaaccaccagccccgccaacacctgcagccccgaggtgatccacctgaaggacatcgtgtgctacctgagcctgctggagagaggcagacccgaggacaagctggagttcatgttcagactgtacgacaccgacggcaacggcttcctggacagcagcgagctggagaacatcatcagccagatgatgcacgtggccgagtacctggagtgggacgtgaccgagctgaaccccatcctgcacgagatgatggaggagatcgactacgaccacgacggcaccgtgagcctggaggagtggatccagggcggcatgaccaccatccccctgctggtgctgctgggcctggagaacaacgtgaaggacgacggccagcacgtgtggagactgaagcacttcaacaagcccgcctactgcaacctgtgcctgaacatgctgatcggcgtgggcaagcagggcctgtgctgcagcttctgcaagtacaccgtgcacgagagatgcgtggccagagccccccccagctgcatcaagacctacgtgaagagcaagagaaacaccgacgtgatgcaccactactgggtggagggcaactgccccaccaagtgcgacaagtgccacaagaccgtgaagtgctaccagggcctgaccggcctgcactgcgtgtggtgccagatcaccctgcacaacaagtgcgccagccacctgaagcccgagtgcgactgcggccccctgaaggaccacatcctgccccccaccaccatctgccccgtggtgctgaccctgcccaccagcggcgtgagcgtgcccgaggagagacagagcaccgtgaagaaggagaagagcggcagccagcagcccaacaaggtgatcgacaagaacaagatgcagagagccaacagcgtgaccgtggacggccagggcctgcaggtgacccccgtgcccggcacccaccccctgctggtgttcgtgaaccccaagagcggcggcaagcagggcgagagaatctacagaaagttccagtacctgctgaaccccagacaggtgtacagcctgagcggcaacggccccatgcccggcctgaacttcttcagagacgtgcccgacttcagagtgctggcctgcggcggcgacggcaccgtgggctgggtgctggactgcatcgagaaggccaacgtgggcaagcacccccccgtggccatcctgcccctgggcaccggcaacgacctggccagatgcctgagatggggcggcggctacgagggcgagaacctgatgaagatcctgaaggacatcgagaacagcaccgagatcatgctggacagatggaagttcgaggtgatccccaacgacaaggacgagaagggcgaccccgtgccctacagcatcatcaacaactacttcagcatcggcgtggacgccagcatcgcccacagattccacatcatgagagagaagcaccccgagaagttcaacagcagaatgaagaacaagttctggtacttcgagttcggcaccagcgagaccttcagcgccacctgcaagaagctgcacgagagcgtggagatcgagtgcgacggcgtgcagatcgacctgatcaacatcagcctggagggcatcgccatcctgaacatccccagcatgcacggcggcagcaacctgtggggcgagagcaagaagagaagaagccacagaagaatcgagaagaagggcagcgacaagagaaccaccgtgaccgacgccaaggagctgaagttcgccagccaggacctgagcgaccagctgctggaggtggtgggcctggagggcgccatggagatgggccagatctacaccggcctgaagagcgccggcagaagactggcccagtgcagctgcgtggtgatcagaaccagcaagagcctgcccatgcagatcgacggcgagccctggatgcagaccccctgcaccatcaagatcacccacaagaaccaggcccccatgctgatgggccccccccccaagaccggcctgttctgcagcctggtgaagagaaccagaaacagaagcaaggagtag

SEQ ID NO: 269784 - DNA, 5595 bp, Artificial Sequence
  derived and/or modified sequence
ggaaaggatcctgagaactggctagtcccagttcctctccggaaaagcagtggctctcgcttcagagatgcgctcagctttcgcctgcatcacactgcattctttaacacattattgaaattacaagcatccaaagcagtttcatgtggacagattgcatattttgaaagcctgaggtattttatcatgaaacatgccatgtggaatctttgaagcatagacctctgcgcaacacctgaataaagaatcttttacctggtatgtgacagagcttctcaccaccaccatgacaaaccaggaaaaatgggcccacctcagcccttcggaattttcccaacttcagaaatatgctgagtattctacaaagaaattaaaggatgttcttgaagaattccatggtaatggtgtgcttgcaaagtataatcctgaagggaaacaagacattcttaaccaaacaatagattttgaaggtttcaaactattcatgaagacattcctggaagccgagcttcctgatgatttcactgcacaccttttcatgtcatttagcaacaagtttcctcattctagtccaatggtaaaaagtaagcctgctctcctatcaggcggtctgagaatgaataaaggtgccatcacccctccccggactacttctcctgcaaatacgtgttccccagaagtaatccatctgaaggacattgtctgttacctgtctctgcttgaaagaggaagacctgaggataagcttgagtttatgtttcgcctttatgacacggatgggaatggcttcctggacagctcggagctagaaaatatcatcagtcagatgatgcatgttgcagaataccttgagtgggatgtcactgaacttaatccaatcctccatgaaatgatggaagaaattgactatgatcatgatggaaccgtgtctctggaggaatggattcaaggaggaatgacaacgattccacttcttgtgctcctgggcttagaaaataacgtgaaggatgatggacagcacgtgtggcgactgaagcactttaacaaacctgcctattgcaacctttgcctgaacatgctgattggcgtggggaagcagggcctctgctgttccttctgcaagtacacagtccatgagcgctgtgtggctcgagcacctccctcttgcatcaagacctatgtgaagtccaaaaggaacactgatgtcatgcaccattactgggttgaaggtaactgcccaaccaagtgtgataagtgccacaaaactgttaaatgttaccagggcctgacaggactgcattgtgtttggtgtcagatcacactgcataataaatgtgcttctcatctaaaacctgaatgtgactgtggacctttgaaggaccatattttaccacccacaacaatctgtccagtggtactgactctgcccacttcaggagtttcagttcctgaggaaagacaatcaacagtgaaaaaggaaaagagtggttcccagcagccaaacaaagtgattgacaagaataaaatgcaaagagccaactctgttactgtagatggacaaggcctgcaggtcactcctgtgcctggtactcacccacttttagtttttgtgaaccccaaaagtggtggaaaacaaggagaacgaatttacagaaaattccagtatctattaaatcctcgtcaggtttacagtctttctggaaatggaccaatgccagggttaaactttttccgtgatgttcctgacttcagagtgttagcctgtggtggagatggaaccgtgggctgggttttggattgcatagaaaaggccaatgtaggcaagcatcctccagttgcgattctgcctcttgggactggcaatgatctagcaagatgcctgcgatggggaggaggttacgaaggtgagaatctgatgaaaattctaaaagacattgaaaacagcacagaaatcatgttggacaggtggaagtttgaagtcatacctaatgacaaagatgagaaaggagacccagtgccttacagtatcatcaataattacttttccattggcgtggatgcctccattgcacacagattccacatcatgagagaaaaacacccagagaaattcaacagtagaatgaagaacaaattttggtattttgagtttggcacatctgaaactttctcagccacctgcaagaagctacatgaatctgtagaaatagaatgtgatggagtacagatagatttaataaacatctctctggaaggaattgctattttgaatataccaagcatgcatggaggatccaatctttggggagagtctaagaaaagacgaagccatcgacgaatagagaaaaaagggtctgacaaaaggaccaccgtcacagatgccaaagagttgaagtttgcaagtcaagatctcagtgaccagctgctggaggtggtcggcttggaaggagccatggagatggggcaaatatacacaggcctgaaaagtgctggccggcggctggctcagtgctcctgcgtggtcatcaggacgagcaagtctctgccaatgcaaattgatggggagccatggatgcagaccccatgcacaataaaaattacacacaagaaccaagccccaatgctgatgggcccgcctccaaaaaccggtttattctgctccctcgtcaaaaggacaagaaaccgaagcaaggaataatcctgtgttgtttcactcttagaaattgaattagcataattgggccatggaacacatatgctggaaatctttgaaccatttcaagtctcctgctcatgcaaaatcatggaagtggtttaacagtttttgttactaagctaatgtaaaattcagctattagaaaatttattgtctcagtttttataggcatctttgcatgaagaaagcagaagtttacctgaagtgatactgcatatttttggtgcatgcattcccatagatttttacatctcccacccaactcttccccaatttccttttactaacctgtgagaaaaacccgtgaaacatgaaaaaggaaataccatgggaaacgtgattctcagtgtgattccaattattacgaagcactaatcagtaacgctacaatgatcataattgcagattgctatacgtttcccttttagaatcagtgtatcagtgacctatgacttgaggagaaacttttaattcgaagattttattaaatagttgactacaataccttgctatatatacatagtttttcttcaacatcttaactcttctgagtggaaataaaaatatcaggcataaggttttctcatgctgaaaaatagaacgcggtttttattttgcttagttttctttttaattccagaaataagtgaaaacatgttacttgacagtcaagtgtggtaatatggcaagccttgttcctttctgcatgagaatctaggagagaattcataaccacaccaataacgaaatagaagttttaaactatgtgcctaatcaatgtgtttcccaccaaagattcagaaaacaatgcttgagagaaatgggttaatgcataattaattaagcattgtggagcaaatttagggttcctgtgattaattttgtgatgactaaaatgctggaaagcgagtgagttgcccattaattatgattaaaattctcacctttcacagacagacaataagccagacaacacaatcaaagctcaatagatgatttcttgcttttttcagtcatttataaatataggtgtaatttttcatggatcagttaagtacacttgaaggaagtaaatgattgtatcagtttatttctagtataaatgggtacctgtaataatactgagctcttggaagcgaatcatgcatgcaattagctccctcctcctcacctactccactcccatctttatgacatttcaaatgtttatttggaaacaacagcctagatcactgttgaaggtgttcatggcatagttggagtctctgactgtttaaagaaatcacagaacagtacttttcttttagtgtttcattaagcctatgatgtaaaatgaaatgcttctgagcagtcttgtaatattgttcattcatattgacctgcatctcatcattgcatgttttatgttttcaaacatgccataaggaaaacgagtgcctgaactgcatgatttattagtttctctccactctgcattaaagtgctaatgatttatcggttctattttgttattgattcattcatctttctttgaataacaaatagcatttagtgattctgttgaacacaatcctgtgcatggatttatggatttcaagtgaaattgctataattttagttctttggtttgaaaactcaactgaatgctgttatatcaaatagctgctctcaagcaatgtgctataatggaagattacgtacaaagtgtattcttttagtgttcctggaacattggacggtaaatatcaatcaacaataagcttaattactttaaaaataaaagcttttgaataaaattaagacataatttagcattcccaggaaaattatgattacaattgcaaatttagtacagcaatcacttgcgctggtataaaataaaaaagttgtttggcagaagagtaatccagaccaaaagaaagaaagaaatctcaaaacagtaacaagtacattactgacataatgttacgtaacacacacattgattttttgtatctatggttgcaggtaataaatattttcacatgaattgacaaaattttctacaatgggcaggcaggctttgtgtcaaaaacatattttgaagccacaaattattttatgttcgctacaacatacaattatgtcttggctaccttttatagtatatagtttgaaggcagcaacagtttgtgaatcattcttaacaatctgtacagtagaaagctgttggatagacagtgggatgagacaaattaaacaacctgcttataagatttcaatgattgaaataatgggatgcagcttcacttcagtgtagctgtataactacaattagtgctaatagtggttacattttcagtcagatggattctttggtacccataataaatgttcaaataggaatccaatttgacttttctcaactcattttctaaatacactgatgtacttgccccttcaagtatactgcccctggggtttggaaagtagtttttaaaaacgtaacttgatgggtttgaaatcagagaagatattctcatcagttttatgacagcttcatatgaaaaatatatagtttaaggaaaattctatagtatattaaaatattgaatgatgaatgttgttagctttacaagatggaaacttctcttctatgtgtgcagataaattttcagctattgagtcgccctcttttaatataggagacataaagttttaagtggctgaaactcttaaatgtaaattaatgctggacttaacagcagtcagaaacaaagagggaaaagagacatgcactctgctaaacattgctaggcactgagttgatgagattccagagagacatttcagagtaaaccttgatatccacgcttctaagagataggaagggaggtatc

SEQ ID NO: 269785 - protein, 785 aa, Artificial Sequence
  derived and/or modified sequence
MTNQEKWAHLSPSEFSQLQKYAEYSTKKLKDVLEEFHGNGVLAKYNPEGTIDFEGFKLFMKTFLEAELPDDFTAHLFMSFSNKFPHSSPMVKSKPALLSGGLRMNKGAITPPRTTSPANTCSPEVIHLKDIVCYLSLLERGRPEDKLEFMFRLYDTDGNGFLDSSELENIISQMMHVAEYLEWDVTELNPILHEMMEEIDYDHDGTVSLEEWIQGGMTTIPLLVLLGLENNVKDDGQHVWRLKHFNKPAYCNLCLNMLIGVGKQGLCCSFCKYTVHERCVARAPPSCIKTYVKSKRNTDVMHHYWVEGNCPTKCDKCHKTVKCYQGLTGLHCVWCQITLHNKCASHLKPECDCGPLKDHILPPTTICPVVLERQSTVKKEKSGSQQPNKVIDKNKMQRANSVTVDGQGLQVTPVPGTHPLLVFVNPKSGGKQGERIYRKFQYLLNPRQVYSLSGNGPMPGLNFFRDVPDFRVLACGGDGTVGWVLDCIEKANVGKHPPVAILPLGTGNDLARCLRWGGGYEGENLMKILKDIENSTEIMLDRWKFEVIPNDKDEKGDPVPYSIINNYFSIGVDASIAHRFHIMREKHPEKFNSRMKNKFWYFEFGTSETFSATCKKLHESVEIECDGVQIDLINISLEGIAILNIPSMHGGSNLWGESKKRRSHRRIEKKGSDKRTTVTDAKELKFASQDLSDQLLEVVGLEGAMEMGQIYTGLKSAGRRLAQCSCVVIRTSKSLPMQIDGEPWMQTPCTIKITHKNQAPMLMGPPPKTGLFCSLVKRTRNRSKE

SEQ ID NO: 269786 - DNA, 2358 bp, Artificial Sequence
  derived and/or modified sequence
atgacaaaccaagagaaatgggctcatctgtcaccgtctgaattcagtcaactgcaaaagtatgctgagtactcaacaaaaaaactgaaagatgtactggaggaattccacggcaatggagtgttggcaaagtacaatcctgaaggcacaatcgatttcgagggatttaagctgttcatgaagacctttctggaagcggagcttcccgatgacttcactgcccatctgtttatgtctttttccaacaaattcccgcacagcagtcccatggtgaaatccaagcccgctcttctgagtgggggactaaggatgaataaaggggcaatcacgccacctcgtaccacgtcgcccgccaacacctgttcccctgaagttattcacctgaaggacatagtgtgttacctatccctccttgagcggggccggcccgaggacaagctggaatttatgtttcggttgtacgacactgacggaaatggatttctggactcttcggaattagaaaacatcatatcccagatgatgcatgtagctgaatacctggaatgggacgtgactgaactgaaccctatcctgcacgaaatgatggaagagatcgactacgaccacgatggaaccgtgtctctggaggaatggattcagggcgggatgacgacaatcccgctcctcgtgctcctgggattggaaaacaacgtgaaggatgatggccagcatgtctggcgattaaaacatttcaataagcccgcgtactgtaatttgtgcctgaatatgctgattggcgtggggaagcaggggctttgttgtagcttttgcaagtatacagtccacgagcggtgcgtagccagagcccctccatcctgcatcaagacctacgtgaaatctaaacggaacaccgacgtaatgcaccactactgggttgagggaaattgccccactaaatgcgataagtgccacaaaactgttaagtgctaccaggggctgacaggacttcattgtgtgtggtgccagatcacactccataacaaatgtgccagtcacctgaagccggagtgtgattgcggccccctcaaagatcacattctgccccccactaccatatgtcccgtcgtgcttgagcgccaatcaaccgtgaagaaggaaaagtcgggatcccaacagcctaacaaggtcatagacaaaaacaagatgcagcgagcaaattccgttacggtggatggacaagggctgcaggttactcctgtgcccggaacgcatcctctgctggtcttcgtcaatcccaagtctgggggcaagcagggggaacgtatctataggaagtttcagtacctgctcaatcctcgccaggtctatagcctgtctggcaatggccccatgcctggcctgaacttctttagggacgtccctgacttccgcgtactggcatgcgggggcgatgggactgtcgggtgggtgctggattgtatagagaaagcaaacgtaggcaagcaccccccagtggcaatcctccccctgggaacaggcaatgacctggctcgatgcctgcggtggggaggggggtacgaaggagagaacctgatgaagattttaaaagacatcgaaaattccacggagatcatgctggacaggtggaaattcgaagtgatcccgaatgataaagacgagaaaggtgacccggtgccgtattctattataaataattacttctctattggcgttgacgcaagcatcgcccacaggttccacattatgagggagaaacaccctgagaagttcaatagcaggatgaaaaataagttctggtatttcgaatttgggacctccgagacgttcagcgctacatgcaagaagttacatgagtcggtggagattgaatgtgacggtgtccagatagacctgatcaatattagcctggagggcatcgccattctgaatatcccatccatgcacggcgggagtaatctctggggtgagagcaaaaaaagacggtcgcatcgacgtatcgagaagaagggcagcgacaagcgtactacggttactgatgcaaaggagctgaaatttgcgtcacaagatctttccgaccagcttctggaggtagtaggtctggagggggcaatggagatggggcaaatatacacagggctcaaatccgccgggaggcgactggcacaatgctcctgcgtggttattcgaacgagcaagtccctgccaatgcaaattgatggtgaaccctggatgcagactccttgcaccatcaaaattacccacaaaaaccaggcccccatgctgatggggcctcccccaaaaactgggctgttttgctcgctggtcaaacgtacaaggaaccggtcaaaggaatag

SEQ ID NO: 269787 - DNA, 2358 bp, Artificial Sequence
  derived and/or modified sequence
atgaccaaccaggagaagtgggcccacctgagccccagcgagttcagccagctgcagaagtatgcagagtacagcaccaagaagctgaaggatgtgctggaggagttccatggaaatggagtgctggccaagtacaaccctgagggcaccatcgactttgagggcttcaagctgttcatgaagaccttcctggaggccgagctgcctgatgacttcaccgcccacctgttcatgtccttcagcaacaagttcccccacagcagccccatggtgaagagcaagccagccctgctgagcggcggcctgaggatgaacaagggggccatcaccccacccaggaccaccagccctgccaacacctgcagccctgaggtgatccacctgaaggacatcgtgtgctacctgagcctgctggagcggggccggcctgaggacaagctggagttcatgttccggctgtatgacacagatggaaatggcttcctggacagcagcgagctggagaacatcatcagccagatgatgcacgtggccgagtacctggagtgggatgtgacagagctgaaccccatcctgcacgagatgatggaggagattgattatgaccatgatggcaccgtgtccctggaggagtggatccagggcggcatgaccaccatccccctgctggtgctgctgggcctggagaacaacgtgaaggatgatggccagcacgtgtggaggctgaagcacttcaacaagccagcctactgcaacctgtgcctgaacatgctgattggagtgggcaagcagggcctgtgctgcagcttctgcaagtacacagtgcatgagcgctgtgtggcccgggccccacccagctgcatcaagacctacgtgaagagcaagaggaacacagatgtgatgcaccactactgggtggagggcaactgccccaccaagtgtgacaagtgccacaagacagtgaagtgctaccagggcctgaccggcctgcactgtgtgtggtgccagatcaccctgcacaacaagtgtgccagccacctgaagccagaatgtgactgtggccccctgaaggaccacatcctgccccccaccaccatctgccctgtggtgctggagcggcagagcacagtgaagaaggagaagagcggcagccagcagcccaacaaggtgattgacaagaacaagatgcagagggccaacagcgtgacagtggatggccagggcctgcaggtgacccctgtgcccggcacccaccccctgctggtgtttgtgaaccccaagagcggcggcaagcagggcgagcgcatctacaggaagttccagtacctgctgaacccccggcaggtgtacagcctgtctggaaatggccccatgcctggcctgaacttcttcagagatgtgcctgacttccgggtgctggcctgtggaggagatggcaccgtgggctgggtgctggactgcatcgagaaggccaacgtgggcaagcacccccctgtggccatcctgcccctgggcactggaaatgacctggcccgctgcctgcgctggggcggcggctatgaaggagagaacctgatgaagatcctgaaggacatcgagaacagcacagagatcatgctggaccgctggaagtttgaagtcatccccaatgacaaggatgagaagggggaccctgtgccctacagcatcatcaacaactacttcagcattggagtggatgccagcatcgcccaccgcttccacatcatgagggagaagcaccctgagaagttcaacagcaggatgaagaacaagttctggtactttgaatttggcaccagcgagaccttcagcgccacctgcaagaagctgcacgagagcgtggagattgaatgtgatggagtgcagattgacctgatcaacatcagcctggagggcatcgccatcctgaacatccccagcatgcatggaggcagcaacctgtggggcgagagcaagaagagaagaagccacagaagaattgagaagaagggcagtgacaagaggaccaccgtgacagatgccaaggagctgaagtttgccagccaggacctgagtgaccagctgctggaggtggtgggcctggagggcgccatggagatgggccagatctacacaggcctgaagtctgctggaagaaggctggcccagtgcagctgtgtggtgatccgcaccagcaagagcctgcccatgcagattgatggagagccctggatgcagaccccctgcaccatcaagatcacccacaagaaccaggcccccatgctgatgggccccccacccaagacaggcctcttctgcagcctggtgaagaggaccaggaacagaagcaaggagtag

SEQ ID NO: 269788 - DNA, 2358 bp, Artificial Sequence
  derived and/or modified sequence
atgaccaaccaggagaagtgggcccacctgagccccagcgagttcagccagctgcaaaagtacgctgagtatagtacaaagaaactcaaggatgtattagaggaattccacgggaatggtgtcctggcgaaatataatccggaggggacgattgatttcgagggcttcaagctgtttatgaaaacttttctggaagcagagctgcccgacgatttcaccgcccatttattcatgtccttcagcaacaagttcccccactcatctccaatggttaagtcaaaacccgccttgctgtccggagggctgagaatgaataagggagctatcacccctccacggaccacctcacccgccaacacatgctcccctgaggtcattcacctcaaagacatagtgtgttacctgtccttgctggaacgcggtcgccctgaggacaaattggagttcatgtttaggctctacgacaccgatggaaatggctttctggactcctccgaactggaaaatataatcagccagatgatgcacgtcgccgaatatttagagtgggacgtgactgagctcaatcccattcttcacgagatgatggaggaaatcgattatgaccatgatgggaccgtcagcttagaggaatggattcagggcggaatgacgactattccactcctggtgctcctcgggttggagaacaacgtaaaggatgacggacagcacgtctggaggctgaaacatttcaataagccagcatactgtaacctctgtcttaatatgttgatcggagtgggaaaacaagggttgtgttgcagcttttgtaagtacacagtgcatgagcggtgcgtggcaagagccccccccagttgtatcaaaacatacgtgaagtctaagcgtaacaccgacgttatgcatcactactgggtggaaggtaactgccccacaaaatgcgacaaatgtcacaagacagtgaagtgttatcagggactgaccggcctgcactgcgtgtggtgccagatcacattgcataacaagtgtgcttcccatctaaaaccagagtgtgactgtggcccacttaaggatcacattttgccaccaacgactatctgccccgtggttttagagagacagtccacagtgaagaaggaaaagtcgggcagccagcagccaaacaaagtaattgataaaaacaaaatgcaaagggccaactccgttaccgttgacggccagggtctgcaggtaactccagtcccagggacacatcctctgcttgtgttcgttaatcccaaatcgggtggaaaacagggggagcgtatataccgcaaatttcagtatctgctgaatccacggcaggtgtactcactctccggcaacggtccaatgccaggtcttaactttttcagggatgtgccagacttcagagtgctggcatgcggaggcgatgggacggtaggctgggtcctagactgcatcgagaaagccaatgtcggcaagcacccaccagtggcgatcctccctttgggtacagggaacgacttagctaggtgtctcagatggggcggaggatacgaaggggaaaacttgatgaaaatcctcaaggacatcgagaattcaactgaaatcatgcttgacaggtggaagttcgaggtgattccaaacgataaggatgaaaagggcgaccctgtgccatacagcatcatcaacaattatttcagcattggggttgacgccagcatagcccacagatttcatattatgagagagaagcaccctgagaagtttaacagccgcatgaagaacaagttttggtactttgagtttggtacaagcgaaaccttctcggccacttgcaagaaactgcacgagtcagtggaaatagagtgtgacggcgtccagatcgacttgattaatatcagcttggagggcatcgctatcctcaatatcccctctatgcatgggggcagtaacctttggggagaaagcaaaaagagaaggagccataggcgcattgaaaagaagggttctgacaagcgcaccaccgttaccgatgccaaggaactcaagttcgccagtcaagatcttagtgaccagctcttagaggtcgtcggcctggagggtgcaatggagatgggtcaaatctatactggcctgaaatccgcaggtcgacggctggcccagtgtagctgtgtggtaatccgtacctcaaaaagcctgcctatgcagattgacggagagccctggatgcagaccccctgcaccattaaaatcacacataagaatcaggcacctatgctaatgggaccgcccccaaagacgggtctattctgtagcttggtgaagcgaaccagaaaccgctccaaagaatag

SEQ ID NO: 269789 - DNA, 2358 bp, Artificial Sequence
  derived and/or modified sequence
atgacaaatcaggaaaagtgggctcacctgagcccatctgagttcagccagctccagaaatatgctgagtactcaaccaaaaaacttaaagacgtactcgaggagttccatggaaacggcgtgcttgctaaatataaccctgaggggactattgatttcgagggtttcaagctctttatgaaaacattcctcgaagcagagctccccgatgactttacagctcacctgtttatgagcttttcaaataaatttccccatagttctcctatggtgaagagtaagccggcactcttgtctgggggtcttcgcatgaataagggtgcaatcactccccctcgaacaacatcccctgccaatacatgttcacccgaggttattcacctaaaggacattgtctgctatctgagtcttcttgagagagggaggcctgaggacaagctagaattcatgtttcgattgtacgacaccgatggcaatgggttcctcgattcatccgaactggagaacattatctctcaaatgatgcacgtcgccgaatacttagagtgggatgtaacagagttgaatcccattcttcacgagatgatggaagagatcgattacgatcacgatggaactgtgtcgctggaggagtggattcaagggggaatgaccacaatcccccttcttgtacttctgggcctggagaacaatgttaaggacgacgggcagcacgtttggaggctcaagcactttaataagcccgcttattgtaatctttgcctcaacatgctcatcggggtgggtaagcaagggttgtgctgttccttttgtaaatataccgtgcacgaacgctgcgttgcaagagctcccccatcttgcatcaaaacatatgtgaaatccaagcggaatacagatgtcatgcatcactactgggtggaaggtaattgccccacaaaatgcgacaagtgccacaagaccgtgaagtgctaccagggactcactggacttcattgcgtgtggtgccaaatcaccttgcacaataaatgcgccagccacctgaagcccgagtgtgactgcgggcctctgaaagaccatatcctgccccctaccacaatctgcccggtcgtgctggagaggcagagcaccgtgaagaaggagaagtcagggtcccagcagcccaacaaggtcatagacaagaacaagatgcagcgcgcaaactccgttaccgtcgacggacagggcctccaagtgacaccagtgccaggaacacatccgttgctggtgtttgttaatcctaagagcggtggaaagcagggggagagaatttaccggaagttccagtatctgcttaacccacgacaggtgtattcactctctggcaatgggccaatgcccggactgaacttctttagagacgtaccagacttcagagtgctcgcctgcgggggagatggcacggtggggtgggtgcttgattgcatcgaaaaagccaacgtaggcaagcacccccctgttgctattctgccactcggaaccggcaatgacctcgctcggtgccttcggtgggggggtggttacgagggtgagaacttaatgaaaatcttgaaagacatagaaaatagtaccgaaatcatgcttgaccggtggaaattcgaggtgatccccaacgacaaggacgagaagggtgacccagttccctactccatcatcaataattatttcagtataggtgttgacgcgagcattgctcaccgattccatataatgcgagaaaaacatccagaaaagttcaacagccggatgaagaacaaattttggtactttgaatttggcacatccgagaccttcagcgctacctgtaaaaaactacatgaaagtgtagagatcgagtgcgatggcgttcagatagatctgattaacatctccttggaggggattgctatcctcaatatcccaagcatgcatggaggatccaacctgtggggggagagtaaaaagcgccgatctcacaggaggattgaaaagaaaggctctgataagaggacaacagtgacagatgccaaggagttaaagtttgccagccaggacctgagcgatcagctgctagaggtggtgggactggaaggagcgatggaaatgggtcagatctacaccggcctgaagtctgccggtaggagactggcccagtgctcctgtgtggtaataagaaccagcaaatccctgccaatgcagattgacggcgaaccctggatgcagaccccatgtaccattaagatcactcataaaaaccaggccccaatgctcatgggaccacccccaaagaccggcctgttttgttcgctggtgaagaggactcgaaataggtctaaagaatag

SEQ ID NO: 269790 - DNA, 2358 bp, Artificial Sequence
  derived and/or modified sequence
atgaccaaccaggagaagtgggcccacctgagccccagcgagttcagccagctgcagaagtacgccgagtacagcaccaagaagctgaaggacgtgctggaggagttccacggcaacggcgtgctggccaagtacaaccccgagggcaccatcgacttcgagggcttcaagctgttcatgaagaccttcctggaggccgagctgcccgacgacttcaccgcccacctgttcatgagcttcagcaacaagttcccccacagcagccccatggtgaagagcaagcccgccctgctgagcggcggcctgagaatgaacaagggcgccatcaccccccccagaaccaccagccccgccaacacctgcagccccgaggtgatccacctgaaggacatcgtgtgctacctgagcctgctggagagaggcagacccgaggacaagctggagttcatgttcagactgtacgacaccgacggcaacggcttcctggacagcagcgagctggagaacatcatcagccagatgatgcacgtggccgagtacctggagtgggacgtgaccgagctgaaccccatcctgcacgagatgatggaggagatcgactacgaccacgacggcaccgtgagcctggaggagtggatccagggcggcatgaccaccatccccctgctggtgctgctgggcctggagaacaacgtgaaggacgacggccagcacgtgtggagactgaagcacttcaacaagcccgcctactgcaacctgtgcctgaacatgctgatcggcgtgggcaagcagggcctgtgctgcagcttctgcaagtacaccgtgcacgagagatgcgtggccagagccccccccagctgcatcaagacctacgtgaagagcaagagaaacaccgacgtgatgcaccactactgggtggagggcaactgccccaccaagtgcgacaagtgccacaagaccgtgaagtgctaccagggcctgaccggcctgcactgcgtgtggtgccagatcaccctgcacaacaagtgcgccagccacctgaagcccgagtgcgactgcggccccctgaaggaccacatcctgccccccaccaccatctgccccgtggtgctggagagacagagcaccgtgaagaaggagaagagcggcagccagcagcccaacaaggtgatcgacaagaacaagatgcagagagccaacagcgtgaccgtggacggccagggcctgcaggtgacccccgtgcccggcacccaccccctgctggtgttcgtgaaccccaagagcggcggcaagcagggcgagagaatctacagaaagttccagtacctgctgaaccccagacaggtgtacagcctgagcggcaacggccccatgcccggcctgaacttcttcagagacgtgcccgacttcagagtgctggcctgcggcggcgacggcaccgtgggctgggtgctggactgcatcgagaaggccaacgtgggcaagcacccccccgtggccatcctgcccctgggcaccggcaacgacctggccagatgcctgagatggggcggcggctacgagggcgagaacctgatgaagatcctgaaggacatcgagaacagcaccgagatcatgctggacagatggaagttcgaggtgatccccaacgacaaggacgagaagggcgaccccgtgccctacagcatcatcaacaactacttcagcatcggcgtggacgccagcatcgcccacagattccacatcatgagagagaagcaccccgagaagttcaacagcagaatgaagaacaagttctggtacttcgagttcggcaccagcgagaccttcagcgccacctgcaagaagctgcacgagagcgtggagatcgagtgcgacggcgtgcagatcgacctgatcaacatcagcctggagggcatcgccatcctgaacatccccagcatgcacggcggcagcaacctgtggggcgagagcaagaagagaagaagccacagaagaatcgagaagaagggcagcgacaagagaaccaccgtgaccgacgccaaggagctgaagttcgccagccaggacctgagcgaccagctgctggaggtggtgggcctggagggcgccatggagatgggccagatctacaccggcctgaagagcgccggcagaagactggcccagtgcagctgcgtggtgatcagaaccagcaagagcctgcccatgcagatcgacggcgagccctggatgcagaccccctgcaccatcaagatcacccacaagaaccaggcccccatgctgatgggccccccccccaagaccggcctgttctgcagcctggtgaagagaaccagaaacagaagcaaggagtag

SEQ ID NO: 269791 - DNA, 3397 bp, Artificial Sequence
  derived and/or modified sequence
gcaaatgatcagagacgggtgaactgcaggcagcctgtgttgctgcctggaagtagatttccatctttcagacactagttccaatgggccgggtgttctggaagggggtggcagtggggaggaggatgctgtgagcagagttcttgaagctccactcctctggggaagccgagctgtgtgggagccttcttactgtgccgggagcgtgtgaattggaaaggatcctgagaactggctagtcccagttcctctccggaaaagcagtggctctcgcttcagagatgcgctcagctttcgcctgcatcacactgcattctttaacacattattgaaattacaagcatccaaagcagtttcatgtggacagattgcatattttgaaagcctgaggtattttatcatgaaacatgccatgtggaatctttgaagcatagacctctgcgcaacacctgaataaagaatcttttacctggtatgtgacagagcttctcaccaccaccatgacaaaccaggaaaaatgggcccacctcagcccttcggaattttcccaacttcagaaatatgctgagtattctacaaagaaattaaaggatgttcttgaagaattccatggtaatggtgtgcttgcaaagtataatcctgaagggacaatagattttgaaggtttcaaactattcatgaagacattcctggaagccgagcttcctgatgatttcactgcacaccttttcatgtcatttagcaacaagtttcctcattctagtccaatggtaaaaagtaagcctgctctcctatcaggcggtctgagaatgaataaaggtgccatcacccctccccggactacttctcctgcaaatacgtgttccccagaagtaatccatctgaaggacattgtctgttacctgtctctgcttgaaagaggaagacctgaggataagcttgagtttatgtttcgcctttatgacacggatgggaatggcttcctggacagctcggagctagaaaatatcatcagtcagatgatgcatgttgcagaataccttgagtgggatgtcactgaacttaatccaatcctccatgaaatgatggaagaaattgactatgatcatgatggaaccgtgtctctggaggaatggattcaaggaggaatgacaacgattccacttcttgtgctcctgggcttagaaaataacgtgaaggatgatggacagcacgtgtggcgactgaagcactttaacaaacctgcctattgcaacctttgcctgaacatgctgattggcgtggggaagcagggcctctgctgttccttctgcaagtacacagtccatgagcgctgtgtggctcgagcacctccctcttgcatcaagacctatgtgaagtccaaaaggaacactgatgtcatgcaccattactgggttgaaggtaactgcccaaccaagtgtgataagtgccacaaaactgttaaatgttaccagggcctgacaggactgcattgtgtttggtgtcagatcacactgcataataaatgtgcttctcatctaaaacctgaatgtgactgtggacctttgaaggaccatattttaccacccacaacaatctgtccagtggtactggaaagacaatcaacagtgaaaaaggaaaagagtggttcccagcagccaaacaaagtgattgacaagaataaaatgcaaagagccaactctgttactgtagatggacaaggcctgcaggtcactcctgtgcctggtactcacccacttttagtttttgtgaaccccaaaagtggtggaaaacaaggagaacgaatttacagaaaattccagtatctattaaatcctcgtcaggtttacagtctttctggaaatggaccaatgccagggttaaactttttccgtgatgttcctgacttcagagtgttagcctgtggtggagatggaaccgtgggctgggttttggattgcatagaaaaggccaatgtaggcaagcatcctccagttgcgattctgcctcttgggactggcaatgatctagcaagatgcctgcgatggggaggaggttacgaaggtgagaatctgatgaaaattctaaaagacattgaaaacagcacagaaatcatgttggacaggtggaagtttgaagtcatacctaatgacaaagatgagaaaggagacccagtgccttacagtatcatcaataattacttttccattggcgtggatgcctccattgcacacagattccacatcatgagagaaaaacacccagagaaattcaacagtagaatgaagaacaaattttggtattttgagtttggcacatctgaaactttctcagccacctgcaagaagctacatgaatctgtagaaatagaatgtgatggagtacagatagatttaataaacatctctctggaaggaattgctattttgaatataccaagcatgcatggaggatccaatctttggggagagtctaagaaaagacgaagccatcgacgaatagagaaaaaagggtctgacaaaaggaccaccgtcacagatgccaaagagttgaagtttgcaagtcaagatctcagtgaccagctgctggaggtggtcggcttggaaggagccatggagatggggcaaatatacacaggcctgaaaagtgctggccggcggctggctcagtgctcctgcgtggtcatcaggacgagcaagtctctgccaatgcaaattgatggggagccatggatgcagaccccatgcacaataaaaattacacacaagaaccaagccccaatgctgatgggcccgcctccaaaaaccggtttattctgctccctcgtcaaaaggacaagaaaccgaagcaaggaataatcctgtgttgtttcactcttagaaattgaattagcataattgggccatggaacacatatgctggaaatctttgaaccatttcaagtctcctgctcatgcaaaatcatggaagtggtttaacagtttttgttactaagctaatgtaaaattcagctattagaaaatttattgtctcagtttttataggcatctttgcatgaagaaagcagaagtttacctgaagtgatactgcatatttttggtgcatgcattcccatagatttttacatctcccacccaactcttccccaatttccttttactaacctgtgagaaaaacccgtgaaacatgaaaaaggaaataccatgggaaacgtgattctcagtgtgattccaattattacgaagcactaatcagtaacgctacaatgatcataattgcagattgctatacgtttcccttttagaatcagtgtatcagtgacctatgacttgaggagaaacttttaattcgaagattttattaaatagttgactacaataccttgctatatatacat

SEQ ID NO: 269792 - DNA, 2835 bp, Artificial Sequence
  derived and/or modified sequence
atgagcctgaccatcagagcccccagcgtggactacagaaacaccctgggcctgtgcggcaccttcgacgagaaccccgagaacgacttccacgacaagaacggcatgcagatcgaccagaacttcaacaactacgtggccttcatcaacgagtggagaatcctgcccggcaagagcatgagcgacaccctgcccgtgagcatgaccagccccggcaagcccagctactgcagctgcagcctggacaccgccgcctaccccagcagcgaggacctggacagcgtgagcagaagcgagatcgccctgggctgcaaggacctgaaccacgtgagcctgagcagcctgatccccgagctggacgtgaccagcgagtacatcaacagcgacaccctggtgagagagatcaacaagcacaccagccccgaggagtacaacctgaacctgttcctgcaggagaagaagcacatcaacctgaccaagctgggcctgaacgtgcagaagcaccccggcaacgagaaggaggacagcctgcagtacctggccaacaagaagtacacccagggcagaggcagccacagccaggagatgagatacaacagacagaacagatggaagagacagaacttccacgagttcccccccctgttcgccttccccagcctgagccagaccgacctggaggagctgacctacttcttccccgaggaccacgccgaggacgtgcagcaggagttcttccccagctggcccacccccagcggcctgaccgagtacagcaccctgaccctgtgccaggagaccctggccaacagcagcatcggcagactgtgcctggccttcctgggcaagagactggacagcgtgatcgagatgtgcgtgaaggacgtgctgctgaaggacgacctgagctgggccgaggccggcgtggccctgctggagaacgagtgcgagaagagaatcgtggaggagggcaagtacaacaccgaggagtacggcaccagcatcgaggacatcctgagcgtgctgaagtgccccaacctgtgcagcggcaacggccagtgcatggagtggggctgcgcctgcagccccagcttcagcagctacgactgcagcgacagctacgacaaggcccccgagatcaccgagctgggcaacgccggcttctgcgacgtgcagaagtacaactgcatgatggtgagagtgttcggcaagggcttcaaggagctgcccagcatcaagtgcgaggtgaccaagctgcagtacaacagcagcgagtggatgcccggcgagcccatctacacccagaccgtgttccacaacagcagagccgtggactgccagctgcccaccgacgtgcagcagttcgacaccatggacctggtgggcggcaagcccaccggcaagtggcagctgaaggtgagcaacgacggctacaagttcagcaaccccaagatcaccgtgatctacgacggcgcctgccaggtgtgcggcctgtacaagaacgacagctgcaccatcaaggagaacgtgtgcatcatcgacggcctgtgctacgtggagggcgacaagaaccccaccagcccctgcctgatctgcagacccaagatcagcagattcacctggagcttcctggagaacaaccagccccccgtgatccaggccctgcaggacaagctgcagaccttctacggcgagaacttcgagtaccagttcgtggccttcgaccccgagggcagcgacatccacttcaccctggacagcggccccgagggcgccagcgtgagcagcgccggcctgttcatgtggaagaccgacctgctgaccacccagcagatcaccgtgagactgaacgacgactgcgacgccgagaccagagtgaccatcgaggtgaccgtgaagagctgcgactgcctgaacggcggcagctgcgtgagcgacagaaacttcagccccggcagcggcgtgtacctgtgcgtgtgcctgcccggcttccacggcagcctgtgcgaggtggacatcagcggctgccagagcaacccctgcggcctgggcagctacatcagcggcttccacagctacagctgcgactgcccccccgagctgaaggtggagacccagttcgtgaaccagttcaccacccagaccgtggtgctgaccagaagcgacaagagcgtgaacaaggaggaggacgacaagaacgcccagggcagaaagagacacgtgaagcccaccagcggcaacgccttcaccatctgcaagtacccctgcggcaagagcagagagtgcgtggcccccaacatctgcaagtgcaagcccggctacatcggcagcaactgccagaccgccctgtgcgaccccgactgcaagaaccacggcaagtgcatcaagcccaacatctgccagtgcctgcccggccacggcggcgccacctgcgacgaggagcactgcaaccccccctgccagcacggcggcacctgcctggccggcaacctgtgcacctgcccctacggcttcgtgggccccagatgcgagaccatggtgtgcaacagacactgcgagaacggcggccagtgcctgacccccgacatctgccagtgcaagcccggctggtacggccccacctgcagcaccgccctgtgcgaccccgtgtgcctgaacggcggcagctgcaacaagcccaacacctgcctgtgccccaacggcttcttcggcgagcactgccagaacgccttctgccaccccccctgcaagaacggcggccactgcatgagaaacaacgtgtgcgtgtgcagagagggctacaccggcagaagattccagaagagacacctgtag

SEQ ID NO: 269793 - DNA, 2835 bp, Artificial Sequence
  derived and/or modified sequence
atgagtctgacgattcgggcacccagcgtggattataggaacactcttggcttatgtgggacatttgacgaaaaccccgagaacgacttccacgataagaatgggatgcagatagaccaaaacttcaacaattatgtggcttttataaacgaatggcgtatactgcctggtaagtcgatgtctgacacactgccggtgtccatgacctcccccggtaagccgagctattgttcttgcagcctggacactgcggcttatccctcgtcagaggatctggactccgtgagcagaagtgagattgctctaggctgtaaggatctgaaccatgtgtcgctgagctctctgatacccgaactagacgtcacgagcgagtatatcaattccgacactctggtaagagaaatcaacaagcacacttctccggaggaatataatctgaatcttttccttcaggagaaaaagcatatcaatctgacaaaactaggtttaaacgtgcagaaacaccccggtaatgaaaaggaggattctttgcaatatctggccaacaaaaaatatacgcagggtagaggctctcatagccaggagatgaggtataaccgacaaaacagatggaagcggcagaacttccacgagttccctcccctgttcgcttttccctcactgtcgcagaccgatctcgaagagctcacatatttctttccagaagatcacgccgaggacgtgcagcaggagttctttccatcctggcccaccccaagcgggttgactgagtactctacccttaccctttgtcaggaaaccttggcaaattcctctataggtcggctttgtctcgctttcctcggaaagcggctggatagcgtcatagaaatgtgtgtgaaagatgtgctgttgaaagatgaccttagttgggccgaagccggagtcgcgctgcttgaaaatgaatgcgaaaagcgaatagttgaggaaggaaagtacaacactgaagagtacggcacctctattgaggacatcctgagcgtgctgaagtgccctaatctgtgctcagggaacggacagtgtatggagtgggggtgtgcatgctccccttctttcagcagctacgactgtagtgatagctacgacaaagcacctgagataacagaactcggcaacgctgggttctgcgacgtacaaaagtacaattgcatgatggttcgcgtcttcggcaagggtttcaaagagctgcctagtatcaaatgtgaagtgaccaaactccagtacaacagcagtgagtggatgcccggggaaccaatctacacacagacagtcttccacaattcacgagctgtggactgccaattaccaacagatgttcagcagttcgacaccatggatctggtgggaggaaaacctaccgggaagtggcagttaaaggtgtctaatgacggctataaatttagcaacccaaagataaccgtcatctacgacggggcatgccaggtgtgtggcctgtacaaaaacgattcctgcaccatcaaggaaaacgtgtgcatcattgacggactctgttacgtggagggcgataagaatccaacttcgccttgcctgatttgtcgcccaaagattagtcggtttacatggtcctttctggagaataaccagccgcccgtgatccaagccctgcaagacaagctgcagaccttttacggagagaatttcgaatatcaatttgtggccttcgacccagagggatccgacatacattttacgctggactctgggcccgaaggggcatccgtgtcaagcgcagggctgtttatgtggaaaaccgatctactgacaactcagcagatcacagtgagactgaacgacgattgcgatgccgagacccgcgttacgattgaagtgaccgtcaagtcttgcgattgcttgaatggtggttcctgtgtgagcgaccggaatttttctcccggaagcggcgtgtatctttgtgtctgtctgcctggctttcacggcagcctatgcgaggtcgatatctccggatgtcagtctaacccctgcggtctcggttcctacatctctggattccactcctactcctgtgactgtccacctgagctgaaagtcgaaacccagttcgttaatcagttcacgacccagacagtcgtgctgacccggtcagataaatcagtcaacaaagaggaggacgataaaaacgcacaagggcggaaaagacacgtgaaacctacttcgggcaacgcctttacgatctgtaagtacccctgcggcaaatctagggaatgcgtagctcctaacatctgcaaatgcaagccaggctatatagggtctaactgtcagaccgccctgtgcgaccccgattgtaagaaccacggtaagtgtattaagccaaatatttgccagtgcttgccaggtcacggaggcgccacttgtgatgaggagcactgcaacccaccctgccagcacgggggaacgtgtcttgccggcaacctgtgtacatgcccgtacggcttcgtgggtccgcggtgcgagaccatggtttgtaatcgacactgcgagaacgggggacagtgcctgactcctgatatttgccagtgtaagccgggctggtacggccccacgtgctccactgccttgtgcgaccccgtgtgtctaaatggcggctcttgtaataagccaaacacttgcctgtgtcctaacggcttctttggggaacactgccaaaatgctttctgccaccccccctgcaagaacggcggacattgcatgagaaataatgtgtgtgtgtgccgcgaggggtacactggtagacgtttccagaaaaggcacctctag

SEQ ID NO: 269794 - DNA, 2835 bp, Artificial Sequence
  derived and/or modified sequence
atgagcctgaccatccgggcccccagcgtggactacagaaacaccctgggcctgtgtggcacctttgatgagaacccagaaaatgacttccatgacaagaatggcatgcagattgaccagaacttcaacaactacgtggccttcatcaatgagtggaggatcctgcccgggaagtccatgtctgacaccctgcctgtgtccatgaccagccctgggaagcccagctactgcagctgcagcctggacacagctgcctaccccagcagcgaggacctggacagcgtgagccgctctgagatcgccctgggctgcaaggacctgaaccacgtgtccctgagcagcctcatccctgagctggatgtgaccagcgagtacatcaacagcgacaccctggtgcgggagatcaacaagcacaccagccctgaggagtacaacctgaacctcttcctgcaggagaagaagcacatcaacctgaccaagctgggcctgaatgtgcagaagcaccctggaaatgagaaggaggacagcctgcagtacctggccaacaagaagtacacccagggccggggcagccacagccaggagatgagatacaaccggcagaaccgctggaagaggcagaacttccacgagttcccccccctgtttgccttccccagcctgagccagacagacctggaggagctgacctacttcttcccagaagatcatgctgaagatgtgcagcaggagttcttccccagctggcccaccccatctggcctgacagagtacagcaccctgaccctgtgccaggagaccctggccaacagcagcatcggccgcctgtgcctggccttcctgggcaagaggctggacagcgtgattgagatgtgtgtgaaggatgtgctgctgaaggatgacctgtcctgggccgaggccggcgtggccctgctggagaatgaatgtgagaagagaattgtggaggagggcaagtacaacacagaggagtatggcaccagcattgaggacatcctgtctgtgctgaagtgccccaacctgtgcagcggaaatggccagtgcatggagtggggctgtgcctgcagccccagcttcagcagctatgactgcagcgacagctatgacaaggcccctgagatcacagagctgggcaatgccggcttctgtgatgtgcagaagtacaactgcatgatggtgcgggtgtttgggaagggcttcaaggagctgcccagcatcaagtgtgaggtgaccaagctgcagtacaacagcagcgagtggatgcctggagagcccatctacacccagaccgtcttccacaacagcagagctgtggactgccagctgcccacagatgtgcagcagtttgacaccatggacctggtgggcggcaagcccaccgggaagtggcagctgaaggtgtccaatgatggctacaagttcagcaaccccaagatcaccgtcatctatgatggagcctgccaggtgtgtggcctgtacaagaatgacagctgcaccatcaaggaaaatgtgtgcatcattgatggcctgtgctacgtggagggggacaagaaccccaccagcccctgcctgatctgccggcccaagatcagccgcttcacctggagcttcctggagaacaaccagccccctgtgatccaggccctgcaggacaagctgcagaccttctatggagaaaattttgagtaccagtttgtggcctttgatcctgagggcagtgacatccacttcaccctggacagcggccctgagggcgcctctgtgagcagcgctggcctcttcatgtggaagacagacctgctgaccacccagcagatcaccgtgcggctgaatgatgactgtgatgctgagaccagggtgaccatcgaggtgacagtgaagagctgtgactgcctgaatggaggcagctgtgtgtctgacaggaacttcagccctggcagcggcgtgtacctgtgtgtgtgcctgcccggcttccacggcagcctgtgtgaggtggacatcagcggctgccagagcaacccctgtggcctgggcagctacatcagcggcttccacagctacagctgtgactgccccccagagctgaaggtggagacccagtttgtgaaccagttcaccacccagacagtggtgctgaccaggagtgacaagtctgtgaacaaggaggaggatgacaagaatgcccagggcaggaagagacatgtgaagcccaccagcggaaatgccttcaccatctgcaagtacccctgtgggaagagcagagaatgtgtggcccccaacatctgcaagtgcaagccaggctacatcggcagcaactgccagacagccctgtgtgaccctgactgcaagaaccacggcaagtgcatcaagcccaacatctgccagtgcctgcccggccacggcggggccacctgtgatgaggagcactgcaaccccccctgccagcacggcggcacctgcctggccggcaacctgtgcacctgcccctacggctttgtgggcccccgctgtgagaccatggtgtgcaacagacactgtgaaaatggaggccagtgcctgaccccagacatctgccagtgcaagccaggctggtacggccccacctgcagcacagccctgtgtgaccctgtgtgcctgaatggaggcagctgcaacaagcccaacacctgcctgtgccccaacggcttctttggagagcactgccagaatgccttctgccaccccccctgcaagaatggaggccactgcatgaggaacaacgtgtgtgtgtgccgggagggctacacaggaagacgcttccagaagaggcacctgtag

SEQ ID NO: 269795 - DNA, 2835 bp, Artificial Sequence
  derived and/or modified sequence
atgagcctgaccatccgggcccccagcgtggactaccggaacaccttagggctgtgtggtactttcgacgagaacccggagaatgatttccacgacaagaatggtatgcagattgaccagaattttaacaattacgttgcgtttattaacgaatggaggattctgccaggaaagtcgatgtccgataccctcccagtgtctatgacctccccagggaaaccaagctattgtagctgctctttggacacagccgcgtaccccagcagtgaggacctcgatagcgtgagtagaagcgagatcgccctgggttgtaaagacctaaatcacgtcagtctctctagtctgataccagagctcgatgtcacctcagagtatataaatagcgatactctggtccgcgaaatcaataagcacacctcccccgaagaatataatctgaacctgttcctgcaggaaaaaaagcatatcaacttaactaagcttggtctgaatgtgcagaagcatcctggcaatgagaaggaagacagtctgcagtacctcgccaacaaaaaatacacccagggacgtggctctcattctcaggagatgaggtacaatcgtcagaatcgttggaagagacagaatttccacgagttccctcccctgttcgccttccctagtctgtctcagacggatcttgaggagttgacctattttttccccgaagatcatgccgaggacgttcagcaggaattcttcccaagttggccaacccccagcggcctgaccgagtattctacacttacgttatgccaggaaacgctagccaattcctccatcgggaggctgtgcctggccttcctggggaaacgtctggatagcgtgatcgaaatgtgtgtgaaggacgttcttctgaaggacgacctcagttgggccgaggccggtgtggctcttctcgagaatgaatgtgagaaacgcatcgtcgaggaggggaagtataataccgaagaatatggcacaagcattgaggatattctttctgtcctgaagtgccctaatctatgttccgggaatggccaatgtatggagtgggggtgcgcctgttccccctcttttagctcttacgactgctctgacagctacgacaaggcacccgagattactgaactgggtaacgccgggttttgcgatgtacagaagtacaactgcatgatggttagggtgttcggcaaaggtttcaaggaactcccatctatcaagtgcgaagtgacaaagcttcagtacaacagctccgaatggatgccaggagagcctatctatacccagacagtgttccataattcccgggccgttgactgtcaactgcccacagatgtccagcaatttgacacaatggacttagtgggaggcaaacctacaggcaagtggcagctcaaagtgtctaacgatgggtataaattttctaaccccaaaataaccgtaatctatgacggggcttgccaagtgtgcgggctgtacaaaaacgactcatgcaccataaaggaaaacgtgtgtattatcgacggtctgtgctacgtggagggcgataaaaatcccacatctccttgtctcatctgcagaccgaagatttctcggtttacttggtctttcttggagaataatcagcctcccgttattcaggcccttcaggataagctgcaaacattctacggagagaatttcgagtaccaattcgtggcctttgaccctgagggttccgacatccactttacactagacagcggccctgagggcgccagcgtgagcagcgccggacttttcatgtggaaaactgatctcctgacaacacagcaaatcactgttcgcctgaacgacgactgtgacgcagagacccgcgtgacaattgaggtcacagttaagtcatgtgactgccttaacggcggatcctgtgttagcgatcgcaacttttcacccggctcgggagtgtacttgtgcgtgtgcctccccggctttcatgggagcctgtgcgaagtggacatttcagggtgtcagtcgaatccctgcggcttaggaagctacatcagcggtttccattcttattcgtgcgactgccctcccgaactgaaggtggaaacgcagttcgtgaaccaatttacgacacagacagtagtgctcacaaggtccgacaagagcgtgaataaagaggaagatgacaaaaatgcgcagggtaggaagaggcatgttaagcccactagcggtaacgcttttaccatatgcaaatatccctgcggaaaatcacgcgaatgcgtagcccccaacatctgtaaatgcaagcccgggtacattggctcaaactgccagacagccctctgcgatcccgattgcaaaaatcatggtaaatgtattaagccaaacatctgtcagtgtctgccagggcatggaggggccacgtgcgacgaggaacactgtaatcctccctgtcagcacgggggcacctgcctggctggcaatctctgcacctgcccgtatgggtttgttggaccaaggtgtgagaccatggtgtgcaatagacactgcgaaaacgggggtcagtgtctgactcccgacatttgccagtgcaaaccaggctggtacgggcccacttgctccactgcgctctgcgaccccgtttgtttaaacggtggatcctgtaacaagccaaatacctgcctttgccccaatggattcttcggtgaacactgccagaatgccttctgtcacccaccatgcaaaaacgggggacactgcatgcggaacaatgtgtgtgtatgcagggaggggtacacaggcagaaggtttcagaaacgacacctgtag

SEQ ID NO: 269796 - DNA, 2835 bp, Artificial Sequence
  derived and/or modified sequence
atgtcgctgactataagggctccatctgtggattaccgaaacactctgggcctttgcgggaccttcgacgagaaccctgagaacgatttccatgataagaatggtatgcaaatcgaccagaactttaacaactacgttgctttcataaacgaatggagaatccttcctggaaaaagtatgtccgatacgcttcccgtatctatgacgagcccgggaaagccctcttactgttcatgctccctggacacagctgcttatcccagtagtgaagatttggacagtgtgagtcgttcggagattgccttaggatgtaaggacctcaatcacgtctccctttccagcctgattcccgagctagatgtgaccagtgagtacatcaattctgatacgctggtaagggaaatcaacaagcacacttctcctgaggagtataatctgaacttgttcttacaggagaagaagcatattaacctgacgaagttgggactgaacgttcagaagcaccccggtaacgagaaagaagatagcctccagtacctggcaaacaagaaatacacacagggccgaggttcccatagccaggaaatgaggtataaccgtcagaaccggtggaaacggcaaaacttccatgagttccctcctctgtttgcctttccttccctgagccaaaccgatctggaggaattgacatatttcttccctgaagatcacgccgaggatgtgcaacaagaatttttcccttcctggcccactccgtccggattgaccgaatacagtactctaaccttatgccaagagacgctggctaatagctccataggtcgcctttgtctagcctttctggggaaacgtctcgactccgtgattgaaatgtgtgttaaagatgtgctgctgaaagacgatctatcttgggccgaagctggagtcgcactgctcgagaacgagtgcgaaaagaggatcgttgaggagggcaaatataatactgaggaatacgggacatctattgaggacatcctgagcgtcctaaagtgccccaatctgtgcagcggaaatggccaatgtatggaatggggttgcgcatgtagcccatcattttcttcttacgattgttcggatagctacgataaagcccctgagataacagagctcggaaatgccggattctgtgatgtgcagaaatacaactgcatgatggtaagagtgttcggcaagggctttaaggaactgccctcaatcaaatgcgaggtgactaaacttcaatacaactcctctgagtggatgccaggcgagcccatctacacacagaccgtattccataacagtagagctgtggattgccaacttccaaccgatgtgcaacagtttgacacaatggacctcgtgggcggaaaaccaaccggcaaatggcagctaaaggtctccaatgatggatataagttttcgaatccaaagataacagttatttatgatggcgcatgccaagtctgcgggttgtacaaaaatgacagctgcacaattaaggagaatgtgtgcattatagacggactttgttatgtcgagggcgataagaatccgacctcaccctgcctgatttgtcgcccaaagatatctaggtttacttggtcctttctcgagaacaaccagcccccagtgatccaggcgctccaggacaagctgcagacattctacggcgagaacttcgagtaccagtttgtggctttcgatcctgaaggttctgacatccactttacgcttgatagtggccctgagggtgccagcgtctcctccgcaggcttatttatgtggaaaactgacctcctgaccacgcagcagattactgtgaggctgaacgatgattgcgatgctgaaactagagtgacaatagaggtaactgtgaagtcctgcgactgcttgaacggtggttcatgtgtgagcgaccggaacttttcccccggatccggcgtgtacttgtgcgtgtgcttacctggcttccatgggtccctgtgcgaggttgacatatccggatgccagagcaacccatgtggccttggttcctacattagtggcttccactcctattcttgcgattgtcccccagaactgaaggtggagacacagtttgttaaccagttcactacacaaaccgtcgttctgacacggtccgataagagcgtgaacaaagaggaggatgacaagaatgcccagggccgaaaaaggcacgtaaagcctacatccggtaacgcgtttaccatttgcaaatatccctgtggtaagtcgcgtgagtgtgtggctcccaacatctgcaagtgtaagcctggatacatcggctctaattgtcagaccgctttgtgcgacccagattgcaaaaatcacgggaaatgtataaaacctaacatctgtcaatgcttaccaggacatggaggagcgacatgcgatgaggagcactgtaaccctccctgccagcacggtggtacgtgcttagccggaaacctttgtacctgtccctatggattcgtgggacccagatgtgagactatggtgtgcaataggcattgcgagaacggcggacagtgtcttacaccagatatctgtcaatgcaagcctgggtggtatgggccaacctgctccactgcactctgcgacccagtatgtctgaacggtgggtcatgtaacaaaccaaacacctgcctgtgccctaacggatttttcggcgaacattgtcagaatgccttctgccaccctccctgcaagaacggcggacactgcatgaggaataacgtctgtgtatgccgagaaggctacactggaagacgctttcaaaaacgccatttatag

SEQ ID NO: 269797 - protein, 310 aa, Artificial Sequence
  derived and/or modified sequence
MGYLRIFSPHPAKTGDGAQAEDLLLEVDLRDPVLQVEVGKFVSGTEMLHLAVLHSRKLCVYSVSGTLGNVEHGNQCQMKLMYEHNLQRTACNMTYGSFGGVKGRDLICIQSMDGMLMVFEQESYAFGRFLPGFLLPGPLAYSSRTDSFLTVSSCQQVESYKYQVLAFATDADKRQETEQQKLGSGKRLVVDWTLNIGEQALDICIVSFNQSASSVFVLGERNFFCLKDNGQIRFMKKLDWSPSCFLPYCSVSEGTINTLIGNHNNMLHIYQDVTLKWATQLPHIPVAVRVGCLQFSLWKHLLPRSSTLEK

SEQ ID NO: 269798 - protein, 454 aa, Artificial Sequence
  derived and/or modified sequence
  misc_feature (1)..(1): Xaa can be any naturally occurring amino acid
XDLVPSVTVKVTLQNRVILQKAKLSVYVQPPLELTCDQFTFEFMTPDLTRTVSFSVYLKRSYTPSELEGNAVVSYSRPTDRNPDGIPRVIQCKFRLPLKLICLPGQPSKTASHKITIDTNKSPVSLLSLFPGFASQSDDDQVNVMGFHFLGGARITVLASKTSQRYRIQSEQFEDLWLITNELILRLQEYFEKQGVKDFACSFSGSIPLQEYFELIDHHFELRINGEKLEELLSERAVQFRAIQRRLLARFKDKTPAPLQHLDTLLDGTYKQVIALADAVEENQGNLFQSFTRLKSATHLVILLIALWQKLSADQVAILEAAFLPLQEDTQELGWEETVDAAISHLLKTCLSKSSKEQALNLNSQLNIPKDTSQLKKHITLLCDRLSKGGRLCLSTDAAAPQTMVMPGGCTTIPESDLEERSVEQDSTELFTNHRHLTAETPRPGKRLDGLHKR

SEQ ID NO: 269799 - DNA, 933 bp, Artificial Sequence
  derived and/or modified sequence
atgggctatttacggattttctctccacaccccgcgaagaccggtgatggagcccaggcagaagaccttctcctggaagttgatctgcgggaccccgtgctgcaggttgaagtcggaaagtttgtcagcggaactgagatgctgcatctcgccgttctgcacagtcgcaagctgtgtgtgtactcagtctctggcacactgggcaacgtggagcatggaaaccagtgtcaaatgaagcttatgtacgagcacaatctgcagcgcaccgcgtgcaacatgacttacggaagcttcgggggagtgaagggacgagatctcatctgtatccagagcatggacgggatgctgatggtatttgagcaggaaagctacgcatttggacgttttctgcccggcttcctactgcctggcccactggcatattcaagccgtaccgacagttttctgactgtatcatcttgtcaacaggtggaatcatacaagtaccaggtcctcgcgttcgcaactgatgccgacaagagacaggagaccgagcagcagaagttgggatccgggaagcgcttggtagtggactggacacttaatattggtgaacaggctttagatatatgtatagtgtctttcaatcaatccgccagtagtgtgttcgtgctcggagaaaggaacttcttctgtctgaaagacaatggacagatccgcttcatgaaaaaactggactggtcaccttcctgcttccttccgtactgctccgtgagcgaaggcactatcaatacactcatcggcaatcacaacaacatgctacacatctatcaggacgtaaccctgaagtgggcgacccaactgccccatatacctgttgccgtgcgcgtgggctgcctgcagttttctctctggaagcatctgttgccccggagctccaccttagagaagtag

SEQ ID NO: 269800 - DNA, 294 bp, Artificial Sequence
  derived and/or modified sequence
atgtcactgtttaaggctcgcgattggtggtccacgatcctgggggacaaagaagaattcgaccagggatgtctttgtcttgcgaacgtggacaacagtggaaatggccaggacaagattattgtcgggagctttatgggctacctgaggatcttctccccgcaccccgctaagactggtgatggagcccaggcagaggacctgctgttggaggtggaccttagagatcctgtactgcaggtggaggtgggcaaattcgtgagcggcaccgaaatgctgcacctggccgtgtag

SEQ ID NO: 269801 - DNA, 1227 bp, Artificial Sequence
  derived and/or modified sequence
atgaagttaatgtacgaacacaatctccagcgcactgcctgcaatatgacctacgggagctttggcggggtgaaaggacgagatcttatctgtatccagagcatggacggtatgctgatggtctttgagcaagaatcttacgccttcggccggtttttgcccgggttcctcctgccgggccccctggcatatagttcaagaacggacagctttttaacagtatcaagctgtcagcaggtggagtcctataagtaccaggttttggcattcgccaccgacgctgacaagcgtcaggaaacagaacagcagaagctcggctccggcaagagactggtggtggactggaccctcaatatcggcgagcaggctctggatatttgtatcgtgagcttcaaccagtccgcctctagcgtgttcgttctgggagagcgcaactttttctgcctgaaggacaacggccagattaggtttatgaaaaagctcgattggagcccttcctgcttcctgccttactgttctgtgtctgagggtacaatcaatacactaattggcaatcataacaatatgttgcacatttatcaggatgttacattaaaatgggccactcaactgcctcacatccccgtggccgtgcgggttggttgtcttcatgatttgaagggcgtgatcgtgacgttatccgacgacggtcatcttcaatgctcttatttgggaacagacccctctctattccaagcccctaatgtacagtcgcgagagttgaactacgatgaattggatgtggaaatgaaagagcttcagaaaataatcaaggatgtcaataaatcacagggcgtctggccaatgaccgagcgtgaggacgacctgaacgtatcagtcgttgtcagccccaacttcgacagtgtgtctcaggcaactgacgtggaggtaggcaccgacctggtgccgtctgtgacggtcaaagtgactctccagaatcgcgtaattctgcagaaggcaaaactcagtgtgtatgtccaaccccctttggagctgacttgtgaccagtttacctttgagtttatgacgcctgatctgactcgtactgtctcgttctcagtgtatcttaaacgtagcattcaccaccaaaactggaaagagatgctattgttcctgatccctgatcaacagattgagattctgatggcattccgcgagcttagcaatgtgaatctggattttccgtag

SEQ ID NO: 269802 - DNA, 933 bp, Artificial Sequence
  derived and/or modified sequence
atgggctacctgcgcatcttcagcccccacccagccaagacaggagatggagcccaggccgaggacctgctgctggaggtggacctgcgggaccctgtgctgcaggtggaggtgggcaagtttgtgtctggaacagagatgctgcacctggccgtgctgcacagcaggaagctgtgtgtgtacagcgtgtctggcaccctgggcaatgtggagcacggcaaccagtgccagatgaagctgatgtatgagcacaacctgcagaggacagcctgcaacatgacctacggcagctttggaggagtgaagggccgggacctgatctgcatccagagcatggatggcatgctgatggtgtttgagcaggagagctatgccttcggccgcttcctgcccggcttcctgctgcccggccccctggcctacagcagcaggacagacagcttcctgactgtgagcagctgccagcaggtggagagctacaagtaccaggtgctggcctttgccacagatgctgacaagaggcaggagacagagcagcagaagctgggcagcggcaagaggctggtggtggactggaccctgaacatcggggagcaggccctggacatctgcatcgtgtccttcaaccagagcgccagctctgtgtttgtgctgggggagaggaacttcttctgcctgaaggacaatggccagatccgcttcatgaagaagctggactggagccccagctgcttcctgccctactgcagcgtgtctgagggcaccatcaacaccctcatcggcaaccacaacaacatgctgcacatctaccaggatgtgaccctgaagtgggccacccagctgccccacatccctgtggccgtgcgggtgggctgcctgcagttcagcctgtggaagcacctgctgcccaggagcagcaccctggagaagtag

SEQ ID NO: 269803 - DNA, 294 bp, Artificial Sequence
  derived and/or modified sequence
atgagcctcttcaaggcccgggactggtggagcaccatcctgggggacaaggaggagtttgaccagggctgcctgtgcctggccaacgtggacaacagcggaaatggccaggacaagatcatcgtgggcagcttcatgggctacctgcgcatcttcagcccccacccagccaagacaggagatggagcccaggccgaggacctgctgctggaggtggacctgcgggaccctgtgctgcaggtggaggtgggcaagtttgtgtctggaacagagatgctgcacctggccgtgtag

SEQ ID NO: 269804 - DNA, 1227 bp, Artificial Sequence
  derived and/or modified sequence
atgaagctgatgtatgagcacaacctgcagaggacagcctgcaacatgacctacggcagctttggaggagtgaagggccgggacctgatctgcatccagagcatggatggcatgctgatggtgtttgagcaggagagctatgccttcggccgcttcctgcccggcttcctgctgcccggccccctggcctacagcagcaggacagacagcttcctgactgtgagcagctgccagcaggtggagagctacaagtaccaggtgctggcctttgccacagatgctgacaagaggcaggagacagagcagcagaagctgggcagcggcaagaggctggtggtggactggaccctgaacattggagagcaggccctggacatctgcatcgtgtccttcaaccagagcgccagctctgtgtttgtgctgggggagaggaacttcttctgcctgaaggacaatggccagatccgcttcatgaagaagctggactggagccccagctgcttcctgccctactgcagcgtgtctgagggcaccatcaacaccctgattggcaaccacaacaacatgctgcacatctaccaggatgtgaccctgaagtgggccacccagctgccccacatccctgtggccgtgcgggtgggctgcctgcatgacctgaagggcgtgattgtgaccctgagtgatgatggccacctgcagtgcagctacctgggcacagaccccagcctcttccaggcccccaacgtgcagagccgggagctgaactatgatgagctggatgtggagatgaaggagctgcagaagatcatcaaggatgtgaacaagagccagggcgtgtggcccatgacagagcgggaggatgacctgaatgtgtctgtggtggtgagccccaactttgattctgtgtcccaggccacagatgtggaggtgggcacagacctggtgcccagcgtgacagtgaaggtgaccctgcagaacagagtcatcctgcagaaggccaagctgtctgtgtatgtgcagccccccctggagctgacctgtgaccagttcacctttgagttcatgaccccagacctgaccaggacagtgtccttctctgtgtacctgaagaggagcatccaccaccagaactggaaggagatgctgctcttcctgatcccagaccagcagatcgagatcctgatggccttccgggagctgagcaatgtgaacctggacttcccctag

SEQ ID NO: 269805 - DNA, 933 bp, Artificial Sequence
  derived and/or modified sequence
atgggctacctgcggatcttcagcccccaccccgccaagaccggcgacggggcccaggccgaggatttgttgctggaagtggatctccgagatcctgtgctccaagtggaggtagggaagttcgtgtccggcaccgagatgctgcatctggccgtgttacactcccgcaaattgtgcgtgtacagtgtcagcgggaccctcggtaacgtcgaacatggtaatcagtgtcagatgaagctcatgtacgagcacaacctgcagagaaccgcttgtaatatgacctacggaagctttggcggagtaaagggccgcgacctgatctgcattcagagtatggacggtatgcttatggtcttcgaacaggaatcatacgctttcggccgctttctgcccggattcttactcccaggtcccctcgcgtatagttcccggacagacagtttcctgactgtgtcctcttgtcagcaggttgagagctataagtatcaggtgctggcatttgccacagatgcagacaaaagacaggagacagagcaacagaaactgggttcaggcaagcgcctggtcgtcgattggacactcaacataggagagcaagccctcgatatctgcatcgtgtccttcaaccagtccgccagctccgtgtttgtactgggggagcgaaattttttctgcctgaaggataatggacagattcgattcatgaagaagttggactggtcacccagctgtttcctcccttactgcagcgtatcggaaggcaccattaatacccttattggcaatcacaataacatgctgcacatctatcaggatgttaccctgaagtgggcaacccagctaccgcatatccctgtggcagtcagagttggttgcttgcagttctcgctgtggaagcacctgctccccaggagttcaacacttgagaaatag

SEQ ID NO: 269806 - DNA, 294 bp, Artificial Sequence
  derived and/or modified sequence
atgagcctgttcaaggcccgggactggtggagcaccatcctgggcgataaagaagaatttgaccagggatgcctgtgcctcgcaaatgtggataattctggcaatggacaggacaaaatcattgtgggatcttttatgggttacctcagaatctttagcccacaccccgccaaaactggagacggcgcccaggcggaggacctgctgctggaggttgacctccgggatcctgttctgcaggtggaggtagggaagttcgtgagtggcaccgagatgctccacttggctgtttag

SEQ ID NO: 269807 - DNA, 1227 bp, Artificial Sequence
  derived and/or modified sequence
atgaagctgatgtacgagcacaacctgcagcggaccgcctgcaacatgacctatggctcctttggcggggtcaaaggaagagacctgatttgcatccaatccatggatgggatgctgatggtgtttgagcaggagtcctatgcctttggccgctttctgcctggatttctcctgcccgggcctctcgcgtactcctcccgaacagactcattcctcacagtcagctcttgccagcaggtagagagctacaagtaccaagtgctcgcattcgccacggacgctgataaacggcaagaaacagaacagcaaaaactagggtcaggcaagcgcctggtcgtggactggactttgaacataggcgagcaggcactggacatctgcatagtaagcttcaaccagtcagcaagtagtgttttcgttctcggcgaacgcaactttttctgtttaaaagataatggacagataaggttcatgaaaaaactggattggtcaccttcctgcttcctgccctattgtagcgtgagtgagggcaccattaataccctgattgggaaccacaataatatgctccacatttatcaagacgttacactgaaatgggcgactcaacttcctcacatccccgttgctgtgcgcgtaggctgtctgcacgacctgaagggtgtgatagtgactctatccgatgacggccacttacagtgctcttacttagggactgacccatccctgttccaggccccgaatgtccagtccagagagcttaactatgacgagctcgacgttgagatgaaagaattgcagaaaatcattaaagacgtcaacaagtcgcagggggtgtggcccatgaccgagcgtgaggacgatctcaacgtttccgtggtggtgtcgccaaatttcgattccgtgtctcaggccaccgatgttgaggtcggcactgacctagtcccatccgttaccgtcaaggtcactctacagaatagagtgatccttcaaaaagctaaattgtctgtgtacgttcagccaccccttgagctgacatgtgatcaattcacctttgagtttatgacacctgatttaacccgcaccgtgtccttcagcgtgtatctgaagaggtctatccatcatcagaattggaaggagatgcttttgttcctgatcccagaccagcagatagaaatcttgatggctttccgggagctgtcaaacgtcaatctggactttccctag

SEQ ID NO: 269808 - DNA, 933 bp, Artificial Sequence
  derived and/or modified sequence
atgggttatctgaggatctttagtccccatcccgctaaaactggcgacggtgcacaagcagaggaccttctactggaagtggatctgcgggacccggtattgcaggtggaggttgggaagtttgtgtccgggacagagatgctgcacctggctgtcttacattccaggaagttatgcgtgtactccgtgagtggaacactgggcaatgtggagcacgggaaccagtgtcagatgaagcttatgtatgagcataaccttcaacgaaccgcctgcaatatgacgtacggctcctttggcggtgtcaaaggcagggatctgatttgcatccaatccatggatgggatgctgatggtttttgaacaggagagctacgcctttggtaggtttctaccaggttttctgctgccaggcccactggcatactcttcacggaccgattcatttctgacagtgtctagctgtcagcaggtggagtcttataaatatcaggtcctcgcctttgcgacagatgcagacaagcgccaagagaccgaacagcagaagctcggttctggcaaaaggttggtggtggattggaccctcaatattggcgagcaggcactggacatatgcatcgtgagctttaatcagtccgcttcaagtgtcttcgtcttgggcgaaaggaatttcttttgtctcaaggataatggccagatacgcttcatgaagaaactcgattggtcaccctcttgcttcctgccctactgcagcgtctccgaggggacgatcaatacgcttatcgggaaccacaataacatgctgcacatttatcaagatgtcactcttaaatgggccacccaacttccgcacattcccgtagctgtacgagtcggatgtctgcagttctccctgtggaagcatctcctgcccagatcgagcacactggaaaagtag

SEQ ID NO: 269809 - DNA, 294 bp, Artificial Sequence
  derived and/or modified sequence
atgagtctgttcaaggcccgtgattggtggtccacaatcctgggagacaaggaggagttcgaccagggctgtttgtgccttgcgaacgttgataacagtggtaacggccaagacaagatcatagtcggttcattcatgggctatctcagaatcttcagcccgcacccagcgaaaacgggagacggcgcacaggctgaagatcttctgctcgaagtcgacctcagagacccggtgcttcaggttgaagttggaaagttcgtttccggaactgagatgctgcacttggccgtctag

SEQ ID NO: 269810 - DNA, 1227 bp, Artificial Sequence
  derived and/or modified sequence
atgaagttaatgtacgagcacaacttgcagcggaccgcatgcaatatgacatacggctctttcggaggagttaaagggagagatcttatatgcattcagtccatggacgggatgttaatggtttttgaacaggagtcctatgccttcggccgtttcttgccaggctttctcttacctggcccactggcatacagtagtcgcacagattcctttctcaccgtgtcctcctgtcagcaggtggagtcttacaagtatcaggtgcttgccttcgcaactgatgctgataagaggcaagaaactgaacaacagaaactgggcagtggaaagcgactcgtcgtggattggactctgaacatcggagagcaggctttggacatttgcattgtgtcatttaatcaaagtgccagcagtgtcttcgtgctgggagagcggaactttttctgtcttaaagacaatggtcagattcggttcatgaaaaagctggactggtccccctcttgttttctgccttactgcagtgtgtctgagggaacaatcaatacgcttattggcaaccacaacaacatgctgcacatctaccaggatgtcacactcaaatgggctacacagctgccccatatcccggtcgccgtaagagtgggatgcctgcacgacctgaagggtgttatcgttacactctcggatgatggtcacctgcagtgcagctacctcgggactgaccctagtctcttccaggctcccaacgtacagtctagagaactgaattatgacgagctcgatgttgagatgaaggaattgcagaaaatcatcaaagacgttaacaaatctcagggtgtgtggcctatgactgaacgcgaggacgacctcaacgttagtgtcgtggtgtctcctaattttgatagtgtgtcgcaggctaccgacgttgaggtcggcactgacctggttcccagtgtcactgtgaaagtcacactgcaaaacagggttatccttcagaaggccaagttgtcagtttacgtgcaaccacctctcgagctgacttgtgatcagttcacttttgaatttatgacacctgacctcactaggaccgtgtcgttctccgtatatcttaagaggagtatccatcaccagaattggaaggaaatgctcctgttccttattccagatcaacagattgagatcctgatggcttttagagagttgagtaacgtgaatcttgactttccatag

SEQ ID NO: 269811 - DNA, 1581 bp, Artificial Sequence
  derived and/or modified sequence
agtggcgtccgttgtaagtgctatgacaacagggcgaagatggctcagagttaggctggagaggggaggtgtcccttccgctgcggccgtcgggtttctgctacatcccattcaccgcctcctccatcctttcctcctcggtgtgagcagcaggacttgcatttgttctcgcctgcctagtgtcttccaagggatagatgccgtttcctctgctggtctctgggggtgacggggggcgcaggggagcttcttgggggaatcactccaactctgtggagctggtggtgctgcctggtggggctctctctttgcccgggacgtggaacaactttcagctggaggacgagagggaatagtgaagctaaaggttgcttttctctgcaccgtccgttcttgctccctctgctccatcactgggaccttgtcaggcgttcataaagcaaaatttgccgaacgagggttcgcagaaaggtggggcagagctcatctgacgtggcatcagtgtgaaagaaaatgtctttatttaaagcccgtgattggtggtctactattctgggagataaagaagaatttgatcaaggctgtttgtgtctggctaatgttgacaatagtggaaatggacaagataaaataattgtgggtagctttatgggatacctaaggatctttagcccccatcctgcaaaaacaggagatggagctcaagccgaagatttgcttctagaagtggatctacgagatccagtacttcaagtggaagtaggaaagtttgtttcaggtaccgaaatgctacatttggctgtgttacattctagaaaactttgtgtctactctgtctcaggaaccttgggtaatgtggaacatgggaaccaatgtcagatgaaattgatgtatgaacataatcttcagagaacagcctgcaatatgacctatggatcatttggtggtgtaaaaggtcgagatttaatttgcatccagtctatggatgggatgctgatggtatttgagcaggagagctatgcttttggaagatttctccctggctttcttctgcctggtcctcttgcctacagttcccgtacagattccttccttactgtctcttcctgccaacaagtggaaagttataagtaccaggtacttgcttttgcaacagatgcagataaaaggcaggagactgaacagcaaaaacttggttctggaaaaagactagttgtggattggactctaaatattggagagcaagcccttgacatatgtattgtctctttcaatcagtcggcatcctctgtttttgttcttggtgagagaaactttttttgccttaaggataatggacaaattcgattcatgaagaagcttgattggagcccaagttgttttctgccatattgctcagtttctgaaggaacaataaatactttgattggaaatcataataacatgctgcatatttatcaagatgtgacactgaagtgggccacccaacttccccacattcctgtagcagtaagagtgggctgtttgcaattttctttatggaagcatttgttgcctcgatcttccactttagaaaaatga

SEQ ID NO: 269812 - DNA, 613 bp, Artificial Sequence
  derived and/or modified sequence
cccacccacacgcaccgaggggagagggcggtcacgcggccgggggggcgtggcctgcccccggagcccaggcaggaggagggtcttccttaaggaactgctgccaggacagggcagaggattgcagtaattatcactctctgctaatgaggaccaggccgtggttcactcgagccccgccccagtagcaatctaattccaaccgcggccctctcagaagtcggtccccgcctttgcgcctcagcctctctggactccagcccccagaagtcggcgcggcacggcgtgacctgcgcagtggcgtccgtttgtgaaagaaaatgtctttatttaaagcccgtgattggtggtctactattctgggagataaagaagaatttgatcaaggctgtttgtgtctggctaatgttgacaatagtggaaatggacaagataaaataattgtgggtagctttatgggatacctaaggatctttagcccccatcctgcaaaaacaggagatggagctcaagccgaagatttgcttctagaagtggatctacgagatccagtacttcaagtggaagtaggaaagtttgtttcaggtaccgaaatgctacatttggctgtgtt

SEQ ID NO: 269813 - DNA, 933 bp, Artificial Sequence
  derived and/or modified sequence
atgggctacctgagaatcttcagcccccaccccgccaagaccggcgacggcgcccaggccgaggacctgctgctggaggtggacctgagagaccccgtgctgcaggtggaggtgggcaagttcgtgagcggcaccgagatgctgcacctggccgtgctgcacagcagaaagctgtgcgtgtacagcgtgagcggcaccctgggcaacgtggagcacggcaaccagtgccagatgaagctgatgtacgagcacaacctgcagagaaccgcctgcaacatgacctacggcagcttcggcggcgtgaagggcagagacctgatctgcatccagagcatggacggcatgctgatggtgttcgagcaggagagctacgccttcggcagattcctgcccggcttcctgctgcccggccccctggcctacagcagcagaaccgacagcttcctgaccgtgagcagctgccagcaggtggagagctacaagtaccaggtgctggccttcgccaccgacgccgacaagagacaggagaccgagcagcagaagctgggcagcggcaagagactggtggtggactggaccctgaacatcggcgagcaggccctggacatctgcatcgtgagcttcaaccagagcgccagcagcgtgttcgtgctgggcgagagaaacttcttctgcctgaaggacaacggccagatcagattcatgaagaagctggactggagccccagctgcttcctgccctactgcagcgtgagcgagggcaccatcaacaccctgatcggcaaccacaacaacatgctgcacatctaccaggacgtgaccctgaagtgggccacccagctgccccacatccccgtggccgtgagagtgggctgcctgcagttcagcctgtggaagcacctgctgcccagaagcagcaccctggagaagtag

SEQ ID NO: 269814 - DNA, 294 bp, Artificial Sequence
  derived and/or modified sequence
atgagcctgttcaaggccagagactggtggagcaccatcctgggcgacaaggaggagttcgaccagggctgcctgtgcctggccaacgtggacaacagcggcaacggccaggacaagatcatcgtgggcagcttcatgggctacctgagaatcttcagcccccaccccgccaagaccggcgacggcgcccaggccgaggacctgctgctggaggtggacctgagagaccccgtgctgcaggtggaggtgggcaagttcgtgagcggcaccgagatgctgcacctggccgtgtag

SEQ ID NO: 269815 - DNA, 1227 bp, Artificial Sequence
  derived and/or modified sequence
atgaagctgatgtacgagcacaacctgcagagaaccgcctgcaacatgacctacggcagcttcggcggcgtgaagggcagagacctgatctgcatccagagcatggacggcatgctgatggtgttcgagcaggagagctacgccttcggcagattcctgcccggcttcctgctgcccggccccctggcctacagcagcagaaccgacagcttcctgaccgtgagcagctgccagcaggtggagagctacaagtaccaggtgctggccttcgccaccgacgccgacaagagacaggagaccgagcagcagaagctgggcagcggcaagagactggtggtggactggaccctgaacatcggcgagcaggccctggacatctgcatcgtgagcttcaaccagagcgccagcagcgtgttcgtgctgggcgagagaaacttcttctgcctgaaggacaacggccagatcagattcatgaagaagctggactggagccccagctgcttcctgccctactgcagcgtgagcgagggcaccatcaacaccctgatcggcaaccacaacaacatgctgcacatctaccaggacgtgaccctgaagtgggccacccagctgccccacatccccgtggccgtgagagtgggctgcctgcacgacctgaagggcgtgatcgtgaccctgagcgacgacggccacctgcagtgcagctacctgggcaccgaccccagcctgttccaggcccccaacgtgcagagcagagagctgaactacgacgagctggacgtggagatgaaggagctgcagaagatcatcaaggacgtgaacaagagccagggcgtgtggcccatgaccgagagagaggacgacctgaacgtgagcgtggtggtgagccccaacttcgacagcgtgagccaggccaccgacgtggaggtgggcaccgacctggtgcccagcgtgaccgtgaaggtgaccctgcagaacagagtgatcctgcagaaggccaagctgagcgtgtacgtgcagccccccctggagctgacctgcgaccagttcaccttcgagttcatgacccccgacctgaccagaaccgtgagcttcagcgtgtacctgaagagaagcatccaccaccagaactggaaggagatgctgctgttcctgatccccgaccagcagatcgagatcctgatggccttcagagagctgagcaacgtgaacctggacttcccctag

SEQ ID NO: 269816 - DNA, 540 bp, Artificial Sequence
  derived and/or modified sequence
atggccgaggccgccgcccccccagactggcactgcggcctgaccagccgggagcggcccaggagtgacctgcagaggagccccttccggctgtcctggctgctcttccgctggtggaggcggcgctggaacccccggctgcccggctaccgggcctggagagatgcctgtggccagcccaggaggtcctggctgacagcccggcgctggctgtggagcagcggcacctcctggagggccctggtgaatggaggagccagcctggtgtgtggcagccaggtgggcctggtgtcctctgagtggctgtgccagaagggcctggtgtatgacagaaatgccggccagctggagcggccccaggccttctgccccggcagcagcaagaggaagggccaggtgggcggggccagccgggcccacagaagacccctgtggcacacctgtgcccaggtgagacatgctggcccctgcctgctgcggcctgtgtccctgggcctgcggagacatggagtgccctggggcgccagccagaggctgtag

SEQ ID NO: 269817 - protein, 353 aa, Artificial Sequence
  derived and/or modified sequence
MEKTLETVPLERKKREKEQFRKLFIGGLSFETTEESLRNYYEQWGKLTDCVVMRDPASKRSRGFGFVTFSSMAEVDAAMAARPHSIDGRVVEPKRAVAREESGKPGAHVTVKKLFVGGIKEDTEEHHLRDYFEEYGKIDTIEIITDRQSGKKRGFGFVTFDDHDPVDKIVLQKYHTINGHNAEVRKALSRQEMQEVQSSRSGRGGNFGFGDSRGGGGNFGPGPGSNFRGGSDGYGSGRGFGDGYNGYGGGPGGGNFGGSPGYGGGRGGYGGGGPGYGNQGGGYGGGYDNYGGGNYGSGNYNDFGNYNQQPSNYGPMKSGNFGGSRNMGGPYGGGNYGPGGSGGSGGYGGRSRY

SEQ ID NO: 269818 - protein, 443 aa, Artificial Sequence
  derived and/or modified sequence
MQKATYYDSSAIYGGYPYQAANGFAYNANQQPYPASAALGADGEYHRPACSLQSPSSAGGHPKAHELSEACLRTLSAPPSQPPSLGEPPLHPPPPQAAPPAPQPPQPAPQPPAPTPAAPPPPSSASPPQNASNNPTPANAAKSPLLNSPTVAKQIFPWMKESRQNTKQKTSSSSSGESCAGDKSPPGQASSKRARTAYTSAQLVELEKEFHFNRYLCRPRRVEMANLLNLTERQIKIWFQNRRMKYKKDQKGKGMLTSSGGQSPSRSPVPPGAGGYLNSMHSLVNSVPYEPQSPPPFSKPPQGTYGLPPASYPASLPSCAPPPPPQKRYTAAGAGAGGTPDYDPHAHGLQGNGSYGTPHIQGSPVFVGGSYVEPMSNSGPALFGLTHLPHAASGAMDYGGAGPLGSGHHHGPGPGEPHPTYTDLTGHHPSQGRIQEAPKLTHL

SEQ ID NO: 269819 - protein, 285 aa, Artificial Sequence
  derived and/or modified sequence
MKESRQNTKQKTSSSSSGESCAGDKSPPGQASSKRARTAYTSAQLVELEKEFHFNRYLCRPRRVEMANLLNLTERQIKIWFQNRRMKYKKDQKGKGMLTSSGGQSPSRSPVPPGAGGYLNSMHSLVNSVPYEPQSPPPFSKPPQGTYGLPPASYPASLPSCAPPPPPQKRYTAAGAGAGGTPDYDPHAHGLQGNGSYGTPHIQGSPVFVGGSYVEPMSNSGPALFGLTHLPHAASGAMDYGGAGPLGSGHHHGPGPGEPHPTYTDLTGHHPSQGRIQEAPKLTHL

SEQ ID NO: 269820 - protein, 54 aa, Artificial Sequence
  derived and/or modified sequence
MQKATYYDSSAIYGGYPYQAANGFAYNANQQPYPASAALGADGEYHRPACSLQS

SEQ ID NO: 269821 - protein, 84 aa, Artificial Sequence
  derived and/or modified sequence
MQKATYYDSSAIYGGYPYQAANGFAYNANQQPYPASAALGADGEYHRPACSLQSPSSAGGHPKAHELSEACLRTLSAPPSQPPS

SEQ ID NO: 269822 - DNA, 3257 bp, Artificial Sequence
  derived and/or modified sequence
tctcactagcctcagagcactctcagaagttcagaaactaagaccagaaaagagaagatttttagacagctcatgaaacggtctgcgcggggcggccattggcggcggagtgtcacgtgaccgcgggggcgtgccaatgtgcgccctcacgggtgtcaaacccctgtcagagtgtgcgatcaagatcgtgaaacaacgcgatgcaaaaagcgacctactacgacagctcggcgatctacggtggctacccctaccaggcagccaacgggttcgcttataatgccaatcagcagccgtacccggcgtccgccgctttgggcgccgacggcgagtaccaccgacccgcctgctccctccagtctccctccagcgccgggggccaccccaaggcacacgaactgagtgaggcgtgcctgcgcaccctgagcgccccacctagccagcctccaagcctgggagagccgcccctgcacccgccgccgccccaggccgcgccccctgccccacagccgcctcagcccgcacctcagccccctgcacctacccctgccgcgcccccgcctccctcttctgcctcccctcctcagaatgccagcaacaaccctacccctgccaacgcggccaagagccccctgctcaactcacccacagtggccaaacaaatcttcccctggatgaaagagtctcgacaaaacacaaagcagaaaaccagcagctccagctcaggcgaaagctgcgctggcgacaagagcccgccggggcaggcttcgtccaagcgcgcgcgcacggcctacacgagcgcgcagctggtggagctggagaaagagttccacttcaaccgctacctgtgccggccgcgccgggtggagatggccaatctgctgaacctcactgagcgccagatcaagatctggttccagaatcgccgcatgaagtacaaaaaggatcagaagggcaagggcatgctaacgtcatcggggggccagtctccaagtcgcagccccgtgccccccggagccggtggctatctgaactctatgcattcgctggtcaacagcgtcccgtatgagccccagtcgcccccgcccttctccaagcccccccagggtacctacgggctgccccccgcctcctaccctgcgtccctgcccagctgcgcacccccgccacccccacagaagcgctacacggcggcaggggcgggcgcagggggcacccccgactatgacccgcacgctcatggcctgcagggcaacggcagctatgggaccccacacatacagggaagccccgtcttcgtggggggcagctatgtggagcccatgagcaactccgggccagccctctttggtctaactcacctcccccacgctgcctcgggcgccatggactatgggggtgccgggccgctgggcagcggccaccaccacgggccggggcctggggagccgcaccccacctacacggaccttaccggccaccatccttctcagggaagaattcaggaagcacccaagctcacccacctgtgatagtgggcttggggctacgcgccaggagagtctccccccacccaccttttttctttggttgcttttttttttttttttttttaggttcttcctgccctttccttccttccttttctctcttctccgccccgcactccgtttcccggtttcccccctcgttggtaaggcgtttttatagtttatgtgacgtagcaatcttggttgctggaatggctgtatcatagcgatatttatctcttcctgctcctcgataggccactggccctgcaccctttaccttctccactctttgatcagaaacagggtatatgaacaaattttctagtcgagttttcaatgtgaatttgttcttacattatggctcccgaggggaagcgattactttttttaattttaaattttttttttaattgcacttcttgtaaagagtgagaaaaaaaatcaaaggcgctttgaaacaggggctctctgtgcaaggatgactaagtgtacgtctttccgtgtgtgtatgctggtgaacagtcagatttatttatatttttttgcaagcattgaataatctaagttttaaatattatttatccccatccgttcgtatttatattaaagaattctgtaccctgatggttcagaagggttcttgggccttttgttcaattgtgtattggcgtacttagaattttttttatttgaaagagaaatataattcctttaaacggtaacgatacaataaaaccagagaagatccagcttttgaaaacagtgatttaggtttgtaacatccggcaaaactgaaaaaaaaaatctgtaaacgcgaaaaatactagatttgttttgagagttcttcattccttgctgctcacattctgagaaacaaaaagaaataaagtttttattctgaataatatccgtgttaagaaggggttctttggccgaagacgtgggtctgcgtggaattcaggccgaggcgagccggcagagcaggccggacgcagcagccctctggctccagcatggggcctggccaggctattcgcctggaagctcggcgaattctcaggatggcggctggggctccaggcggctgcggcagctctggtaacgccgtgcggcgggccagctgggctgcccggttcccagctgctgcggaggcaggctgagggcgcaggggctgccgagtgctgtgcacggaagaaacaaagacatcccggcccaaggcgcagcgggagcgcacaggtgccccgcggcccagccgggggataacgcagggcggtcttctgctccatgctcttcctcgggtcaaagcggaccaactaacgcctaaacctcggtattagccagccgcgcagaggatgccgagcactttccgggagcaatcggactcctggtctcctccggggatgcttcgcggtctgttatcgcgtcaggaggaaagaattgctccaaaaatctgcacgcggagcgaaacagtttgaaagggactgaggctcacccaggtctccagcaaacggaggactgaactggggagagtcaccctgagccagcccttccctggactgccggaatcccagcattagcttcctgctgaatgtagtatttggcattctctgaatttatttcctctccttcccccacccagctttctttttatggccccagggggagggggagagagcaaggagatcggtatctttgtaataaaactgcaattttataaatttttca

SEQ ID NO: 269823 - DNA, 1332 bp, Artificial Sequence
  derived and/or modified sequence
atgcagaaggccacttactacgactctagcgcaatctatggcggctatccttatcaagccgcaaacggctttgcttacaatgcgaatcagcagccatatcctgccagtgccgctcttggcgccgatggagaataccacaggcccgcctgtagtttacagtcaccttctagcgcaggaggacaccctaaagcccacgagctgtctgaagcttgcttgaggacgctgtcagctcccccttcgcaaccacccagcctgggcgagccaccgctccatccgcccccacctcaggctgctcccccagctccacaacccccccagccagcaccacaaccacccgcgcccaccccagccgctcctcccccgccctcctctgcttcccctccccagaacgccagcaacaaccccaccccagctaacgcagctaaaagccctctgttaaattcccccaccgtggcgaaacagatcttcccctggatgaaggagtcacgacagaatactaagcagaagaccagcagttcatctagcggagaatcatgcgcaggcgataaaagtccaccaggccaggcttcttcaaagcgtgcacgaacggcttacaccagcgctcaactcgtcgaactggaaaaggagttccactttaaccgctatttatgtcggccccggagagtcgagatggcgaacctcctgaacctgacagagcgccagattaagatttggtttcagaaccgtcgcatgaaatacaagaaggaccagaaagggaaagggatgctgacaagttccggaggccaatctccatctcggagccccgtgcctccaggagccggaggctacctgaactcaatgcactccctcgtgaacagcgtgccatacgagccgcaatccccccctccgttcagtaaaccaccgcaggggacatatggattgcctccagcctcctaccctgcttccctaccatcgtgtgcaccccctccgcctcctcaaaagcggtataccgccgccggcgctggagctggcggcactcccgactatgacccccatgcacacggactccagggaaatgggtcatatggtaccccccacatccagggaagccctgtgtttgtgggcgggagttatgtggagccaatgagcaactccgggccagccctgttcggattgacacacttacctcacgccgcctctggagctatggattatggcggagccggccctctaggcagcggccatcatcacggcccaggcccaggggaaccacaccccacatacactgacctaactggacaccatcccagccaagggagaattcaggaagctcctaagttgactcatctgtag

SEQ ID NO: 269824 - DNA, 858 bp, Artificial Sequence
  derived and/or modified sequence
atgaaggagtcgaggcaaaacaccaagcagaaaacaagctctagcagcagcggcgagagctgcgccggcgataagtctcccccaggtcaggcatcgagcaaacgggctaggactgcttacaccagtgcccagttggtggaactggaaaaagaatttcatttcaaccgctacttatgtagaccccgccgcgtcgaaatggccaacctgcttaacttgactgagaggcaaatcaagatttggtttcagaatagaaggatgaagtacaagaaagatcagaagggcaaggggatgctaacctcctctgggggacaatctccctcccgctcaccggttccccctggagctggaggctacctcaactccatgcatagtctggtgaactccgtgccctacgaaccacagtctccacccccattttctaagccacctcagggaacctacggtctgccccctgcttcttatcctgcttcccttccaagctgcgcaccaccgccacccccacagaaacggtacacagccgcaggagctggagccggcggaacaccagattatgatccccacgcccatgggctgcagggcaatggaagctatggaactccgcacatccaaggctcccctgtcttcgttggggggtcctacgtcgagccaatgagcaactctggtcccgctttatttggactaactcaccttccgcacgccgcctcgggagctatggactacggtggtgctgggcccctaggatcgggccaccaccatggtcccgggccaggcgagccacacccgacctataccgatctgaccggccaccatcctagtcagggtcgcattcaggaggccccaaaactgacacacctctag

SEQ ID NO: 269825 - DNA, 1332 bp, Artificial Sequence
  derived and/or modified sequence
atgcagaaagctacatattatgactcttccgccatctatggggggtacccttaccaggccgcgaatgggttcgcttacaacgccaatcagcagccatacccagcctctgctgccttgggcgctgatggagagtaccacaggcctgcttgtagcctgcaaagcccctcgtccgcgggcgggcacccaaaggctcatgaactgtctgaagcctgtctgcgaacactatcagcaccaccgtcacagcccccctccttaggtgaacccccactacaccctccgccacctcaggctgccccccctgcaccccaacccccgcagcctgcgccacagcctcctgcccccacccctgccgcaccaccacccccaagttcagcgagcccgccccagaatgcaagcaacaatcccaccccggctaacgccgccaaatctcctcttcttaatagcccaacggtcgctaaacagatctttccatggatgaaggaaagccgccagaatactaaacagaaaacatccagcagcagttcgggcgagagctgcgccggcgacaagagtcccccagggcaggcatcatcaaaaagggcccgaacagcctacacaagcgctcaactggtcgaactagagaaagaatttcattttaatagatatctatgccgcccccgccgggtggaaatggcgaatctcctgaacctcacagagaggcagatcaaaatatggtttcaaaacagacgcatgaaatacaaaaaggaccaaaagggtaagggtatgctgacgtcctcgggtggccagtctccctcccgatcccctgttccccccggcgctgggggctatctgaattctatgcactctttagtgaacagcgtgccttacgaaccccagtcacctccgccctttagcaagcccccacaggggacctacggcttgccacccgcatcataccctgcatctctgccttcatgcgccccccctccccccccccagaagcgctacacagcggctggtgccggcgccgggggcacccccgattatgatcctcacgcacacggcctgcaaggaaacggttcctacggcacccctcacatccagggatcacccgtgtttgtgggagggagctacgtcgaacccatgagcaactctgggcccgctctgtttggactgacccacctcccacacgcggcaagtggggcaatggattacggcggggccggaccactcggttccggacaccatcacggtcctgggccgggtgaaccccaccctacctacactgatctgaccggacaccatccctctcagggacggatacaagaagcccctaagttgactcacctatag

SEQ ID NO: 269826 - DNA, 39 bp, Artificial Sequence
  derived and/or modified sequence
atgcagaaggctacctactacgactctagtgctatctag

SEQ ID NO: 269827 - DNA, 165 bp, Artificial Sequence
  derived and/or modified sequence
atgcagaaggcaacctattacgactcctccgctatctatggcggttacccctaccaggctgctaacgggtttgcctacaatgctaaccagcagccttatcctgcatccgcagcactaggggccgatggtgagtatcaccgccctgcttgttctctgcaatcctag

SEQ ID NO: 269828 - DNA, 255 bp, Artificial Sequence
  derived and/or modified sequence
atgcagaaagccacatactacgacagctccgccatttacggcggctatccgtaccaggccgcaaacggatttgcatacaacgctaaccagcagccctaccccgcatcagctgcactcggcgctgacggcgaataccacagaccagcctgttcactccagagtccgagctctgcaggaggtcacccgaaagctcatgagctcagcgaagcttgtctgcgtaccctcagcgcacctcctagccaacctcctagttag

SEQ ID NO: 269829 - DNA, 1332 bp, Artificial Sequence
  derived and/or modified sequence
atgcagaaggccacctactatgacagcagcgccatctatggaggctacccctaccaggccgccaacggctttgcctacaatgccaaccagcagccctacccagccagcgctgccctgggcgcagatggagagtaccacaggcctgcctgcagcctgcagagccccagcagcgctgggggccaccccaaggcccacgagctgtctgaggcctgcctgcggaccctgagcgccccacccagccagccccccagcctgggggagccccccctgcaccccccaccaccccaggccgcccccccagccccccagcccccccagcctgccccccagcccccagcccccaccccagctgcccctcctccacccagcagcgccagccccccccagaatgccagcaacaaccccaccccagccaatgctgccaagagccccctgctgaacagccccaccgtggccaagcagatcttcccctggatgaaggagagccggcagaacaccaagcagaagaccagcagcagcagcagtggagagagctgtgccggggacaagagccccccaggccaggccagcagcaagagggccaggacagcctacaccagcgcccagctggtggagctggagaaggagttccacttcaaccgctacctgtgccggccccggcgggtggagatggccaacctgctgaacctgacagagcggcagatcaagatctggttccagaacagaaggatgaagtacaagaaggaccagaagggcaagggcatgctgaccagcagcggcggccagagccccagccgcagccctgtgcccccaggagctgggggctacctgaacagcatgcacagcctggtgaacagcgtgccctatgagccccagagccccccacccttcagcaagccaccccagggcacctacggcctgcccccagccagctacccagccagcctgcccagctgtgcccctcctcctccaccccagaagcgctacacagctgctggggccggggccggcggcaccccagactatgacccccacgcccacggcctgcagggcaatggcagctatggcaccccccacatccagggcagccctgtgtttgtgggcggcagctatgtggagcccatgagcaacagcggccctgccctgtttggcctgacccacctgccccatgctgccagcggggccatggactatggaggagctggccccctgggcagcggccaccaccacggccctggccctggagagccccaccccacctacacagacctgaccggccaccaccccagccagggccgcatccaggaggcccccaagctgacccacctgtag

SEQ ID NO: 269830 - DNA, 858 bp, Artificial Sequence
  derived and/or modified sequence
atgaaggagagccggcagaacaccaagcagaagaccagcagcagcagcagtggagagagctgtgccggggacaagagccccccaggccaggccagcagcaagagggccaggacagcctacaccagcgcccagctggtggagctggagaaggagttccacttcaaccgctacctgtgccggccccggcgggtggagatggccaacctgctgaacctgacagagcggcagatcaagatctggttccagaacagaaggatgaagtacaagaaggaccagaagggcaagggcatgctgaccagcagcggcggccagagccccagccgcagccctgtgcccccaggagctgggggctacctgaacagcatgcacagcctggtgaacagcgtgccctatgagccccagagccccccacccttcagcaagccaccccagggcacctacggcctgcccccagccagctacccagccagcctgcccagctgtgcccctcctcctccaccccagaagcgctacacagctgctggggccggggccggcggcaccccagactatgacccccacgcccacggcctgcagggcaatggcagctatggcaccccccacatccagggcagccctgtgtttgtgggcggcagctatgtggagcccatgagcaacagcggccctgccctgtttggcctgacccacctgccccatgctgccagcggggccatggactatggaggagctggccccctgggcagcggccaccaccacggccctggccctggagagccccaccccacctacacagacctgaccggccaccaccccagccagggccgcatccaggaggcccccaagctgacccacctgtag

SEQ ID NO: 269831 - DNA, 39 bp, Artificial Sequence
  derived and/or modified sequence
atgcagaaggccacctactatgacagcagcgccatctag

SEQ ID NO: 269832 - DNA, 165 bp, Artificial Sequence
  derived and/or modified sequence
atgcagaaggccacctactatgacagcagcgccatctatggaggctacccctaccaggccgccaacggctttgcctacaatgccaaccagcagccctacccagccagcgctgccctgggcgcagatggagagtaccacaggcctgcctgcagcctgcagagctag

SEQ ID NO: 269833 - DNA, 255 bp, Artificial Sequence
  derived and/or modified sequence
atgcagaaggccacctactatgacagcagcgccatctatggaggctacccctaccaggccgccaacggctttgcctacaatgccaaccagcagccctacccagccagcgctgccctgggcgcagatggagagtaccacaggcctgcctgcagcctgcagagccccagcagcgctgggggccaccccaaggcccacgagctgtctgaggcctgcctgcggaccctgagcgccccacccagccagccccccagctag

SEQ ID NO: 269834 - DNA, 1332 bp, Artificial Sequence
  derived and/or modified sequence
atgcagaaggccacctactacgacagcagcgccatctacggcggctacccataccaagccgcgaacggcttcgcctacaacgccaaccagcagccctacccagccagtgctgccctgggcgcagatggagagtatcacaggcctgcatgttcactgcagtcacccagtagcgccggcggccacccaaaagcgcacgaattatcggaggcctgtttgaggactctctctgcgcctccctcccaaccaccttccttgggagagcctcccctgcatcctcctccgcctcaggcagcccctcccgcaccccagcctccacagccagctccacagccacctgcgccgacccccgctgctcctccaccaccctctagcgcttctcccccacagaacgcctctaataatcccacacctgccaacgctgcaaagagccctctgttgaattccccaaccgtggcgaaacaaatcttcccctggatgaaggagtctcgacagaatacaaagcagaaaactagctcttcttcctccggagagtcctgtgccggggacaagagcccccctggccaggcttccagtaaaagggcgcgcactgcctatacctctgcccagttggtcgagcttgagaaggagttccacttcaataggtacttgtgtaggccgcggcgagtagagatggcgaacctcttgaatctcactgaaaggcagatcaaaatctggtttcaaaacagaaggatgaaatacaaaaaggaccaaaagggcaaggggatgctgacaagttccggtggtcagtcaccaagtcgctctcccgtccctcccggtgcaggaggttacctgaactcaatgcactctctcgtgaattctgtcccttacgagccccagtcacccccacctttctccaagcctcctcaagggacatatggcctgccacctgccagttaccccgcatccctgcctagttgcgctccacctccaccaccacaaaaacggtacacagccgccggcgctggggccggcggtacaccagactacgaccctcatgcacacgggctccagggaaacggatcgtacgggacgcctcatatccagggtagtccagttttcgtgggagggagctatgtggagccaatgtctaacagcggacccgccctctttggcctcacccacctgcctcatgcggcaagcggggccatggactatgggggtgccggtccgctgggtagcgggcatcaccatgggcccgggcctggggagcctcaccctacctatacggacttaacaggccatcatccgagccaggggcgcattcaggaagctccgaaactcacccacttgtag

SEQ ID NO: 269835 - DNA, 858 bp, Artificial Sequence
  derived and/or modified sequence
atgaaggagagccggcagaacaccaagcagaagaccagcagcagcagttccggggagagctgcgccggggacaagtccccccccgggcaggcttcatccaagcgggcccggacggcatacacgagcgcacagctcgtcgagctcgaaaaagagttccactttaacagatacctgtgccgccctagacgagtggagatggcaaacctgctgaacttgacagagaggcagattaagatctggtttcagaatagacgaatgaaatacaaaaaggaccaaaagggcaaaggtatgctaacctcatccggcggccaaagtccttcccgcagtcccgtccccccaggggcgggtggatacctcaacagtatgcattctctggtcaattctgttccatacgaacctcagtcgccccctcccttttctaagccaccccaggggacttacggcctgccacccgcctcctaccctgcttcacttccgagctgtgcccccccacctcctccccagaagcggtatacagctgcgggagcaggggcaggtggtactcccgactacgatccccacgcccatggattgcaaggaaatgggtcctatggtacacctcacatccaagggtctcccgtcttcgtgggcggcagctacgtggagcccatgagcaattccggccccgccttgttcgggctcacccacctgccgcatgccgcctcaggagcaatggactacggtggagcagggcctctagggtcaggccaccaccacggacctggcccgggggagcctcaccccacctacaccgatttgactgggcaccacccctctcaggggcggattcaggaggcacccaagctgactcacctttag

SEQ ID NO: 269836 - DNA, 1332 bp, Artificial Sequence
  derived and/or modified sequence
atgcagaaggccacctactacgacagcagcgccatctacggcggctacccttatcaagccgccaatggatttgcctataacgcaaatcagcagccttatcccgcatcggcagctttgggagccgacggtgagtatcaccgcccagcatgttctctgcagagtccgagcagcgctggcggacatcctaaggctcacgaactttcagaggcctgtctccggactctgtctgcccccccgtcacagcctccatctttgggtgagccaccattgcacccgccccctccgcaggctgccccccctgccccccagcctccgcaacccgcaccccagccccctgctccaaccccagccgctcccccccccccgagttcagctagcccacctcagaatgcatcaaataacccgacccctgccaacgctgcaaagtcaccattgctgaattcccccactgtggctaaacaaatattcccatggatgaaagaatcccgacagaacacaaaacagaaaaccagttccagcagcagtggggaatcatgcgccggcgacaagtctcctcctgggcaagccagctctaagagagcgcggacagcatacacgtcagcacagctagttgaactggaaaaggagttccatttcaatcgatatttgtgtcgccctcgccgtgtggagatggctaatctattaaacctgacggagaggcagattaaaatatggtttcaaaataggcgtatgaagtacaaaaaggatcagaagggcaagggcatgctcacatcctccggtggtcagtctccctcacgcagtcctgtcccgccaggagccggagggtacttaaattcaatgcattctctggtcaatagcgtgccatatgaaccgcagagcccccctcccttcagcaagccaccacaaggcacttacggtctgccccccgcaagttatccagcatcacttcccagttgcgccccacccccccccccacagaagcggtacaccgctgcgggcgctggggccggcgggacccccgactacgacccccacgcacatgggctgcagggcaatgggtcctatggcacaccccacatccagggcagccccgtcttcgtggggggatcatacgtggagcccatgtcgaattcaggcccggcactgttcggactcacacatctaccgcatgccgctagtggagcaatggactatggcggtgctgggcccctggggagtggacaccaccacggccccggacctggcgagcctcaccccacatacacggacctcacaggccaccaccctagtcaaggacgcatccaggaggcccctaaactgactcacctgtag

SEQ ID NO: 269837 - DNA, 165 bp, Artificial Sequence
  derived and/or modified sequence
atgcagaaggccacctactacgacagcagcgccatctacggcggctatccctaccaggccgccaatggatttgcatacaacgccaaccaacagccctacccggcctctgccgccttgggcgccgatggggagtaccatcgtcctgcctgtagcctgcaaagttag

SEQ ID NO: 269838 - DNA, 255 bp, Artificial Sequence
  derived and/or modified sequence
atgcagaaggccacctactacgacagcagcgccatctacggcggctacccgtaccaggccgccaatggattcgcctacaacgccaatcagcaaccttaccctgccagtgccgcactgggggccgacggtgagtatcaccggccagcatgtagtttacagtcaccgagttccgcaggcggccacccaaaagcccatgagctgtcagaagcttgcttacggaccctgtctgctccgcctagccagcccccttcatag

SEQ ID NO: 269839 - DNA, 1332 bp, Artificial Sequence
  derived and/or modified sequence
atgcagaaggccacctattacgactcttccgcaatttacggaggctacccctaccaggcggcaaatggatttgcctacaacgccaaccagcaaccatatccggcttctgctgctctcggagcggatggtgaatatcaccgtcccgcatgttctttacagagcccttcctctgccggtggccacccaaaagcccatgaactgtctgaagcctgcctacggaccttgtctgctcccccttcgcaacctccctcgcttggtgaacctcccctccatccacctcctccacaagctgcgcctcctgcaccgcaacctccccagccagcccctcagccacctgcccctactccagccgctccaccaccaccctcttctgcttcccctcctcagaacgcaagcaacaaccccacccctgcaaatgccgcaaagtcacctctgcttaattctcctaccgttgctaaacaaatttttccgtggatgaaggagtcacggcaaaacacaaaacagaagacctctagtagctcaagcggggaatcctgtgcaggcgataaatcccctccaggccaggctagctccaagcgggctagaactgcctacacctcagcccagcttgtcgagctggaaaaagagttccacttcaatcggtatctatgcaggcccagacgcgtggaaatggcgaacttactgaatcttaccgagcggcagattaagatatggttccaaaacaggaggatgaaatacaagaaggatcaaaaaggcaaaggaatgctaacttccagtgggggtcagagtcccagcaggtctccagtgccccctggcgctgggggatacctcaactctatgcactctctggttaatagtgtaccctacgaaccgcagtcaccaccgcctttctccaaaccaccccaaggtacctatggcctgccgcctgcctcgtaccccgcaagcctgccctcttgtgcgccaccgccacccccacaaaagaggtacactgccgcaggagcaggcgcagggggaacccctgattatgacccgcacgcccacggcttgcaaggcaacggttcttacggcacaccgcatatccaaggttcccctgtctttgtaggcggtagttatgttgaacctatgtcgaatagcggcccagcgctgtttggactgactcacctccctcacgccgcaagcggcgctatggattacggaggggcaggacccttgggatcggggcatcaccatggccctgggcctggggagccccatcccacttacacggatcttaccggacatcatccatcacaaggacggattcaggaagcccctaaactgacccatctctag

SEQ ID NO: 269840 - DNA, 858 bp, Artificial Sequence
  derived and/or modified sequence
atgaaagagtctcggcagaacacaaaacagaaaaccagttcctccagcagtggagagagctgtgctggagacaagtctccaccaggccaagccagttcaaagagagcgcgaaccgcctatacatctgctcaattggtggaattagagaaagagtttcattttaaccgctatctctgtagaccaaggcgcgtcgagatggcaaaccttctcaacctcaccgaaaggcagattaagatttggtttcaaaatcgccgtatgaaatacaaaaaagaccaaaagggcaagggcatgttgacttcctcagggggtcaaagtccaagtcgatcacctgtgcctcccggagcgggagggtaccttaacagtatgcattcactggtgaacagtgtgccctacgaaccgcagagcccaccccctttttccaaacctccccagggcacatatggcttgcctccagcctcgtatccggcatcattgccttcatgcgcacccccaccaccaccccagaaacgttacacagcggcaggagctggtgccggaggcacacccgattatgaccctcatgcccatgggctgcagggaaatggctcgtacgggacccctcacatccaagggagtcccgtgttcgtaggcggatcttacgtggagcctatgtcaaattcaggacctgccttgtttgggcttacgcacctcccccacgcagccagtggtgccatggattacggtggggctggcccactgggttcagggcatcaccatggtcccggtccaggcgaaccccacccgacatatacggacttaacgggacaccatcctagccagggtcgtatccaagaggctccgaaactgacacacctttag

SEQ ID NO: 269841 - DNA, 1332 bp, Artificial Sequence
  derived and/or modified sequence
atgcaaaaggcgacctattatgactcaagcgctatatacggtggctacccctaccaggctgcgaacgggttcgcctataacgctaatcaacagccatatccagcttctgctgccctcggcgctgacggcgagtaccataggccagcgtgttccctgcagtctccaagcagtgcaggaggccaccctaaggcccacgaactgtccgaagcttgtctacgcacgcttagcgcaccgccatcccaacccccatccctgggagagcccccattgcacccgccaccccctcaagcagccccacccgctccacaacccccacaacccgcaccccagcccccagcacccacacccgcagccccaccaccacctagtagcgcttccccaccgcaaaacgccagtaacaatcccactcctgctaatgctgccaagagtccacttcttaattcccctaccgttgccaagcagatctttccttggatgaaggagagcagacagaataccaagcagaagacatcgagttcaagttccggagagtcctgcgccggagacaagagtcccccaggtcaagccagctctaagagagctagaacagcctatacgagcgcacagcttgttgagctcgagaaggaattccatttcaatagatacttgtgcagacccagacgcgtcgagatggctaacctactgaacctaactgagcggcagataaagatctggttccagaatcgccgaatgaagtataaaaaagaccagaagggaaagggtatgctgacctcttccggcggtcagtctccaagccgcagccctgtgccccctggcgctggaggctacctgaacagtatgcatagcttggttaactctgtgccatacgaaccccagagcccacccccattttccaagccgcctcaagggacgtacgggttgccccctgcttcatacccagcctccctcccatcatgcgcaccgcctcctccccctcaaaagcgttatactgcagccggagcaggggctggcggaacccctgactacgaccctcacgcccacggtctgcagggaaacggtagctacggcaccccacatattcagggaagcccggtgtttgtcggcggttcatacgtcgagccgatgtccaactccggaccagcactgttcgggctgactcacttgccccatgccgcttcaggagcaatggactacgggggtgcaggacctctgggctccgggcatcaccacggacccggtccgggagagccccatccaacttatactgatctaacaggccaccacccatcccagggcaggattcaggaggcgccaaagctgactcatctctag

SEQ ID NO: 269842 - DNA, 39 bp, Artificial Sequence
  derived and/or modified sequence
atgcagaaagcaacatactacgactccagcgccatttag

SEQ ID NO: 269843 - DNA, 165 bp, Artificial Sequence
  derived and/or modified sequence
atgcaaaaggcaacctactacgatagcagcgccatctatggcggatacccttaccaggccgcaaatggcttcgcatacaatgctaaccagcagccctacccagcatccgctgctctcggggcagatggcgaatatcataggccggcatgttctctccagtcttag

SEQ ID NO: 269844 - DNA, 255 bp, Artificial Sequence
  derived and/or modified sequence
atgcagaaagctacatattacgacagttccgctatctacggaggctatccataccaagccgcaaacggctttgcctataatgcgaaccagcagccctaccctgccagcgctgcactcggcgcagatggggaataccatcgcccagcatgttctctccagtctccttcctctgcaggaggacatcctaaagcccacgagctgtcggaagcctgtcttcgcactttgtcagcacctccatcccagcccccatcctag

SEQ ID NO: 269845 - DNA, 1332 bp, Artificial Sequence
  derived and/or modified sequence
atgcagaaggccacctactacgacagcagcgccatctacggcggctacccctaccaggccgccaacggcttcgcctacaacgccaaccagcagccctaccccgccagcgccgccctgggcgccgacggcgagtaccacagacccgcctgcagcctgcagagccccagcagcgccggcggccaccccaaggcccacgagctgagcgaggcctgcctgagaaccctgagcgccccccccagccagccccccagcctgggcgagccccccctgcaccccccccccccccaggccgccccccccgccccccagcccccccagcccgccccccagccccccgcccccacccccgccgccccccccccccccagcagcgccagccccccccagaacgccagcaacaaccccacccccgccaacgccgccaagagccccctgctgaacagccccaccgtggccaagcagatcttcccctggatgaaggagagcagacagaacaccaagcagaagaccagcagcagcagcagcggcgagagctgcgccggcgacaagagcccccccggccaggccagcagcaagagagccagaaccgcctacaccagcgcccagctggtggagctggagaaggagttccacttcaacagatacctgtgcagacccagaagagtggagatggccaacctgctgaacctgaccgagagacagatcaagatctggttccagaacagaagaatgaagtacaagaaggaccagaagggcaagggcatgctgaccagcagcggcggccagagccccagcagaagccccgtgccccccggcgccggcggctacctgaacagcatgcacagcctggtgaacagcgtgccctacgagccccagagccccccccccttcagcaagcccccccagggcacctacggcctgccccccgccagctaccccgccagcctgcccagctgcgccccccccccccccccccagaagagatacaccgccgccggcgccggcgccggcggcacccccgactacgacccccacgcccacggcctgcagggcaacggcagctacggcaccccccacatccagggcagccccgtgttcgtgggcggcagctacgtggagcccatgagcaacagcggccccgccctgttcggcctgacccacctgccccacgccgccagcggcgccatggactacggcggcgccggccccctgggcagcggccaccaccacggccccggccccggcgagccccaccccacctacaccgacctgaccggccaccaccccagccagggcagaatccaggaggcccccaagctgacccacctgtag

SEQ ID NO: 269846 - DNA, 858 bp, Artificial Sequence
  derived and/or modified sequence
atgaaggagagcagacagaacaccaagcagaagaccagcagcagcagcagcggcgagagctgcgccggcgacaagagcccccccggccaggccagcagcaagagagccagaaccgcctacaccagcgcccagctggtggagctggagaaggagttccacttcaacagatacctgtgcagacccagaagagtggagatggccaacctgctgaacctgaccgagagacagatcaagatctggttccagaacagaagaatgaagtacaagaaggaccagaagggcaagggcatgctgaccagcagcggcggccagagccccagcagaagccccgtgccccccggcgccggcggctacctgaacagcatgcacagcctggtgaacagcgtgccctacgagccccagagccccccccccttcagcaagcccccccagggcacctacggcctgccccccgccagctaccccgccagcctgcccagctgcgccccccccccccccccccagaagagatacaccgccgccggcgccggcgccggcggcacccccgactacgacccccacgcccacggcctgcagggcaacggcagctacggcaccccccacatccagggcagccccgtgttcgtgggcggcagctacgtggagcccatgagcaacagcggccccgccctgttcggcctgacccacctgccccacgccgccagcggcgccatggactacggcggcgccggccccctgggcagcggccaccaccacggccccggccccggcgagccccaccccacctacaccgacctgaccggccaccaccccagccagggcagaatccaggaggcccccaagctgacccacctgtag

SEQ ID NO: 269847 - DNA, 39 bp, Artificial Sequence
  derived and/or modified sequence
atgcagaaggccacctactacgacagcagcgccatctag

SEQ ID NO: 269848 - DNA, 165 bp, Artificial Sequence
  derived and/or modified sequence
atgcagaaggccacctactacgacagcagcgccatctacggcggctacccctaccaggccgccaacggcttcgcctacaacgccaaccagcagccctaccccgccagcgccgccctgggcgccgacggcgagtaccacagacccgcctgcagcctgcagagctag

SEQ ID NO: 269849 - DNA, 255 bp, Artificial Sequence
  derived and/or modified sequence
atgcagaaggccacctactacgacagcagcgccatctacggcggctacccctaccaggccgccaacggcttcgcctacaacgccaaccagcagccctaccccgccagcgccgccctgggcgccgacggcgagtaccacagacccgcctgcagcctgcagagccccagcagcgccggcggccaccccaaggcccacgagctgagcgaggcctgcctgagaaccctgagcgccccccccagccagccccccagctag

SEQ ID NO: 269850 - DNA, 2574 bp, Artificial Sequence
  derived and/or modified sequence
ttcttgcaaataatgtggtctcaggcaaggacacagcatcttggctgtctgctaaaaaaaaaaaatgcctagactctcagtggaaattgagtgtcaagctgcaaaatctcaaatggcagactatcatcatttaagagcgcctggacaccggaaaaggcgattccctgagcgcctggagttggagacaattcctggttcagaatttaaacatctttctaggtctgcgcggggcggccattggcggcggagtgtcacgtgaccgcgggggcgtgccaatgtgcgccctcacgggtgtcaaacccctgtcagagtgtgcgatcaagatcgtgaaacaacgcgatgcaaaaagcgacctactacgacagctcggcgatctacggtggctacccctaccaggcagccaacgggttcgcttataatgccaatcagcagccgtacccggcgtccgccgctttgggcgccgacggcgagtaccaccgacccgcctgctccctccagtctccctccagcgccgggggccaccccaaggcacacgaactgagtgaggcgtgcctgcgcaccctgagcgccccacctagccagcctccaagcctgggagagccgcccctgcacccgccgccgccccaggccgcgccccctgccccacagccgcctcagcccgcacctcagccccctgcacctacccctgccgcgcccccgcctccctcttctgcctcccctcctcagaatgccagcaacaaccctacccctgccaacgcggccaagagccccctgctcaactcacccacagtggccaaacaaatcttcccctggatgaaagagtctcgacaaaacacaaagcagaaaaccagcagctccagctcaggcgaaagctgcgctggcgacaagagcccgccggggcaggcttcgtccaagcgcgcgcgcacggcctacacgagcgcgcagctggtggagctggagaaagagttccacttcaaccgctacctgtgccggccgcgccgggtggagatggccaatctgctgaacctcactgagcgccagatcaagatctggttccagaatcgccgcatgaagtacaaaaaggatcagaagggcaagggcatgctaacgtcatcggggggccagtctccaagtcgcagccccgtgccccccggagccggtggctatctgaactctatgcattcgctggtcaacagcgtcccgtatgagccccagtcgcccccgcccttctccaagcccccccagggtacctacgggctgccccccgcctcctaccctgcgtccctgcccagctgcgcacccccgccacccccacagaagcgctacacggcggcaggggcgggcgcagggggcacccccgactatgacccgcacgctcatggcctgcagggcaacggcagctatgggaccccacacatacagggaagccccgtcttcgtggggggcagctatgtggagcccatgagcaactccgggccagccctctttggtctaactcacctcccccacgctgcctcgggcgccatggactatgggggtgccgggccgctgggcagcggccaccaccacgggccggggcctggggagccgcaccccacctacacggaccttaccggccaccatccttctcagggaagaattcaggaagcacccaagctcacccacctgtgatagtgggcttggggctacgcgccaggagagtctccccccacccaccttttttctttggttgcttttttttttttttttttttaggttcttcctgccctttccttccttccttttctctcttctccgccccgcactccgtttcccggtttcccccctcgttggtaaggcgtttttatagtttatgtgacgtagcaatcttggttgctggaatggctgtatcatagcgatatttatctcttcctgctcctcgataggccactggccctgcaccctttaccttctccactctttgatcagaaacagggtatatgaacaaattttctagtcgagttttcaatgtgaatttgttcttacattatggctcccgaggggaagcgattactttttttaattttaaattttttttttaattgcacttcttgtaaagagtgagaaaaaaaatcaaaggcgctttgaaacaggggctctctgtgcaaggatgactaagtgtacgtctttccgtgtgtgtatgctggtgaacagtcagatttatttatatttttttgcaagcattgaataatctaagttttaaatattatttatccccatccgttcgtatttatattaaagaattctgtaccctgatggttcagaagggttcttgggccttttgttcaattgtgtattggcgtacttagaattttttttatttgaaagagaaatataattcctttaaacggtaacgatacaataaaaccagagaagatccagcttttgaaaacagtgatttaggtttgtaacatccggcaaaactgaaaaaaaaaatctgtaaacgcgaaaaatactagatttgttttgagagttcttcattccttgctgctcacattctgagaaacaaaaagaaataaagtttttattctgaat

SEQ ID NO: 269851 - DNA, 1951 bp, Artificial Sequence
  derived and/or modified sequence
atacccaagtcggtgccactagcccaggcagagcccggcgccgcactagcgcttatctccgggccgcggctgctgccctccctcttctgcctcccctcctcagaatgccagcaacaaccctacccctgccaacgcggccaagagccccctgctcaactcacccacagtggccaaacaaatcttcccctggatgaaagagtctcgacaaaacacaaagcagaaaaccagcagctccagctcaggcgaaagctgcgctggcgacaagagcccgccggggcaggcttcgtccaagcgcgcgcgcacggcctacacgagcgcgcagctggtggagctggagaaagagttccacttcaaccgctacctgtgccggccgcgccgggtggagatggccaatctgctgaacctcactgagcgccagatcaagatctggttccagaatcgccgcatgaagtacaaaaaggatcagaagggcaagggcatgctaacgtcatcggggggccagtctccaagtcgcagccccgtgccccccggagccggtggctatctgaactctatgcattcgctggtcaacagcgtcccgtatgagccccagtcgcccccgcccttctccaagcccccccagggtacctacgggctgccccccgcctcctaccctgcgtccctgcccagctgcgcacccccgccacccccacagaagcgctacacggcggcaggggcgggcgcagggggcacccccgactatgacccgcacgctcatggcctgcagggcaacggcagctatgggaccccacacatacagggaagccccgtcttcgtggggggcagctatgtggagcccatgagcaactccgggccagccctctttggtctaactcacctcccccacgctgcctcgggcgccatggactatgggggtgccgggccgctgggcagcggccaccaccacgggccggggcctggggagccgcaccccacctacacggaccttaccggccaccatccttctcagggaagaattcaggaagcacccaagctcacccacctgtgatagtgggcttggggctacgcgccaggagagtctccccccacccaccttttttctttggttgcttttttttttttttttttttaggttcttcctgccctttccttccttccttttctctcttctccgccccgcactccgtttcccggtttcccccctcgttggtaaggcgtttttatagtttatgtgacgtagcaatcttggttgctggaatggctgtatcatagcgatatttatctcttcctgctcctcgataggccactggccctgcaccctttaccttctccactctttgatcagaaacagggtatatgaacaaattttctagtcgagttttcaatgtgaatttgttcttacattatggctcccgaggggaagcgattactttttttaattttaaattttttttttaattgcacttcttgtaaagagtgagaaaaaaaatcaaaggcgctttgaaacaggggctctctgtgcaaggatgactaagtgtacgtctttccgtgtgtgtatgctggtgaacagtcagatttatttatatttttttgcaagcattgaataatctaagttttaaatattatttatccccatccgttcgtatttatattaaagaattctgtaccctgatggttcagaagggttcttgggccttttgttcaattgtgtattggcgtacttagaattttttttatttgaaagagaaatataattcctttaaacggtaacgatacaataaaaccagagaagatccagcttttgaaaacagtgatttaggtttgtaacatccggcaaaactgaaaaaaaaaatctgtaaacgcgaaaaatactagatttgttttgagagttcttcattccttgctgctcacattctgagaaacaaaaagaaataaagtttttattctgaat

SEQ ID NO: 269852 - DNA, 3250 bp, Artificial Sequence
  derived and/or modified sequence
tctcactagcctcagagcactctcagaagttcagaaactaagaccagaaaagagaagatttttagacagctcatgaaacggtctgcgcggggcggccattggcggcggagtgtcacgtgaccgcgggggcgtgccaatgtgcgccctcacgggtgtcaaacccctgtcagagtgtgcgatcaagatcgtgaaacaacgcgatgcaaaaagcgacctactacgacagctcggcgatctacggtggctacccctaccaggcagccaacgggttcgcttataatgccaatcagcagccgtacccggcgtccgccgctttgggcgccgacggcgagtaccaccgacccgcctgctccctccagtctccctccagcgccgggggccaccccaaggcacacgaactgagtgaggcgtgcctgcgcaccctgagcgccccacctagccagcctccaagcctgggagagccgcccctgcacccgccgccgccccaggccgcgccccctgccccacagccgcctcagcccgcacctcagccccctgcacctacccctgccgcgcccccgcctccctcttctgcctcccctcctcagaatgccagcaacaaccctacccctgccaacgcggccaagagccccctgctcaactcacccacagtggccaaacaaatcttcccctggatgaaagagtctcgacaaaacacaaagcagaaaaccagcagctccagctcaggcgaaagctgcgctggcgacaagagcccgccggggcaggcttcgtccaagcgcgcgcgcacggcctacacgagcgcgcagctggtggagctggagaaagagttccacttcaaccgctacctgtgccggccgcgccgggtggagatggccaatctgctgaacctcactgagcgccagatcaagatctggttccagaatcgccgcatgaagtacaaaaaggatcagaagggcaagggcatgctaacgtcatcggggggccagtctccaagtcgcagccccgtgccccccggagccggtggctatctgaactctatgcattcgctggtcaacagcgtcccgtatgagccccagtcgcccccgcccttctccaagcccccccagggtacctacgggctgccccccgcctcctaccctgcgtccctgcccagctgcgcacccccgccacccccacagaagcgctacacggcggcaggggcgggcgcagggggcacccccgactatgacccgcacgctcatggcctgcagggcaacggcagctatgggaccccacacatacagggaagccccgtcttcgtggggggcagctatgtggagcccatgagcaactccgggccagccctctttggtctaactcacctcccccacgctgcctcgggcgccatggactatgggggtgccgggccgctgggcagcggccaccaccacgggccggggcctggggagccgcaccccacctacacggaccttaccggccaccatccttctcagggaagaattcaggaagcacccaagctcacccacctgtgatagtgggcttggggctacgcgccaggagagtctccccccacccaccttttttctttggttgcttttttttttttttttttttaggttcttcctgccctttccttccttccttttctctcttctccgccccgcactccgtttcccggtttcccccctcgttggtaaggcgtttttatagtttatgtgacgtagcaatcttggttgctggaatggctgtatcatagcgatatttatctcttcctgctcctcgataggccactggccctgcaccctttaccttctccactctttgatcagaaacagggtatatgaacaaattttctagtcgagttttcaatgtgaatttgttcttacattatggctcccgaggggaagcgattactttttttaattttaaattttttttttaattgcacttcttgtaaagagtgagaaaaaaaatcaaaggcgctttgaaacaggggctctctgtgcaaggatgactaagtgtacgtctttccgtgtgtgtatgctggtgaacagtcagatttatttatatttttttgcaagcattgaataatctaagttttaaatattatttatccccatccgttcgtatttatattaaagaattctgtaccctgatggttcagaagggttcttgggccttttgttcaattgtgtattggcgtacttagaattttttttatttgaaagagaaatataattcctttaaacggtaacgatacaataaaaccagagaagatccagcttttgaaaacagtgatttaggtttgtaacatccggcaaaactgaaaaaaaaaatctgtaaacgcgaaaaatactagatttgttttgagagttcttcattccttgctgctcacattctgagaaacaaaaagaaataaagtttttattctgaataatatccgtgttaagaaggggttctttggccgaagacgtgggtctgcgtggaattcaggccgaggcgagccggcagagcaggccggacgcagcagccctctggctccagcatggggcctggccaggctattcgcctggaagctcggcgaattctcaggatggcggctggggctccaggcggctgcggcagctctggtaacgccgtgcggcgggccagctgggctgcccggttcccagctgctgcggaggcaggctgagggcgcaggggctgccgagtgctgtgcacggaagaaacaaagacatcccggcccaaggcgcagcgggagcgcacaggtgccccgcggcccagccgggggataacgcagggcggtcttctgctccatgctcttcctcgggtcaaagcggaccaactaacgcctaaacctcggtattagccagccgcgcagaggatgccgagcactttccgggagcaatcggactcctggtctcctccggggatgcttcgcggtctgttatcgcgtcaggaggaaagaattgctccaaaaatctgcacgcggagcgaaacagtttgaaagggactgaggctcacccaggtctccagcaaacggaggactgaactggggagagtcaccctgagccagcccttccctggactgccggaatcccagcattagcttcctgctgaatgtagtatttggcattctctgaatttatttcctctccttcccccacccagctttctttttatggccccagggggagggggagagagcaaggagatcggtatctttgtaataaaactgcaattttataaa

SEQ ID NO: 269853 - DNA, 503 bp, Artificial Sequence
  derived and/or modified sequence
cccagtcggccctgggcgagccgtgctggagcagcgaggcggccacgctctgcgcggcggtgaccgggcctcggggtctccagcccgcctgccatctcggctgatgctgagggtccgtgcccatcccgcgccgaggggacccggccgggccgccaagccaggccgggggccagagcccgtgtcggagcctgagcccgagcctgcgctcgtcagaagttaaggtctgcgcggggcggccattggcggcggagtgtcacgtgaccgcgggggcgtgccaatgtgcgccctcacgggtgtcaaacccctgtcagagtgtgcgatcaagatcgtgaaacaacgcgatgcaaaaagcgacctactacgacagctcggcgatctacggtggctacccctaccaggcagccaacgggttcgcttataatgccaatcagcagccgtacccggcgtccgccgctttgggcgccgacggcgagtaccaccgacccgcctgctccctccagtct

SEQ ID NO: 269854 - DNA, 581 bp, Artificial Sequence
  derived and/or modified sequence
tccatttgactcttttgcaggctacgtgtgccgcctggccattcaaactgtcaattttaggtccagaagtgtccaaaccacaagttctcaaaactctctgaaaaatggctccctccgagttaagagcgcctggacaccggaaaaggcgattccctgagcgcctggagttggagacaattcctggttcagaatttaaacatctttctaggtctgcgcggggcggccattggcggcggagtgtcacgtgaccgcgggggcgtgccaatgtgcgccctcacgggtgtcaaacccctgtcagagtgtgcgatcaagatcgtgaaacaacgcgatgcaaaaagcgacctactacgacagctcggcgatctacggtggctacccctaccaggcagccaacgggttcgcttataatgccaatcagcagccgtacccggcgtccgccgctttgggcgccgacggcgagtaccaccgacccgcctgctccctccagtctccctccagcgccgggggccaccccaaggcacacgaactgagtgaggcgtgcctgcgcaccctgagcgccccacctagccagcctccaagcc

SEQ ID NO: 269855 - protein, 122 aa, Artificial Sequence
  derived and/or modified sequence
MCESSKEALAENNLNLPKMAEKDGCFQSGFNEETCLVKIITGLLEFEVYLEYLQNRFESSEEQARAVQMSTKVLIQFLQKKVGVSSFPQLGVGEDRLKDSVLDNSGMQCHFQKRRLHVNKRV

SEQ ID NO: 269856 - protein, 198 aa, Artificial Sequence
  derived and/or modified sequence
MNSFSTSAFGPVAFSLGLLLVLPAAFPAPVPPGEDSKDVAAPHRQPLTSSERIDKQIRYILDGISALRKETCNKSNMCESSKEALAENNLNLPKMAEKDGCFQSGFNEETCLVKIITGLLEFEVYLEYLQNRFESSEEQARAVQMSTKVLIQFLQKKVGVSSFPQLGVGEDRLKDSVLDNSGMQCHFQKRRLHVNKRV

SEQ ID NO: 269857 - protein, 252 aa, Artificial Sequence
  derived and/or modified sequence
MNSFSTSKCRKSLALELPAAVEPCVREGCVAQGGLAGGQQQRQAPSCAVSSPLRSLPSGTGAFGPVAFSLGLLLVLPAAFPAPVPPGEDSKDVAAPHRQPLTSSERIDKQIRYILDGISALRKETCNKSNMCESSKEALAENNLNLPKMAEKDGCFQSGFNEETCLVKIITGLLEFEVYLEYLQNRFESSEEQARAVQMSTKVLIQFLQKKVGVSSFPQLGVGEDRLKDSVLDNSGMQCHFQKRRLHVNKRV

SEQ ID NO: 269858 - DNA, 369 bp, Artificial Sequence
  derived and/or modified sequence
atgtgcgagagcagcaaggaggccctggccgagaacaacctgaacctgcccaagatggccgagaaggacggctgcttccagagcggcttcaacgaggagacctgcctggtgaagatcatcaccggcctgctggagttcgaggtgtacctggagtacctgcagaacagattcgagagcagcgaggagcaggccagagccgtgcagatgagcaccaaggtgctgatccagttcctgcagaagaaggtgggcgtgagcagcttcccccagctgggcgtgggcgaggacagactgaaggacagcgtgctggacaacagcggcatgcagtgccacttccagaagagaagactgcacgtgaacaagagagtgtag

SEQ ID NO: 269859 - DNA, 597 bp, Artificial Sequence
  derived and/or modified sequence
atgaacagcttcagcaccagcgccttcggccccgtggccttcagcctgggcctgctgctggtgctgcccgccgccttccccgcccccgtgccccccggcgaggacagcaaggacgtggccgccccccacagacagcccctgaccagcagcgagagaatcgacaagcagatcagatacatcctggacggcatcagcgccctgagaaaggagacctgcaacaagagcaacatgtgcgagagcagcaaggaggccctggccgagaacaacctgaacctgcccaagatggccgagaaggacggctgcttccagagcggcttcaacgaggagacctgcctggtgaagatcatcaccggcctgctggagttcgaggtgtacctggagtacctgcagaacagattcgagagcagcgaggagcaggccagagccgtgcagatgagcaccaaggtgctgatccagttcctgcagaagaaggtgggcgtgagcagcttcccccagctgggcgtgggcgaggacagactgaaggacagcgtgctggacaacagcggcatgcagtgccacttccagaagagaagactgcacgtgaacaagagagtgtag

SEQ ID NO: 269860 - DNA, 759 bp, Artificial Sequence
  derived and/or modified sequence
atgaacagcttcagcaccagcaagtgcagaaagagcctggccctggagctgcccgccgccgtggagccctgcgtgagagagggctgcgtggcccagggcggcctggccggcggccagcagcagagacaggcccccagctgcgccgtgagcagccccctgagaagcctgcccagcggcaccggcgccttcggccccgtggccttcagcctgggcctgctgctggtgctgcccgccgccttccccgcccccgtgccccccggcgaggacagcaaggacgtggccgccccccacagacagcccctgaccagcagcgagagaatcgacaagcagatcagatacatcctggacggcatcagcgccctgagaaaggagacctgcaacaagagcaacatgtgcgagagcagcaaggaggccctggccgagaacaacctgaacctgcccaagatggccgagaaggacggctgcttccagagcggcttcaacgaggagacctgcctggtgaagatcatcaccggcctgctggagttcgaggtgtacctggagtacctgcagaacagattcgagagcagcgaggagcaggccagagccgtgcagatgagcaccaaggtgctgatccagttcctgcagaagaaggtgggcgtgagcagcttcccccagctgggcgtgggcgaggacagactgaaggacagcgtgctggacaacagcggcatgcagtgccacttccagaagagaagactgcacgtgaacaagagagtgtag

SEQ ID NO: 269861 - DNA, 369 bp, Artificial Sequence
  derived and/or modified sequence
atgtgcgaaagcagtaaggaggcgctcgccgaaaacaatctgaatttgccgaagatggctgagaaagacgggtgttttcagtctggttttaatgaagaaacttgtcttgtaaaaattattactggtctgctggagttcgaagtgtaccttgagtatctccagaacagatttgaaagttctgaggagcaagccagggctgttcagatgtctaccaaggtcttgatccagtttctgcagaagaaggtaggcgtcagtagcttcccccagctgggcgtgggcgaggaccgactaaaggattccgtgttagataacagcggcatgcagtgccacttccagaagaggcggttacatgtcaataagcgcgtatag

SEQ ID NO: 269862 - DNA, 597 bp, Artificial Sequence
  derived and/or modified sequence
atgaacagtttcagtacatccgcatttggacccgtggccttctccctaggacttttgctagtactccccgctgcctttcctgctcccgtgccaccgggcgaggactcaaaggatgtggccgcccctcaccggcaaccccttacaagcagcgagcggatcgacaaacagattcggtacattctcgatggaatcagcgccttgaggaaggaaacttgtaataaatcaaatatgtgcgaatcatcgaaagaagcgctcgccgaaaataatctcaaccttcctaagatggccgagaaggatggttgctttcagagcggattcaatgaagaaacgtgcctcgtgaagataattacaggactgcttgaatttgaagtatatctggagtacctgcagaacagattcgagagctcggaagagcaggcccgagccgtccagatgagcactaaggtcctcatacaattcctccagaagaaggtgggcgtgagctcctttcctcagctgggagtcggagaagacaggcttaaggactcggtgctggacaattcaggaatgcagtgccacttccagaaacgtcgcctccatgtcaacaaacgcgtgtag

SEQ ID NO: 269863 - DNA, 759 bp, Artificial Sequence
  derived and/or modified sequence
atgaattccttttccacctcaaagtgtcggaaaagtctggctctcgagttgccagccgccgtggagccttgcgtacgggaagggtgcgtcgcgcaggggggtctggcagggggccagcagcaacgtcaggccccttcctgtgctgtaagctccccattacgatccctgcccagtggaactggggcctttgggccggttgcgttttcactgggactgttgctggtgttacccgcagcttttcccgcgcctgtgcctccaggcgaggattccaaggatgttgcagcccctcatcgtcagcctttaacctcctctgaacgaatcgacaagcagataaggtatatccttgatggcatctcagccctgaggaaggagacctgtaacaagtccaacatgtgtgaatccagcaaagaggctttagccgagaacaacctgaatcttccaaagatggccgagaaagacgggtgtttccagtctggcttcaacgaagaaacttgtctggtgaagatcattaccggacttctggaattcgaggtttatttggaatatctacaaaaccgttttgaatcttctgaagaacaggccagggctgtgcaaatgtcaacaaaagtactgatccaattcttgcaaaagaaagttggtgtgtcttccttccctcagctcggcgtcggggaggaccgcctgaaagattctgtgctggacaacagtggaatgcagtgccatttccagaaacggcgtttgcacgtgaacaaacgggtttag

SEQ ID NO: 269864 - DNA, 369 bp, Artificial Sequence
  derived and/or modified sequence
atgtgtgagagcagcaaggaggccctggccgagaacaacctgaacctgcccaagatggccgagaaggatggctgcttccagagcggcttcaatgaggagacctgcctggtgaagatcatcaccggcctgctggagtttgaggtgtacctggagtacctgcagaacagatttgagagcagcgaggagcaggcccgggctgtgcagatgagcaccaaggtgctgatccagttcctgcagaagaaggtgggcgtgagcagcttcccccagctgggcgtgggggaggaccggctgaaggacagcgtgctggacaacagcggcatgcagtgccacttccagaagaggcggctgcacgtgaacaagagggtgtag

SEQ ID NO: 269865 - DNA, 597 bp, Artificial Sequence
  derived and/or modified sequence
atgaacagcttcagcaccagcgcctttggacctgtggccttcagcctgggcctgctgctggtgctgcctgctgccttccctgcccctgtgcccccaggagaggacagcaaggatgtggccgccccccaccggcagcccctgaccagcagcgagagaattgacaagcagatccgctacatcctggatggcatcagcgccctgaggaaggagacctgcaacaagagcaacatgtgtgagagcagcaaggaggccctggccgagaacaacctgaacctgcccaagatggccgagaaggatggctgcttccagagcggcttcaatgaggagacctgcctggtgaagatcatcaccggcctgctggagtttgaggtgtacctggagtacctgcagaacagatttgagagcagcgaggagcaggcccgggctgtgcagatgagcaccaaggtgctgatccagttcctgcagaagaaggtgggcgtgagcagcttcccccagctgggcgtgggggaggaccggctgaaggacagcgtgctggacaacagcggcatgcagtgccacttccagaagaggcggctgcacgtgaacaagagggtgtag

SEQ ID NO: 269866 - DNA, 759 bp, Artificial Sequence
  derived and/or modified sequence
atgaacagcttcagcaccagcaagtgcaggaagagcctggccctggagctgcctgctgctgtggagccctgtgtgcgggagggctgtgtggcccagggcggcctggccggcggccagcagcagaggcaggcccccagctgtgctgtgagcagccccctgcggagcctgcccagcggcaccggggcctttggacctgtggccttcagcctgggcctgctgctggtgctgcctgctgccttccctgcccctgtgcccccaggagaggacagcaaggatgtggccgccccccaccggcagcccctgaccagcagcgagagaattgacaagcagatccgctacatcctggatggcatcagcgccctgaggaaggagacctgcaacaagagcaacatgtgtgagagcagcaaggaggccctggccgagaacaacctgaacctgcccaagatggccgagaaggatggctgcttccagagcggcttcaatgaggagacctgcctggtgaagatcatcaccggcctgctggagtttgaggtgtacctggagtacctgcagaacagatttgagagcagcgaggagcaggcccgggctgtgcagatgagcaccaaggtgctgatccagttcctgcagaagaaggtgggcgtgagcagcttcccccagctgggcgtgggggaggaccggctgaaggacagcgtgctggacaacagcggcatgcagtgccacttccagaagaggcggctgcacgtgaacaagagggtgtag

SEQ ID NO: 269867 - DNA, 539 bp, Artificial Sequence
  derived and/or modified sequence
aatattagagtctcaacccccaataaatataggactggagatgtctgaggctcattctgccctcgagcccaccgggaacgaaagagaagctctatctcccctccaggagcccagctatgaactccttctccacaaacatgtaacaagagtaacatgtgtgaaagcagcaaagaggcactggcagaaaacaacctgaaccttccaaagatggctgaaaaagatggatgcttccaatctggattcaatgaggagacttgcctggtgaaaatcatcactggtcttttggagtttgaggtatacctagagtacctccagaacagatttgagagtagtgaggaacaagccagagctgtgcagatgagtacaaaagtcctgatccagttcctgcagaaaaaggtgggtgtgtcctcattccctcaacttggtgtgggggaagacaggctcaaagacagtgtcctggacaactcagggatgcaatgccacttccaaaagagaaggctacacgtaaacaaaagagtctgagaaatagtttctgattg

SEQ ID NO: 269868 - DNA, 649 bp, Artificial Sequence
  derived and/or modified sequence
atctcccctccaggagcccagctatgaactccttctccacaagcgccttcggtccagttgccttctccctggggctgctcctggtgttgcctgctgccttccctgccccagtacccccaggagaagattccaaagatgtagccgccccacacagacagccactcacctcttcagaacgaattgacaaacaaattcggtacatcctcgacggcatctcagccctgagaaaggagacatgtaacaagagtaacatgtgtgaaagcagcaaagaggcactggcagaaaacaacctgaaccttccaaagatggctgaaaaagatggatgcttccaatctggattcaatgaggagacttgcctggtgaaaatcatcactggtcttttggagtttgaggtatacctagagtacctccagaacagatttgagagtagtgaggaacaagccagagctgtgcagatgagtacaaaagtcctgatccagttcctgcagaaaaaggtgggtgtgtcctcattccctcaacttggtgtgggggaagacaggctcaaagacagtgtcctggacaactcagggatgcaatgccacttccaaaagagaaggctacacgtaaacaaaagagtctgagaaatagtttctgattgttattgttaaat

SEQ ID NO: 269869 - DNA, 1493 bp, Artificial Sequence
  derived and/or modified sequence
attctgccctcgagcccaccgggaacgaaagagaagctctatctcccctccaggagcccagctatgaactccttctccacaagtaagtgcaggaaatccttagccctggaactgccagcggcggtcgagccctgtgtgagggaggggtgtgtggcccagggagggctggcgggcggccagcagcagaggcaggctcccagctgtgctgtcagctcacccctgcgctcgctcccctccggcacaggcgccttcggtccagttgccttctccctggggctgctcctggtgttgcctgctgccttccctgccccagtacccccaggagaagattccaaagatgtagccgccccacacagacagccactcacctcttcagaacgaattgacaaacaaattcggtacatcctcgacggcatctcagccctgagaaaggagacatgtaacaagagtaacatgtgtgaaagcagcaaagaggcactggcagaaaacaacctgaaccttccaaagatggctgaaaaagatggatgcttccaatctggattcaatgaggagacttgcctggtgaaaatcatcactggtcttttggagtttgaggtatacctagagtacctccagaacagatttgagagtagtgaggaacaagccagagctgtgcagatgagtacaaaagtcctgatccagttcctgcagaaaaaggtgggtgtgtcctcattccctcaacttggtgtgggggaagacaggctcaaagacagtgtcctggacaactcagggatgcaatgccacttccaaaagagaaggctacacgtaaacaaaagagtctgagaaatagtttctgattgttattgttaaatctttttttgtttgtttggttggttggctctcttctgcaaaggacatcaataactgtattttaaactatatattaactgaggtggattttaacatcaatttttaatagtgcaagagatttaaaaccaaaggcgggggggcgggcagaaaaaagtgcatccaactccagccagtgatccacagaaacaaagaccaaggagcacaaaatgattttaagattttagtcattgccaagtgacattcttctcactgtggttgtttcaattctttttcctaccttttaccagagagttagttcagagaaatggtcagagactcaagggtggaaagaggtaccaaaggctttggccaccagtagctggctattcagacagcagggagtagacttgctggctagcatgtggaggagccaaagctcaataagaaggggcctagaatgaaacccttggtgctgatcctgcctctgccatttctacttaagccagggtttctcatatgttaacatgcatgggaattccctgggcatcttcttgtggtgtggagtctgacttagcaagcctcgggtgggtttgagggtcaaatttctaccaggcttatatccctggtgatgctgcagaattccaggaccacacttggaggtttaa

SEQ ID NO: 269870 - DNA, 369 bp, Artificial Sequence
  derived and/or modified sequence
atgtgcgagagcagcaaggaggccctggccgagaacaacctgaacctccctaaaatggcagagaaagatgggtgttttcaatccggctttaacgaggaaacctgcctggtcaaaattataactgggctcctggagtttgaggtatacctggaatacttacagaaccgcttcgagtcatcagaggagcaagcaagagctgtgcagatgagcaccaaggtccttattcaattcctgcagaaaaaagttggtgtgagcagtttcccccaactgggcgtgggcgaggaccgcctgaaagattcagtcctcgacaattcagggatgcagtgtcatttccaaaagagaaggctgcacgtgaacaagagagtttag

SEQ ID NO: 269871 - DNA, 597 bp, Artificial Sequence
  derived and/or modified sequence
atgaacagcttcagcaccagcgccttcggccccgtggccttcagcttagggttgctcctggtcctgcctgcagcatttcctgcacccgtgccgcctggagaggactcgaaagacgtggctgctccccacagacagccactgacctcctccgagcgtattgataaacagatacggtatattctcgacggcatctctgccttgcggaaggagacttgtaataagtctaacatgtgtgagtcgtctaaggaggctttggctgagaacaacctaaatctgcccaagatggctgagaaagacggatgcttccaaagcggctttaacgaggagacctgcttggtgaagatcattactggccttttagaattcgaggtgtacctggaatacctacagaatcgatttgagtcatccgaggaacaggctcgggctgtccagatgagtaccaaggttctcatacagtttctgcagaagaaggttggagtgagctcattcccccagctcggcgttggtgaagaccgcctgaaggactctgtgttggacaacagtgggatgcaatgccacttccaaaaacggcggctgcatgtgaacaagcgcgtgtag

SEQ ID NO: 269872 - DNA, 759 bp, Artificial Sequence
  derived and/or modified sequence
atgaacagcttcagcaccagcaagtgccggaagagcctggccctggagttacctgccgctgtcgaaccatgcgtcagagagggctgtgtcgcccaaggaggccttgcgggggggcaacagcagcgccaggctccaagctgcgctgtctcctcccccctgaggagtctgccctcaggtaccggggcatttggccccgtcgcattttcactgggtctgctgctggtcctccctgccgccttccccgccccagtccctcccggcgaggattccaaagacgtggccgcaccgcataggcagcccctaacctcctccgagcgaatagacaaacagatacgatacattctggatgggattagtgcacttcggaaggagacctgtaacaaatctaatatgtgcgaatccagcaaagaggctctcgcggaaaacaatttgaacctcccgaagatggctgagaaggatggttgtttccagtccgggtttaacgaagaaacctgtcttgtaaaaattataacaggactgctggagtttgaagtctacttggaatatctgcagaaccgcttcgagagtagtgaggaacaggcgcgggctgttcagatgagcactaaggtactcattcagtttctgcagaagaaagtgggagtgagctcttttccccagctcggcgtcggagaagataggttaaaggattctgtgctggataactctggcatgcagtgtcattttcagaaaagacgtcttcacgtgaacaaaagagtgtag

SEQ ID NO: 269873 - DNA, 369 bp, Artificial Sequence
  derived and/or modified sequence
atgtgtgaatcctctaaggaggcactggccgaaaataacctgaatctccccaagatggctgaaaaagacgggtgctttcagtccggttttaatgaagagacttgtctggtaaaaataattacgggcttgctcgaattcgaggtatatctggaatacctgcaaaaccggtttgaaagtagcgaggagcaggccagagctgtacagatgtccactaaggtcctgatccaattcctccagaagaaggtgggtgtaagtagcttcccccagttaggggttggtgaggacagattaaaggattccgtacttgacaatagcgggatgcagtgtcattttcagaagaggaggctgcatgttaataagcgtgtatag

SEQ ID NO: 269874 - DNA, 597 bp, Artificial Sequence
  derived and/or modified sequence
atgaactccttctctacaagcgccttcggaccggtcgccttctctttaggattgctcctggtgttgcccgcagccttccctgctccagtcccaccaggcgaggacagcaaggacgtggcagccccacatagacagcccctcacttcatctgagcggatagacaagcagatccggtatatcctggatggaatttccgctcttcggaaggagacgtgtaacaaaagcaacatgtgtgaatcctcgaaagaggccctggccgagaacaatctgaacctgcccaaaatggcagaaaaggatggctgttttcaaagcggcttcaatgaagagacttgtttggtgaagatcatcaccggcctgctggagttcgaagtatatctcgagtatcttcagaacaggtttgagtcctccgaggaacaggcccgtgctgttcaaatgtctacaaaggtgctcatacaattcctacagaaaaaggtgggcgtgtcctccttcccccaactgggcgttggcgaagataggcttaaagactccgtcctggacaattccggcatgcaatgtcattttcagaagagacgcctccacgtcaacaaaagggtgtag

SEQ ID NO: 269875 - DNA, 759 bp, Artificial Sequence
  derived and/or modified sequence
atgaactccttctcaaccagcaagtgccgaaagtccctcgcactggaattgcctgctgcggtggaaccgtgtgtaagggagggatgtgtggcacaaggaggtctagccggtggtcagcagcagagacaggccccatcatgtgctgtcagtagtccactgcggagcctaccctcgggtactggggcttttggccctgtagccttttcccttgggctgttactcgtccttcctgccgcttttcctgctcctgtgcccccaggtgaggacagcaaggatgtagccgctccacatagacagccactgaccagcagtgagcgtatcgataagcagatccggtacattttggatggaatcagtgcccttcgcaaggagacatgcaacaaaagtaacatgtgtgaaagttccaaagaggcactagctgagaacaaccttaacctgcccaaaatggcagagaaggatggctgtttccagtccggcttcaatgaggagacctgtcttgttaagatcataacaggccttttggaatttgaagtgtaccttgagtatttacagaataggttcgagtcgagcgaggaacaggctcgggcagtgcagatgtcgacaaaggtgcttattcagtttttgcagaagaaagtgggcgtgtcttccttcccccagttgggggttggagaagaccgtcttaaagatagtgttctggacaactctgggatgcagtgtcacttccagaaaaggagactgcacgtgaacaagcgcgtatag

SEQ ID NO: 269876 - DNA, 369 bp, Artificial Sequence
  derived and/or modified sequence
atgtgtgaaagcagcaaggaggccctggcggaaaataacttaaacctccccaagatggccgagaaggatggctgcttccagtccggctttaacgaagaaacatgtttggtgaaaatcattacaggattgctcgaatttgaagtttacctcgagtacctgcagaatcgctttgagtcctccgaggagcaggcccgggcagtgcagatgagtacaaaggttttaattcagtttttacagaagaaggtcggagtctcatccttcccccaactaggcgttggtgaagaccgacttaaagactccgttttagacaattcaggaatgcagtgccatttccagaaacggagactgcacgtaaataagagagtgtag

SEQ ID NO: 269877 - DNA, 597 bp, Artificial Sequence
  derived and/or modified sequence
atgaactctttttctacgtcagcatttggtcccgttgcattttctctgggcttacttttagtgctacccgcggctttccctgcccctgtccctcctggtgaagacagcaaggatgttgccgcaccgcacagacaacctctgacttcatccgaacggatcgacaagcagattagatacattctcgacggcattagtgccttaagaaaagaaacatgcaataaaagtaatatgtgcgaaagcagcaaggaggcactggctgaaaataatctgaaccttcccaagatggcagagaaagatggttgctttcagagtggatttaacgaagaaacatgtctggttaagattatcacaggcctcctcgaatttgaagtttatctggagtacctgcagaacagatttgagtcctccgaagaacaggcacgtgccgtgcaaatgagtactaaagtgcttatccagtttctccaaaagaaagtaggagtctcaagcttcccccagttgggagtgggcgaagacagattgaaagattcagtgctggacaattcggggatgcagtgccatttccagaaacgtcggcttcacgtgaataagcgcgtgtag

SEQ ID NO: 269878 - DNA, 759 bp, Artificial Sequence
  derived and/or modified sequence
atgaacagcttctctacgagcaaatgcagaaagagccttgcactggaattacctgcagccgtggagccctgcgtgcgtgaaggctgcgtggcccagggcgggctggccggcggacagcagcaaagacaggcaccttcatgcgccgtgtccagcccactgagatcactgccatcaggcacgggtgcctttggccctgtagctttttctctcggcttactactggtcctgcccgccgccttccctgctcctgtacctccaggtgaagacagcaaagatgtcgcggcaccccacagacagccattgacttcaagtgaaagaatcgacaagcaaattcgctacatactcgacggaatctctgccctgagaaaagaaacatgcaacaagtctaacatgtgcgaatctagcaaggaagccctggccgagaacaacctcaacctgccaaagatggctgagaaagacggctgcttccaaagtggctttaatgaggaaacatgtctggtgaaaatcatcacaggcctgcttgagtttgaggtctacttggaatatctgcagaacagattcgagtcttcggaagaacaagccagggcagttcagatgagcaccaaggtcctgatacaattcctgcagaagaaggtgggagtctcctcattccctcagttaggtgttggcgaagaccgactgaaagactcagtgctcgataattcaggaatgcagtgccattttcagaagcggcggctacacgtgaataagagagtgtag

SEQ ID NO: 269879 - DNA, 369 bp, Artificial Sequence
  derived and/or modified sequence
atgtgtgaaagcagcaaggaggccctggcggaaaataacttaaacctccccaagatggccgagaaggatggctgcttccagtccggctttaacgaagaaacatgtttggtgaaaatcattacaggattgctcgaatttgaagtttacctcgagtacctgcagaatcgctttgagtcctccgaggagcaggcccgggcagtgcagatgagtacaaaggttttaattcagtttttacagaagaaggtcggagtctcatccttcccccaactaggcgttggtgaagaccgacttaaagactccgtcttggacaactcagggatgcagtgccactttcaaaagcgcagattacacgtgaataagcgagtttag

SEQ ID NO: 269880 - DNA, 597 bp, Artificial Sequence
  derived and/or modified sequence
atgaatagcttttctacttctgcctttgggccagtggcttttagtttgggtctactgttagtgttacctgccgctttcccagcccctgtacctcccggtgaggatagcaaagatgtggccgcacctcataggcaacctctaacttcctctgagagaattgacaagcaaataagatacatcctagacggaatcagcgcgctgagaaaagaaacctgtaacaagtcgaacatgtgtgagagcagcaaagaagctctggctgagaataatctgaatttacccaaaatggcggagaaagatggatgtttccaaagcggcttcaatgaagaaacttgtttggtcaaaataatcactggattgctcgagttcgaagtatacctggaatatctgcaaaatcgattcgaatcaagcgaggagcaggcaagggccgtccagatgagcacaaaagtgttgatccagttcctgcagaagaaggtgggcgtcagctcttttccccaacttggcgtgggtgaggaccgcctgaaagatagcgttctggataacagcggcatgcaatgccacttccaaaagcgccgactgcacgtaaataaaagagtttag

SEQ ID NO: 269881 - DNA, 759 bp, Artificial Sequence
  derived and/or modified sequence
atgaactctttctccaccagcaaatgcagaaaatctcttgctctggaactgcctgccgcggttgagccatgcgtacgggaaggttgcgtcgcacaagggggtctagcgggtgggcaacaacagagacaggccccttcatgcgctgtaagcagtcctctgcgctctctaccttccggaaccggcgcatttggtcctgtagcctttagcctcggcctactgctggttttgcccgccgcctttcccgccccagtcccacctggagaagattctaaagatgtcgcagcccctcaccgacagcccctgacctcttcagagaggatcgacaagcagattcgctatatcctggacggaatctcagcactacgaaaagaaacgtgtaataaatccaacatgtgcgagagctcaaaggaggccttagccgaaaataatctgaacctaccaaaaatggctgagaaggacggatgtttccaatccggctttaatgaagaaacatgtctggtgaagataatcacagggctgctagaattcgaagtgtatctggagtaccttcaaaaccgatttgaatcctcagaagaacaggcccgagcagtacagatgagcacaaaggtgctgattcaattcctacagaagaaggtcggtgtgagttctttcccccagctcggcgttggcgaggatagactgaaagacagcgtgttggataatagtggaatgcaatgtcacttccaaaagcggcgactgcatgttaataaacgggtgtag

SEQ ID NO: 269882 - RNA, 369 nt, Artificial Sequence
  derived and/or modified sequence
augugugaaagcagcaaggaggcccuggcggaaaauaacuuaaaccuccccaagauggccgagaaggauggcugcuuccaguccggcuuuaacgaagaaacauguuuggugaaaaucauuacaggauugcucgaauuugaaguuuaccucgaguaccugcagaaucgcuuugaguccuccgaggagcaggcccgggcagugcagaugaguacaaagguuuuaauucaguuuuuacagaagaaggucggagucucauccuucccccaacuaggcguuggugaagaccgacuuaaagacuccguuuuagacaauucaggaaugcagugccauuuccagaaacggagacugcacguaaauaagagaguguag

SEQ ID NO: 269883 - RNA, 597 nt, Artificial Sequence
  derived and/or modified sequence
augaacucuuuuucuacgucagcauuuggucccguugcauuuucucugggcuuacuuuuagugcuacccgcggcuuucccugccccugucccuccuggugaagacagcaaggauguugccgcaccgcacagacaaccucugacuucauccgaacggaucgacaagcagauuagauacauucucgacggcauuagugccuuaagaaaagaaacaugcaauaaaaguaauaugugcgaaagcagcaaggaggcacuggcugaaaauaaucugaaccuucccaagauggcagagaaagaugguugcuuucagaguggauuuaacgaagaaacaugucugguuaagauuaucacaggccuccucgaauuugaaguuuaucuggaguaccugcagaacagauuugaguccuccgaagaacaggcacgugccgugcaaaugaguacuaaagugcuuauccaguuucuccaaaagaaaguaggagucucaagcuucccccaguugggagugggcgaagacagauugaaagauucagugcuggacaauucggggaugcagugccauuuccagaaacgucggcuucacgugaauaagcgcguguag

SEQ ID NO: 269884 - RNA, 759 nt, Artificial Sequence
  derived and/or modified sequence
augaacagcuucucuacgagcaaaugcagaaagagccuugcacuggaauuaccugcagccguggagcccugcgugcgugaaggcugcguggcccagggcgggcuggccggcggacagcagcaaagacaggcaccuucaugcgccguguccagcccacugagaucacugccaucaggcacgggugccuuuggcccuguagcuuuuucucucggcuuacuacugguccugcccgccgccuucccugcuccuguaccuccaggugaagacagcaaagaugucgcggcaccccacagacagccauugacuucaagugaaagaaucgacaagcaaauucgcuacauacucgacggaaucucugcccugagaaaagaaacaugcaacaagucuaacaugugcgaaucuagcaaggaagcccuggccgagaacaaccucaaccugccaaagauggcugagaaagacggcugcuuccaaaguggcuuuaaugaggaaacaugucuggugaaaaucaucacaggccugcuugaguuugaggucuacuuggaauaucugcagaacagauucgagucuucggaagaacaagccagggcaguucagaugagcaccaagguccugauacaauuccugcagaagaaggugggagucuccucauucccucaguuagguguuggcgaagaccgacugaaagacucagugcucgauaauucaggaaugcagugccauuuucagaagcggcggcuacacgugaauaagagaguguag

SEQ ID NO: 269885 - RNA, 369 nt, Artificial Sequence
  derived and/or modified sequence
augugugaaagcagcaaggaggcccuggcggaaaauaacuuaaaccuccccaagauggccgagaaggauggcugcuuccaguccggcuuuaacgaagaaacauguuuggugaaaaucauuacaggauugcucgaauuugaaguuuaccucgaguaccugcagaaucgcuuugaguccuccgaggagcaggcccgggcagugcagaugaguacaaagguuuuaauucaguuuuuacagaagaaggucggagucucauccuucccccaacuaggcguuggugaagaccgacuuaaagacuccgucuuggacaacucagggaugcagugccacuuucaaaagcgcagauuacacgugaauaagcgaguuuag

SEQ ID NO: 269886 - RNA, 597 nt, Artificial Sequence
  derived and/or modified sequence
augaauagcuuuucuacuucugccuuugggccaguggcuuuuaguuugggucuacuguuaguguuaccugccgcuuucccagccccuguaccucccggugaggauagcaaagauguggccgcaccucauaggcaaccucuaacuuccucugagagaauugacaagcaaauaagauacauccuagacggaaucagcgcgcugagaaaagaaaccuguaacaagucgaacaugugugagagcagcaaagaagcucuggcugagaauaaucugaauuuacccaaaauggcggagaaagauggauguuuccaaagcggcuucaaugaagaaacuuguuuggucaaaauaaucacuggauugcucgaguucgaaguauaccuggaauaucugcaaaaucgauucgaaucaagcgaggagcaggcaagggccguccagaugagcacaaaaguguugauccaguuccugcagaagaaggugggcgucagcucuuuuccccaacuuggcgugggugaggaccgccugaaagauagcguucuggauaacagcggcaugcaaugccacuuccaaaagcgccgacugcacguaaauaaaagaguuuag

SEQ ID NO: 269887 - RNA, 759 nt, Artificial Sequence
  derived and/or modified sequence
augaacucuuucuccaccagcaaaugcagaaaaucucuugcucuggaacugccugccgcgguugagccaugcguacgggaagguugcgucgcacaagggggucuagcgggugggcaacaacagagacaggccccuucaugcgcuguaagcaguccucugcgcucucuaccuuccggaaccggcgcauuugguccuguagccuuuagccucggccuacugcugguuuugcccgccgccuuucccgccccagucccaccuggagaagauucuaaagaugucgcagccccucaccgacagccccugaccucuucagagaggaucgacaagcagauucgcuauauccuggacggaaucucagcacuacgaaaagaaacguguaauaaauccaacaugugcgagagcucaaaggaggccuuagccgaaaauaaucugaaccuaccaaaaauggcugagaaggacggauguuuccaauccggcuuuaaugaagaaacaugucuggugaagauaaucacagggcugcuagaauucgaaguguaucuggaguaccuucaaaaccgauuugaauccucagaagaacaggcccgagcaguacagaugagcacaaaggugcugauucaauuccuacagaagaaggucggugugaguucuuucccccagcucggcguuggcgaggauagacugaaagacagcguguuggauaauaguggaaugcaaugucacuuccaaaagcggcgacugcauguuaauaaacggguguag

SEQ ID NO: 269888 - protein, 974 aa, Artificial Sequence
  derived and/or modified sequence
MYCAWLENPKSVHKSWDIFFRNTNAGAPPGTAYQSPLPLSRGSLAAVAHAQSLVEAQPNVDKLVEDHLAVQSLIRAYQVRGHHIAKLDPLGISCVNFDDAPVTVSSNVDLAVFKERLRMLTVGGFYGLDESDLDKVFHLPTTTFIGGQESALPLREIIRRLEMAYCQHIGVEFMFINDLEQCQWIRQKFETPGIMQFTNEEKRTLLARLVRSTRFEEFLQRKWSSEKRFGLEGCEVLIPALKTIIDKSSENGVDYVIMGMPHRGRLNVLANVIRKELEQIFCQFDSKLEAADEGSGDVKYHLGMYHRRINRVTDRNITLSLVANPSHLEAADPVVMGKTKAEQFYCGDTEGKKVMSILLHGDAAFAGQGIVYETFHLSDLPSYTTHGTVHVVVNNQIGFTTDPRMARSSPYPTDVARVVNAPIFHVNSDDPEAVMYVCKVAAEWRSTFHKDVVVDLVCYRRNGHNEMDEPMFTQPLMYKQIRKQKPVLQKYAELLVSQGVVNQPEYEEEISKYDKICEEAFARSKDEKILHIKHWLDSPWPGFFTLDGQPRSMSCPSTGLTEDILTHIGNVASSVPVENFTIHGGLSRILKTRGEMVKNRTVDWALAEYMAFGSLLKEGIHIRLSGQDVERGTFSHRHHVLHDQNVDKRTCIPMNHLWPNQAPYTVCNSSLSEYGVLGFELGFAMASPNALVLWEAQFGDFHNTAQCIIDQFICPGQAKWVRQNGIVLLLPHGMEGMGPEHSSARPERFLQMCNDDPDVLPDLKEANFDINQLYDCNWVVVNCSTPGNFFHVLRRQILLPFRKPLIIFTPKSLLRHPEARSSFDEMLPGTHFQRVIPEDGPAAQNPENVKRLLFCTGKVYYDLTRERKARDMVGQVAITRIEQLSPFPFDLLLKEVQKYPNAELAWCQEEHKNQGYYDYVKPRLRTTISRAKPVWYAGRDPAAAPATGNKKTHLTELQRLLDTAFDLDVFKNFS

SEQ ID NO: 269889 - DNA, 2925 bp, Artificial Sequence
  derived and/or modified sequence
atgtactgtgcttggctggaaaatcctaagtcagtccacaagtcttgggatatctttttccgaaacactaacgccggtgctcctcctggaacagcctaccagagtccccttcccttgagtaggggaagcttagccgccgtggcccatgctcagagcctggtcgaagcccagcccaacgtcgataagctcgtggaagaccatctggcagttcagagtctgattcgagcataccaggtgcggggccatcacatcgccaaactggaccctttaggcattagctgcgtcaacttcgacgacgctcctgttaccgtgagcagtaatgtggatctcgcagtgttcaaggaaagacttaggatgcttaccgtggggggattttacggcctggacgaatcagaccttgataaggtcttccatctgcccacaactactttcatcgggggtcaagagtccgcacttcccctccgggagataataagacggcttgagatggcttattgtcagcatattggcgtggagttcatgttcatcaacgacctggagcagtgccagtggatccggcaaaagtttgagaccccaggtattatgcagtttaccaacgaagaaaagcggactttgctggcacgacttgttcgcagcacccggttcgaagagttcctgcagagaaagtggagtagcgagaaaaggtttggcttggagggttgcgaagtactgatcccggctcttaagacgattatagataaaagcagcgagaacggagtggactatgtgattatggggatgccgcacaggggtcgacttaatgtgcttgcgaacgtgattagaaaggagcttgagcagatattctgtcaattcgactctaaattggaagccgctgatgaaggaagcggggatgttaaataccacctggggatgtatcaccggcgaattaacagagtcaccgacagaaatattactctctcactggtagccaatccctctcatctggaagccgcggatcctgtggtgatgggcaagacaaaagccgaacaattctattgcggagacacagagggcaagaaagtgatgagcatactcctacatggcgacgcagcgtttgccggacaaggcattgtttacgagaccttccacctatccgacctgccgtcctacactacccacggtacggtgcacgtagttgtcaacaaccagattggattcactaccgatccaagaatggccaggtcaagcccatatcctaccgacgtggctcgcgtggttaacgcccccattttccatgtgaacagtgatgacccggaggcagtgatgtatgtctgtaaggtggccgcggaatggcgtagcacctttcacaaggatgtggtggttgatcttgtttgttatcgccgcaacggacataacgagatggatgagccaatgttcactcagcccctgatgtataaacagattcggaaacagaaacctgtgctccagaagtacgctgaattgctcgtgtcccagggagttgtcaaccaaccagaatacgaagaggagatcagcaaatatgacaaaatctgtgaagaggcctttgctcggtcaaaggatgagaaaatcttgcacatcaaacattggttagattctccctggcctgggtttttcacgttggatggtcagccccggtccatgagctgcccatcaaccggactgactgaagatattctaacccacattggaaatgtggcgagttcagttccagtcgagaacttcaccattcacggagggctgagccgaatcctaaaaacacggggagagatggttaagaaccgcacggtggactgggcgctggcagagtatatggcctttggctcattactcaaagaaggaattcacatccgcctaagcggccaggatgtggagcggggaaccttctctcacagacatcatgtgctgcacgaccagaatgtcgacaaacgcacctgcatcccaatgaatcacctttggcccaatcaagcgccttacacggtgtgcaactcctccctatctgaatacggagttctcggctttgagcttggatttgccatggctagccccaatgccttagtgttgtgggaggcacaattcggagacttccataataccgctcagtgcatcatcgatcagtttatctgcccagggcaggccaaatgggtgagacagaacggaattgtgctcttactgccccatgggatggaaggcatgggtcctgagcacagctccgccaggcctgagagattcctgcaaatgtgcaatgatgatcccgacgtcctcccggacctcaaagaagcgaatttcgacataaaccagctttacgactgcaactgggtggtggtgaactgctctacacccggaaacttcttccacgttttacgcaggcagattctactgccttttcggaagcccctgataatttttacgccgaagagcttgctaaggcaccctgaggccagatcaagtttcgacgagatgcttccaggtactcatttccagcgcgtgatacccgaagacggcccagctgctcaaaaccctgagaacgtaaagcgtctgctattctgtacaggaaaggtatattacgaccttacgcgtgaacgcaaagcccgcgatatggtagggcaggtggcaatcacccgcatcgagcagctctcgccctttcctttcgatctcctgctcaaggaagtgcagaagtatcccaatgccgagctggcttggtgccaggaggagcataagaaccaggggtactatgattacgtcaagcctagactcaggacaacaatcagtagggccaagcctgtgtggtatgcaggccgggaccctgccgcggctcccgctacagggaacaagaagactcaccttacagaactacagaggctgctggacaccgccttcgatttggacgttttcaagaatttctcttag

SEQ ID NO: 269890 - DNA, 2925 bp, Artificial Sequence
  derived and/or modified sequence
atgtactgtgcctggctggagaaccccaagtctgtgcacaagtcctgggacatcttcttcaggaacaccaatgctggggcccctcctggaacagcctaccagagccccctgcccctgagccggggcagcctggccgctgtggcccacgcccagagcctggtggaggcccagcccaacgtggacaagctggtggaggaccacctggccgtgcagagcctcatccgggcctaccaggtgcggggccaccacatcgccaagctggaccccctgggcatcagctgtgtgaactttgatgatgcccctgtgacagtgagcagcaatgtggacctggccgtgttcaaggagcggctgaggatgctgactgtgggcggcttctacggcctggatgaaagtgacctggacaaggtgttccacctgcccaccaccaccttcatcggcggccaggagagcgccctgcccctgcgggagatcatccggcggctggagatggcctactgccagcacatcggcgtggagttcatgttcatcaatgacctggagcagtgccagtggatccggcagaagtttgagaccccaggcatcatgcagttcaccaatgaggagaagaggaccctgctggcccggctggtgcgcagcaccaggtttgaggagttcctgcagaggaagtggagcagcgagaagagatttggcctggagggctgtgaggtgctgatcccagccctgaagaccatcatcgacaagagcagtgaaaatggagtggactatgtgatcatgggcatgccccaccggggccgcctgaatgtgctggccaacgtcatcaggaaggagctggagcagatcttctgccagtttgacagcaagctggaggccgcagatgagggcagcggagatgtgaagtaccacctgggcatgtaccaccggcgcatcaacagagtgacagacaggaacatcaccctgagcctggtggccaaccccagccacctggaggccgctgaccctgtggtgatgggcaagaccaaggccgagcagttctactgtggggacacagagggcaagaaggtgatgagcatcctgctgcatggagatgctgcctttgctggccagggcatcgtgtatgagaccttccacctgagtgacctgcccagctacaccacccacggcaccgtgcacgtggtggtgaacaaccagatcggcttcaccacagaccccaggatggcccggagcagcccctaccccacagatgtggcccgggtggtgaatgcccccatcttccacgtgaacagtgatgatcctgaggccgtgatgtatgtgtgcaaggtggccgctgagtggaggagcaccttccacaaggatgtggtggtggacctggtgtgctacagaagaaatggccacaatgagatggatgagcccatgttcacccagcccctgatgtacaagcagatcaggaagcagaagcctgtgctgcagaagtatgcagagctgctggtgtcccagggcgtggtgaaccagccagaatatgaggaggagatcagcaaatatgacaagatctgtgaggaggcctttgcccggagcaaggatgagaagatcctgcacatcaagcactggctggacagcccctggccaggcttcttcaccctggatggccagcccaggtccatgagctgccccagcacaggcctgacagaggacatcctgacccacatcggaaatgtggccagctctgtgcctgtggagaacttcaccatccatggaggcctgagccgcatcctgaagaccagaggagagatggtgaagaacagaacagtggactgggccctggccgagtacatggccttcggcagcctgctgaaggagggcatccacatccggctgagcggccaggatgtggagcggggcaccttcagccaccgccaccacgtgctgcatgaccagaatgtggacaagaggacctgcatccccatgaaccacctgtggcccaaccaggccccctacacagtgtgcaacagcagcctgtctgaatatggagtgctgggctttgagctgggctttgccatggccagccccaatgccctggtgctgtgggaggcccagtttggagacttccacaacacagcccagtgcatcatcgaccagttcatctgccccggccaggccaagtgggtgcggcagaatggcatcgtgctgctgctgccccacggcatggagggcatgggccctgagcacagcagcgcccggcctgagcgcttcctgcagatgtgcaatgatgatcctgatgtgctgcctgacctgaaggaggccaactttgacatcaaccagctgtatgactgcaactgggtggtggtgaactgcagcaccccaggcaacttcttccacgtgctgcggcggcagatcctgctgcccttcaggaagcccctcatcatcttcacccccaagagcctgctgcggcaccctgaggcccggagcagctttgatgagatgctgcccggcacccacttccagagggtcatcccagaagatggccctgctgcccagaacccagaaaatgtgaagaggctgctcttctgcaccgggaaggtgtactatgacctgacccgggagaggaaggcccgggacatggtgggccaggtggccatcaccagaattgagcagctgagccccttcccctttgacctgctgctgaaggaggtgcagaagtacccaaatgctgagctggcctggtgccaggaggagcacaagaaccagggctactatgactatgtgaagccccggctgcggaccaccatcagccgggccaagcctgtgtggtacgccggccgggaccctgctgctgccccagccactggaaacaagaagacccacctgacagagctgcagaggctgctggacacagcctttgacctggatgtgttcaagaacttctcctag

SEQ ID NO: 269891 - DNA, 2925 bp, Artificial Sequence
  derived and/or modified sequence
atgtactgcgcctggctggagaaccccaagagcgtgcacaagagctgggacatcttctttagaaacacaaatgcgggggccccacctggcaccgcctaccaatctccactgcctctgtctcgcggttcgctcgcagcagtagcccacgcccagagtctagtggaggcacagcctaatgtggacaagcttgtcgaggatcaccttgcggtgcagagtcttattcgggcctaccaagtcagaggacaccatatagcaaaattggatcctctcggaataagctgcgtgaatttcgatgacgctcccgtgacggttagcagtaacgtagatttggccgtatttaaggagaggcttcgtatgctcaccgtaggaggattctatggcctggacgagtcagatctcgacaaggtgttccaccttcctacgacaacttttataggagggcaggagtctgctctgcctctacgagaaatcatccggcgcttggagatggcctactgtcagcacatcggggtcgagttcatgttcatcaatgacctggagcagtgtcagtggataaggcaaaaattcgagacaccaggtattatgcaattcacaaacgaagaaaagcgaaccctcttggccaggctggtgcgctctacacgttttgaagagtttttgcagcgaaagtggtcttccgaaaaacgatttgggctggagggttgcgaagtgcttatccccgctctcaagaccattattgacaaatcctccgagaatggcgtggactatgttattatggggatgcctcacaggggaaggttgaatgtgctagccaatgtgatcagaaaggagctcgagcagatattctgccagttcgactccaagcttgaggccgcagatgaggggtccggggatgtcaagtatcacctgggcatgtaccaccgccgcataaacagggtgacagacaggaatattaccctctctctggtcgccaacccatcacatttggaggctgcagatcccgtcgtgatgggtaagacaaaggccgaacagttttattgcggcgataccgaaggcaaaaaagtgatgagcatcctcctgcacggggatgccgcgttcgctggtcaaggaatagtttacgaaacattccatctgtcagatctgccatcttacacaactcatggcacggtgcacgtggtggtgaataaccaaatcggcttcacgactgatccaaggatggctcgctccagtccctatccaactgacgtcgcacgggtcgtgaacgcaccaatcttccatgtgaattcagacgaccccgaggccgtgatgtacgtctgcaaggtggcagctgaatggcgttcaaccttccacaaggacgttgtggtcgacttagtgtgctacaggaggaacggacataacgagatggacgaacccatgttcacacagcctctgatgtataagcagatacgaaaacagaaacccgtgttgcagaaatacgcggaactactggtgtcacaaggtgtggtcaaccagcctgaatatgaagaagagatcagcaagtacgacaagatctgtgaggaggcatttgcccgctctaaggacgaaaagatactgcatatcaaacactggctcgattccccgtggccggggttttttacacttgacggacagcccagatctatgtcctgcccctcaaccggacttacagaggacatcctaacccacatcggtaacgtagcttcttcagtgcccgtcgagaactttaccatccacggaggcctgagccgcatcctcaagacccgcggcgagatggtcaagaaccgtaccgtcgactgggcactggcagagtatatggcattcggctcactgctgaaggagggtatacacattcgcctgagcggccaggatgtggaaaggggtactttcagccacaggcatcacgtgctccacgaccaaaatgtagacaaacgaacttgtataccaatgaaccacctctggccgaatcaggccccttatacggtctgtaatagtagtctgtccgaatacggagtgcttggctttgagctgggattcgcaatggcgtctccgaacgctctcgtgctttgggaggctcagtttggagactttcacaacaccgcacagtgcataatcgaccagttcatttgccccggccaggccaagtgggtgaggcagaacggaattgtactgctccttccccatggaatggagggcatgggcccggaacattcctctgcccgacctgagagatttctgcagatgtgcaacgacgaccctgacgtgctgccagatctgaaggaggcgaacttcgacatcaaccagttgtatgactgcaattgggttgtggtaaactgctccactccaggaaacttctttcatgtcctgagacgccagatccttttgccctttcgcaaaccccttataatcttcacacctaagagtcttctgagacaccccgaggcacggagttcattcgatgagatgctacctggaacacacttccagagagtaatacctgaagacggccctgcggcccagaatcctgagaacgttaaacggcttctattctgtactggaaaagtgtattatgacctcactcgagaacggaaggctcgcgacatggtggggcaggtcgcaattacaagaatagagcaacttagcccttttccctttgacttgcttcttaaggaagtgcagaagtaccctaacgccgagctagcttggtgccaggaagagcacaagaaccagggttattatgattacgtcaaacctcgactaagaacgaccatcagcagggccaaaccggtttggtatgcaggtagggatcccgctgcagctccggccaccggaaataagaaaactcatctgacggaactgcagaggttactagacactgcgtttgacctcgacgtatttaagaactttagctag

SEQ ID NO: 269892 - DNA, 3266 bp, Artificial Sequence
  derived and/or modified sequence
attctgcacctgttgctgctgagccctttctcagtgggactagttcgaactatgtggaggagatgtactgtgcttggctggaaaaccccaaaagtgtacataagtcatgggacattttttttcgcaacacgaatgccggagccccaccgggcactgcctaccagagtccccttcccctgagccgaggctccctggctgctgtggcccatgcacagtccctggtagaagcacagcccaacgtggacaagctcgtggaggaccacctggcagtgcagtcgctcatcagggcatatcaggtcaggggtcaccacattgcaaaacttgatcctctcggaattagttgtgtaaattttgatgatgctccagtaactgtttcttcaaacgtggatcttgcagttttcaaggaacgacttcgaatgctaacagtaggagggttctatggcctggatgagtctgacctcgacaaggtcttccacttgcccaccaccactttcatcgggggacaggaatcagcacttcctctgcgggagatcatccgtcggctggagatggcctactgccagcatattggggtggagttcatgttcatcaatgacctggagcagtgccagtggatccggcagaagtttgagacccctgggatcatgcagttcacaaatgaggagaaacggaccctgctggccaggcttgtgcggtccaccaggtttgaggagttcctacagcggaagtggtcctctgagaagcgctttggtctagaaggctgcgaggtactgatccctgccctcaagaccatcattgacaagtctagtgagaatggcgtggactacgtgatcatgggcatgccacacagagggcggctgaacgtgcttgcaaatgtcatcaggaaggagctggaacagatcttctgtcaattcgattcaaagctggaggcagctgatgagggctccggagatgtgaagtaccacctgggcatgtatcaccgcaggatcaatcgtgtcaccgacaggaacattaccttgtccttggtggccaacccttcccaccttgaggccgctgaccccgtggtgatgggcaagaccaaagccgaacagttttactgtggcgacactgaagggaaaaaggtcatgtccatcctgttgcatggggatgctgcatttgctggccagggcattgtgtacgagaccttccacctcagcgacctgccatcctacacaactcatggcaccgtgcacgtggtcgtcaacaaccagatcggcttcaccaccgaccctcggatggcccgctcctccccctaccccactgacgtggcccgagtggtgaatgcccccattttccacgtgaactcagatgaccccgaggctgtcatgtacgtgtgcaaagtggcggccgagtggaggagcaccttccacaaggacgtggttgtcgatttggtgtgttaccggcgcaacggccacaacgagatggatgagcccatgttcacgcagccgctcatgtacaagcagatccgcaagcagaagcctgtgttacagaagtacgctgagctgctggtgtcgcagggtgtggtcaaccagcctgagtatgaggaggaaatttccaagtatgataagatctgtgaggaagcttttgccagatctaaagatgagaagatcttgcacattaagcactggctggactctccctggcctggcttcttcaccctggacgggcagcccaggagcatgtcctgcccctccacgggtctgacggaggatattctgacacacatcgggaatgtggctagttctgtgcctgtggaaaactttactattcatggagggctgagccggatcttgaagactcgtggggaaatggtgaagaaccggactgtggactgggctctagcggagtacatggcgtttggctcgctcctgaaggagggcatccacattcggctgagcggccaggacgtggagcggggcacattcagccaccgccaccatgtgctccatgaccagaatgtggacaagagaacctgcatccccatgaaccatctctggcccaatcaggccccctatactgtgtgcaacagctcactgtctgagtacggcgtgctgggctttgagctgggcttcgccatggccagtcctaatgccctggtcctctgggaagcccaatttggtgacttccacaacacggcccagtgtatcatcgaccagttcatctgcccgggacaagccaagtgggtgcggcagaatggcatcgtgttgctgctgccccatggcatggagggcatgggtccagaacattcctccgcccgcccagagcggttcttgcagatgtgcaacgatgacccagatgtcctgccagaccttaaagaagccaacttcgacatcaatcagctatatgactgcaattgggttgttgtcaactgctccactcctggcaacttcttccacgtgctacgacgccagatcctgctgccattccggaagccgttaattatcttcacccccaaatccctgttgcgccaccccgaggccagatccagctttgatgagatgcttccaggaacccacttccagcgggtgatcccagaagatggccctgcagctcagaacccagaaaatgtcaaaaggcttctcttctgcaccggcaaagtgtattatgacctcacccgggagcgcaaagcacgcgacatggtggggcaggtggccatcacaaggattgagcagctgtcgccattcccctttgacctcctgctgaaggaggtgcagaagtaccccaatgctgagctggcctggtgccaggaggagcacaagaaccaaggctactatgactacgtgaagccaagacttcggaccaccatcagccgcgccaagcccgtctggtatgccggccgggacccagcggctgctccagccaccggcaacaagaagacccacctgacggagctgcagcgcctcctggacacggccttcgacctggacgtcttcaagaacttctcgtagatgctgcctagggttgcttgggccactgccctctccacacccatgactgccccttgcttctcaactaaagaatagtgcctcagcgctgcccacaccaccgccctcctcgctgtgccaccacccctccctctgctctcataggagttaggctgtcgtccccctccagtgcttggctgccccacaggccacacgctgcccaggctctgctgacttctgagcagttttccaggaggccggggggagcaggaggaggaaaggtagcccccgagggatgtcctt

SEQ ID NO: 269893 - DNA, 2925 bp, Artificial Sequence
  derived and/or modified sequence
atgtactgtgcttggctcgaaaatcctaaaagtgtgcataagagctgggatatcttttttagaaacactaacgccggtgcgccacctggcaccgcatatcaatcccccctgcctctgagcaggggttctcttgcagcagtggcacacgcccagagtttggtggaggctcagccaaatgtggacaaattagtcgaagatcacctcgccgttcagtcactgattcgcgcataccaggtacgaggccaccacattgcaaagttggaccctctgggcatctcctgcgtgaattttgacgacgcccctgtgacagtgagcagcaacgtagatctggcagtctttaaagagcggttacgtatgttgaccgtcggaggcttttatggtcttgatgagtctgacctggacaaagtgttccaccttccgacaaccacttttatcggcggacaggagtcggctttaccgctccgcgagattattagacggctggagatggcatattgccagcatatcggcgtggaattcatgtttatcaatgacctggagcagtgtcagtggatccgccagaagttcgaaactccgggtattatgcagttcacaaatgaagagaagagaactctgctggccaggctcgtgaggtcgacgcgctttgaggagtttttgcagcggaaatggtcatccgaaaagcgctttggccttgaaggatgtgaggtcctgatcccagcccttaaaacaatcatagataagtcatccgagaatggtgtggactatgtgattatgggtatgccccatcggggtcgtctcaacgtccttgccaacgtcattcggaaggagctggaacagatcttctgccaattcgactccaaactggaagcagccgacgaaggttccggggatgtcaaataccacctggggatgtaccaccgcagaatcaatagggtgacggataggaacatcactttaagtctggtggccaatccgtcccacctcgaggccgctgatccagttgtgatgggaaaaacaaaagccgagcagttttattgcggggataccgaagggaaaaaagtgatgtctatcctgttgcacggggatgccgcattcgccggtcagggcatcgtctacgagacttttcatttgtctgatttaccatcatatacaacacatggcactgtacacgtcgttgtgaataatcagattggattcaccacagacccgagaatggccaggtcctcaccctaccccactgatgtcgccagggtggtgaacgcgcctatattccacgtaaactcggacgatcctgaggccgtgatgtatgtgtgtaaagttgccgctgagtggagatcaaccttccataaggacgtcgtcgtcgacctggtgtgctacaggcggaacggccacaacgagatggacgagcccatgtttacccagcccttgatgtacaaacaaatccgtaagcagaagcctgttctacagaagtacgcagaacttctggtctcccagggggtggtgaatcagcctgagtacgaagaggaaattagcaagtatgataaaatctgtgaagaggcctttgcccgtagcaaggacgaaaaaattctccacattaaacactggctggacagcccctggccgggtttcttcacactcgacggccaacccaggtccatgagttgtccctccacagggctgacagaggacattttgacccatattgggaatgtggcttctagcgtgcctgtggagaactttaccattcatggcggactcagcagaattcttaagacacgaggcgagatggtaaagaataggacagttgactgggctctcgcggaatacatggcttttggatcgttgcttaaggagggcattcatatccggctgtctggacaggatgtggagagggggacattttcacaccgacatcacgtgctgcatgaccagaatgtagacaagcgtacatgtatacccatgaaccacctgtggccaaatcaggctccttacaccgtgtgcaatagttcactcagcgagtatggagtcctaggcttcgaactcgggttcgcaatggcaagccctaacgcactggtcctttgggaggcacagttcggtgacttccacaatacagcccaatgtataatagaccagtttatctgccccggacaagctaagtgggtaagacagaacgggatcgtgttactgttgccacacggaatggaggggatgggcccagagcatagctcagcacggcctgagcgttttctccagatgtgcaacgacgatccagacgtgttgcctgacttgaaggaggccaatttcgatatcaatcagttgtacgactgcaactgggtcgttgtcaattgcagcacccctggtaacttcttccacgttctccggcgacagatcctgctccctttcagaaaacccctgatcatctttacccctaaatctcttttaagacatccggaggctcgctcttccttcgatgaaatgctgcccggaacccatttccagcgcgtgattccagaagacggcccagccgctcagaaccccgaaaatgttaagcgcctactgttttgcaccgggaaggtgtattacgacctgactagggaacgtaaggcaagggacatggtgggacaagtggcaataacaaggatcgagcaactgagcccgttccctttcgatctgctcctgaaggaggtacagaagtatcctaacgccgagctcgcttggtgtcaggaggaacataaaaaccaagggtactacgattacgtgaagcctcgcctgagaaccactatctcacgcgctaaacctgtgtggtacgcgggtagagaccctgccgcagcccctgctaccgggaacaagaagactcacctgaccgaattgcagcgtctcctcgacactgcttttgatctggatgtattcaaaaacttttcttag

SEQ ID NO: 269894 - DNA, 2925 bp, Artificial Sequence
  derived and/or modified sequence
atgtactgcgcctggctggagaaccccaagagcgtgcacaagagctgggacatcttcttcagaaacaccaacgccggcgccccccccggcaccgcctaccagagccccctgcccctgagcagaggcagcctggccgccgtggcccacgcccagagcctggtggaggcccagcccaacgtggacaagctggtggaggaccacctggccgtgcagagcctgatcagagcctaccaggtgagaggccaccacatcgccaagctggaccccctgggcatcagctgcgtgaacttcgacgacgcccccgtgaccgtgagcagcaacgtggacctggccgtgttcaaggagagactgagaatgctgaccgtgggcggcttctacggcctggacgagagcgacctggacaaggtgttccacctgcccaccaccaccttcatcggcggccaggagagcgccctgcccctgagagagatcatcagaagactggagatggcctactgccagcacatcggcgtggagttcatgttcatcaacgacctggagcagtgccagtggatcagacagaagttcgagacccccggcatcatgcagttcaccaacgaggagaagagaaccctgctggccagactggtgagaagcaccagattcgaggagttcctgcagagaaagtggagcagcgagaagagattcggcctggagggctgcgaggtgctgatccccgccctgaagaccatcatcgacaagagcagcgagaacggcgtggactacgtgatcatgggcatgccccacagaggcagactgaacgtgctggccaacgtgatcagaaaggagctggagcagatcttctgccagttcgacagcaagctggaggccgccgacgagggcagcggcgacgtgaagtaccacctgggcatgtaccacagaagaatcaacagagtgaccgacagaaacatcaccctgagcctggtggccaaccccagccacctggaggccgccgaccccgtggtgatgggcaagaccaaggccgagcagttctactgcggcgacaccgagggcaagaaggtgatgagcatcctgctgcacggcgacgccgccttcgccggccagggcatcgtgtacgagaccttccacctgagcgacctgcccagctacaccacccacggcaccgtgcacgtggtggtgaacaaccagatcggcttcaccaccgaccccagaatggccagaagcagcccctaccccaccgacgtggccagagtggtgaacgcccccatcttccacgtgaacagcgacgaccccgaggccgtgatgtacgtgtgcaaggtggccgccgagtggagaagcaccttccacaaggacgtggtggtggacctggtgtgctacagaagaaacggccacaacgagatggacgagcccatgttcacccagcccctgatgtacaagcagatcagaaagcagaagcccgtgctgcagaagtacgccgagctgctggtgagccagggcgtggtgaaccagcccgagtacgaggaggagatcagcaagtacgacaagatctgcgaggaggccttcgccagaagcaaggacgagaagatcctgcacatcaagcactggctggacagcccctggcccggcttcttcaccctggacggccagcccagaagcatgagctgccccagcaccggcctgaccgaggacatcctgacccacatcggcaacgtggccagcagcgtgcccgtggagaacttcaccatccacggcggcctgagcagaatcctgaagaccagaggcgagatggtgaagaacagaaccgtggactgggccctggccgagtacatggccttcggcagcctgctgaaggagggcatccacatcagactgagcggccaggacgtggagagaggcaccttcagccacagacaccacgtgctgcacgaccagaacgtggacaagagaacctgcatccccatgaaccacctgtggcccaaccaggccccctacaccgtgtgcaacagcagcctgagcgagtacggcgtgctgggcttcgagctgggcttcgccatggccagccccaacgccctggtgctgtgggaggcccagttcggcgacttccacaacaccgcccagtgcatcatcgaccagttcatctgccccggccaggccaagtgggtgagacagaacggcatcgtgctgctgctgccccacggcatggagggcatgggccccgagcacagcagcgccagacccgagagattcctgcagatgtgcaacgacgaccccgacgtgctgcccgacctgaaggaggccaacttcgacatcaaccagctgtacgactgcaactgggtggtggtgaactgcagcacccccggcaacttcttccacgtgctgagaagacagatcctgctgcccttcagaaagcccctgatcatcttcacccccaagagcctgctgagacaccccgaggccagaagcagcttcgacgagatgctgcccggcacccacttccagagagtgatccccgaggacggccccgccgcccagaaccccgagaacgtgaagagactgctgttctgcaccggcaaggtgtactacgacctgaccagagagagaaaggccagagacatggtgggccaggtggccatcaccagaatcgagcagctgagccccttccccttcgacctgctgctgaaggaggtgcagaagtaccccaacgccgagctggcctggtgccaggaggagcacaagaaccagggctactacgactacgtgaagcccagactgagaaccaccatcagcagagccaagcccgtgtggtacgccggcagagaccccgccgccgcccccgccaccggcaacaagaagacccacctgaccgagctgcagagactgctggacaccgccttcgacctggacgtgttcaagaacttcagctag

SEQ ID NO: 269895 - protein, 274 aa, Artificial Sequence
  derived and/or modified sequence
MGKSLSHLPLHSSKEDAYDGVTSENMRNGLVNSEVHNEDGRNGDVSQFPYVEFTGRDSVTCPTCQGTGRIPRGQENQLVALIPYSDQRLRPRRTKLYVMASVFVCLLLSGLAVFFLFPRSIDVKYIGVKSAYVSYDVQKRTIYLNITNTLNITNNNYYSVEVENITAQVQFSKTVIGKARLNNITIIGPLDMKQIDYTVPTVIAEEMSYMYDFCTLISIKVHNIVLMMQVTVTTTYFGHSEQISQERYQYVDCGRNTTYQLGQSEYLNVLQPQQ

SEQ ID NO: 269896 - protein, 25 aa, Artificial Sequence
  derived and/or modified sequence
MGKSLSHLPLHSSKEDAYDGVTSEN

SEQ ID NO: 269897 - protein, 110 aa, Artificial Sequence
  derived and/or modified sequence
MGKSLSHLPLHSSKEDAYDGVTSENMRNGLVNSEVHNEDGRNGDVSQFPYVEFTGRDSVTCPTCQGTGRIPRGQENQLVALIPYSDQRLRPRRTKLYVMASVFVCLLLSG

SEQ ID NO: 269898 - DNA, 825 bp, Artificial Sequence
  derived and/or modified sequence
atgggcaagagcctgagccacctgcccctgcacagcagcaaggaggacgcctacgacggcgtgaccagcgagaacatgagaaacggcctggtgaacagcgaggtgcacaacgaggacggcagaaacggcgacgtgagccagttcccctacgtggagttcaccggcagagacagcgtgacctgccccacctgccagggcaccggcagaatccccagaggccaggagaaccagctggtggccctgatcccctacagcgaccagagactgagacccagaagaaccaagctgtacgtgatggccagcgtgttcgtgtgcctgctgctgagcggcctggccgtgttcttcctgttccccagaagcatcgacgtgaagtacatcggcgtgaagagcgcctacgtgagctacgacgtgcagaagagaaccatctacctgaacatcaccaacaccctgaacatcaccaacaacaactactacagcgtggaggtggagaacatcaccgcccaggtgcagttcagcaagaccgtgatcggcaaggccagactgaacaacatcaccatcatcggccccctggacatgaagcagatcgactacaccgtgcccaccgtgatcgccgaggagatgagctacatgtacgacttctgcaccctgatcagcatcaaggtgcacaacatcgtgctgatgatgcaggtgaccgtgaccaccacctacttcggccacagcgagcagatcagccaggagagataccagtacgtggactgcggcagaaacaccacctaccagctgggccagagcgagtacctgaacgtgctgcagccccagcagtag

SEQ ID NO: 269899 - DNA, 78 bp, Artificial Sequence
  derived and/or modified sequence
atgggcaagagcctgagccacctgcccctgcacagcagcaaggaggacgcctacgacggcgtgaccagcgagaactag

SEQ ID NO: 269900 - DNA, 333 bp, Artificial Sequence
  derived and/or modified sequence
atgggcaagagcctgagccacctgcccctgcacagcagcaaggaggacgcctacgacggcgtgaccagcgagaacatgagaaacggcctggtgaacagcgaggtgcacaacgaggacggcagaaacggcgacgtgagccagttcccctacgtggagttcaccggcagagacagcgtgacctgccccacctgccagggcaccggcagaatccccagaggccaggagaaccagctggtggccctgatcccctacagcgaccagagactgagacccagaagaaccaagctgtacgtgatggccagcgtgttcgtgtgcctgctgctgagcggctag

SEQ ID NO: 269901 - DNA, 825 bp, Artificial Sequence
  derived and/or modified sequence
atgggaaaatcactgtcccatctgcctctgcattcctccaaggaagatgcatatgacggcgtgacctccgagaacatgaggaatggcctcgtgaattctgaggtccacaacgaggatggacgaaatggcgatgtttctcagtttccttacgtggagttcacaggccgcgactctgtgacttgccctacgtgtcaaggtacaggcagaatcccacgcggccaggagaatcagcttgtggcactgattccgtactcagaccagagactgcggccccggcgcactaagctatatgtgatggctagcgttttcgtttgtctattgctcagcggtcttgcagtcttttttctcttcccacggagtattgatgtgaagtatatcggcgtgaaatccgcatatgtcagctatgacgttcagaagcggacaatctacctgaatattactaacactctgaacattacaaacaataactattacagtgttgaagtggagaatatcactgcacaagttcagttcagcaagaccgtgatcggaaaggcccggttaaataatatcacgataataggccctctggatatgaagcagattgattatacggtgcccacagttattgcagaggaaatgtcctacatgtatgacttctgtactctcatctcgatcaaagtccacaatatcgtcctgatgatgcaggtcacagtcaccaccacatacttcggacactcagagcagatcagtcaggaacgttaccaatacgtggactgcgggcgcaatacaacatatcaactaggacaaagcgaatatctgaatgtgctccagccgcagcaatag

SEQ ID NO: 269902 - DNA, 825 bp, Artificial Sequence
  derived and/or modified sequence
atgggcaagagcctgagtcatctgccactgcattcttctaaagaagacgcctatgatggagtgacttctgagaatatgaggaacggcctggtgaacagtgaggttcacaatgaggacggcaggaacggagatgtcagccagtttccctacgtggagttcactggtcgcgatagcgtgacatgccctacatgccaggggaccggcagaatcccccggggtcaggagaaccaattggtagccctgataccgtacagcgatcaaaggctacggccacgaaggaccaaactgtatgttatggcatctgtgttcgtgtgtctgcttctcagcggcctggctgtcttctttctgttccctcgaagcatcgatgtgaaatacatcggcgtgaagagcgcctatgtttcttacgatgtgcagaaaagaaccatttacttgaatattacaaacacactgaacataaccaataataattattactcagtggaggtggagaacatcactgcacaggtgcagttcagtaagacagtaattggcaaagctcgcctcaacaatatcacgatcattggcccccttgatatgaaacaaattgactacacagtccctactgtcatagctgaagagatgtcgtatatgtacgacttttgcactttgattagtatcaaagtgcacaacattgttctcatgatgcaagtcactgtcactacgacttactttggacatagcgagcaaatcagtcaggagagatatcagtatgtggattgtggccggaacaccacataccagctgggacaaagcgagtacttgaatgtccttcaaccccagcagtag

SEQ ID NO: 269903 - DNA, 78 bp, Artificial Sequence
  derived and/or modified sequence
atggggaagagcctcagtcatttgcctttgcattccagtaaggaagacgcatatgatggagtcacaagtgagaactag

SEQ ID NO: 269904 - DNA, 333 bp, Artificial Sequence
  derived and/or modified sequence
atgggaaagagcttgtcccatctcccattgcacagctctaaagaagacgcctatgatggcgtgacctccgagaatatgcgcaatggcttagtgaatagcgaagtccataacgaagatggtaggaacggcgacgtgagccagtttccgtacgttgagtttacggggcgcgattctgtcacttgccctacgtgccagggaacaggcagaataccccggggacaggagaaccaactggttgcccttataccctacagcgaccagagattgagacctaggcgtactaaactttacgtgatggccagtgtgttcgtgtgcttgctgctgtccgggtag

SEQ ID NO: 269905 - DNA, 825 bp, Artificial Sequence
  derived and/or modified sequence
atgggcaagagcctgagccacctgcccctgcacagcagcaaagaagatgcctatgatggagtgaccagcgagaacatgagaaatggcctggtgaacagcgaggtgcacaatgaagatggaagaaatggagatgtgtcccagttcccctacgtggagttcaccggccgggacagcgtgacctgccccacctgccagggcaccggccgcatcccccggggccaggagaaccagctggtggccctgatcccctacagcgaccagaggctgcggcccaggaggaccaagctgtatgtgatggcctctgtgtttgtgtgcctgctgctgagcggcctggccgtgttcttcctgttccccaggagcattgatgtgaagtacatcggcgtgaagagcgcctacgtgtcctatgatgtgcagaagaggaccatctacctgaacatcaccaacaccctgaacatcaccaacaacaactactacagcgtggaggtggagaacatcacagcccaggtgcagttcagcaagacagtcatcggcaaggcccggctgaacaacatcaccatcatcggccccctggacatgaagcagattgactacacagtgcccaccgtgattgctgaggagatgagctacatgtatgacttctgcaccctcatcagcatcaaggtgcacaacatcgtgctgatgatgcaggtgacagtgaccaccacctacttcggccacagcgagcagatcagccaggagcgctaccagtatgtggactgtggcaggaacaccacctaccagctgggccagagcgagtacctgaatgtgctgcagccccagcagtag

SEQ ID NO: 269906 - DNA, 78 bp, Artificial Sequence
  derived and/or modified sequence
atgggcaagagcctgagccacctgcccctgcacagcagcaaagaagatgcctatgatggagtgaccagcgagaactag

SEQ ID NO: 269907 - DNA, 333 bp, Artificial Sequence
  derived and/or modified sequence
atgggcaagagcctgagccacctgcccctgcacagcagcaaagaagatgcctatgatggagtgaccagcgagaacatgagaaatggcctggtgaacagcgaggtgcacaatgaagatggaagaaatggagatgtgtcccagttcccctacgtggagttcaccggccgggacagcgtgacctgccccacctgccagggcaccggccgcatcccccggggccaggagaaccagctggtggccctgatcccctacagcgaccagaggctgcggcccaggaggaccaagctgtatgtgatggcctctgtgtttgtgtgcctgctgctgtctggatag

SEQ ID NO: 269908 - DNA, 825 bp, Artificial Sequence
  derived and/or modified sequence
atgggcaagagcctgagccacctgcccctgcacagcagcaaggaggacgcctatgacggtgtaacttctgagaacatgcgcaatggtttagtgaactctgaggtccataacgaggatggccggaacggtgatgtatctcagtttccatacgtggaatttacaggccgagactctgttacatgtcccacctgccagggcaccggtcgcatcccccgtgggcaggaaaaccagctcgtggctcttataccctactcagatcagagactccggcctcgaagaacaaaattgtacgtgatggcctccgtctttgtttgtctgctgttatccggattggcggtgttctttctctttcctcggtccattgatgtgaagtacatcggtgtgaagagcgcctatgtgagctacgacgtgcaaaagagaacgatttatcttaacattacgaataccctgaatatcaccaacaacaactactacagcgtcgaggtggagaacattacagcgcaggtccagttttcaaagacagtgattggcaaagccaggcttaacaacattacaattattgggccccttgacatgaaacagatagactataccgttcctacagtcatcgctgaggaaatgtcttatatgtatgatttctgtaccctgatctcaattaaggtgcataatatagtcctgatgatgcaagtgacagtcacgactacctactttggccactctgaacaaattagccaggaaagatatcaatacgtggattgcggtcgtaatactacatatcaactcggccaaagcgagtacctgaacgtcctgcagccacagcaatag

SEQ ID NO: 269909 - DNA, 825 bp, Artificial Sequence
  derived and/or modified sequence
atgggcaagagcctgagccacctgcccctgcacagcagcaaggaggatgcatacgatggcgttacctccgagaatatgaggaatgggctcgtgaattcggaagtccataacgaagacgggcggaacggggacgtttcccaattcccatacgtcgaattcaccggcagggactcagtgacttgtccaacttgtcaggggacgggccgaataccacgtggacaggaaaatcagcttgtggcactcatcccctatagtgaccagaggctgcgccctcgcaggaccaagctgtacgtaatggcgagcgtattcgtgtgtcttctgctaagtggtttggcggtattctttctcttcccacggtctatcgatgtaaagtacattggagtgaagtctgcatacgtaagttatgacgtccagaaaagaacgatttacctgaacattactaatacactgaacataacaaacaataattactactctgtggaggtcgagaacattaccgcccaagttcagttctctaagacggtgattgggaaggccaggctgaacaacatcactattatcgggcctttggacatgaagcagatcgattacacagtgcccaccgtcatcgcagaggagatgtcttacatgtatgatttctgcacactcatctccatcaaggtacacaacatcgtgcttatgatgcaagtgaccgtgactaccacatacttcggacatagtgagcagatctcacaggagagataccagtacgtcgattgcgggaggaacaccacttatcagctggggcagagtgagtacctgaacgtcttacaaccccaacagtag

SEQ ID NO: 269910 - DNA, 78 bp, Artificial Sequence
  derived and/or modified sequence
atgggcaagagcctgagccacctgcccctgcacagcagcaaggaggacgcgtacgatggtgttacttctgaaaactag

SEQ ID NO: 269911 - DNA, 333 bp, Artificial Sequence
  derived and/or modified sequence
atgggcaagagcctgagccacctgcccctgcacagcagcaaggaggatgcctacgatggcgtgacatccgagaatatgcgcaatggcctcgtcaactctgaggtgcacaacgaggacggccggaatggcgatgtaagccaatttccctatgtggaattcaccgggcgagacagtgtgacctgccccacgtgccaggggacagggcgcatccccaggggccaggagaatcagctggtggctttgattccatactccgaccaaagactcaggcctcgccggaccaagctttatgtgatggccagcgtgttcgtctgcttgctgttgtctgggtag

SEQ ID NO: 269912 - DNA, 825 bp, Artificial Sequence
  derived and/or modified sequence
atgggaaaatctctgtcccatctgcccctacacagctcaaaggaagatgcttatgacggggtcactagtgaaaacatgaggaacggtttagtgaactcggaggtgcataacgaggacggacggaacggagatgtctcacagtttccctacgtcgagttcaccggcagggactcggttacctgccccacctgtcagggtaccggtcgcatcccgagaggacaggagaaccaactggtcgctctgatcccctattcggaccagagactgcggccaagaaggacaaaactttacgtgatggcgagcgttttcgtgtgcctgctgttgtccgggcttgccgtcttcttcctgtttcctaggtcaatcgatgtgaaatacatcggcgtaaagtctgcctacgtgtcgtacgacgtacagaagcggactatttatttaaatattacaaacactctcaatatcacaaataataattattatagtgtcgaggtcgaaaacatcaccgcacaggtgcaatttagcaagaccgtaatcgggaaggctcgacttaataacatcactattatagggccactcgacatgaaacagatcgattacacagtgccaaccgttatagcggaagagatgagctatatgtacgatttttgcactctgatatctataaaagttcataacatagtcctgatgatgcaggttacagtgacgacaacctacttcggacacagcgaacagatctcacaggagaggtaccaatacgtggattgcgggaggaacaccacctaccagctgggccagagtgagtatttaaacgtgctgcagcctcagcagtag

SEQ ID NO: 269913 - DNA, 825 bp, Artificial Sequence
  derived and/or modified sequence
atgggcaaatccctcagccatctgccgctgcactcctcaaaagaggacgcttatgacggcgtgacatcagagaatatgaggaacggactggtaaactctgaggtgcataatgaagatggacggaatggagacgttagccagtttccctatgtagagtttactggtagggacagtgtaacgtgtcctacatgccaggggacagggaggatcccacgcggtcaggagaatcagctcgtcgccctgatcccttatagtgaccagaggttgaggcctcgccgaacaaaactttacgtgatggcatccgttttcgtatgtctgcttctgtcagggcttgccgtcttcttcctgtttcccaggtctatcgacgtgaagtatatcggcgtgaaaagcgcctacgtttcgtatgacgttcagaagcgcactatatacctgaatatcaccaatactcttaacatcaccaataataattactattctgtcgaagtagaaaatataacggcccaggtgcagttttccaagaccgtgattgggaaggctcgcctcaataatatcacaatcattggccctctggatatgaaacaaattgattacaccgtaccaacagttatagccgaagaaatgagttacatgtacgatttctgtacactgattagtatcaaagttcataatattgtccttatgatgcaggtcaccgttactaccacatattttggtcactctgaacagatttcccaggaaaggtaccagtatgttgactgcggtaggaacactacataccaactgggacagagtgagtatcttaacgtgctccagcctcaacagtag

SEQ ID NO: 269914 - DNA, 78 bp, Artificial Sequence
  derived and/or modified sequence
atgggcaagagtctcagccatcttcccctgcattccagcaaagaagatgcctacgacggcgtgacatccgagaattag

SEQ ID NO: 269915 - DNA, 333 bp, Artificial Sequence
  derived and/or modified sequence
atgggtaagtctctatcacatctgccattacattcatctaaggaagacgcttacgacggagtgacctccgagaatatgcgaaacgggttggtgaactctgaagtgcataacgaggatggaaggaacggggacgtgagtcagttcccctatgtggagtttaccgggagggatagtgtcacctgccccacctgccagggaaccggcagaatccctcgcggacaagaaaaccagctggtcgcactgatcccctattccgatcagagactccgacctcgacggacaaagctgtacgtgatggccagtgtcttcgtctgcctgctactgtcgggctag

SEQ ID NO: 269916 - DNA, 6432 bp, Artificial Sequence
  derived and/or modified sequence
acggcggccgcgcgctccaggccggtcgctccaccccccggctcccgggactgtggactccacgaccctgtcctcggccctgtccgcgccgaagcagcccgggactgcgcagcgccccgcgtgccgatcttttcctaattcagcagcgatttaaccaagagcctggaatattttaaggagtaataagagacatttacaaactattctctctgaagcctgctacctggaggcatcatctagataatcagaaccttggcttccacatcctcctcccttgtcttaactacaaacatttctttctgctgacttcaactcctcagacatgggaaagtctctttctcatttgcctttgcattcaagcaaagaagatgcttatgatggagtcacatctgaaaacatgaggaatggactggttaatagtgaagtccataatgaagatggaagaaatggagatgtctctcagtttccatatgtggaatttacaggaagagatagtgtcacctgccctacttgtcagggaacaggaagaattcctagggggcaagaaaaccaactggtggcattgattccatatagtgatcagagattaaggccaagaagaacaaagctgtatgtgatggcttctgtgtttgtctgtctactcctttctggattggctgtgtttttccttttccctcgctctatcgacgtgaaatacattggtgtaaaatcagcctatgtcagttatgatgttcagaagcgtacaatttatttaaatatcacaaacacactaaatataacaaacaataactattactctgtcgaagttgaaaacatcactgcccaagttcaattttcaaaaacagttattggaaaggcacgcttaaacaacataaccattattggtccacttgatatgaaacaaattgattacacagtacctaccgttatagcagaggaaatgagttatatgtatgatttctgtactctgatatccatcaaagtgcataacatagtactcatgatgcaagttactgtgacaacaacatactttggccactctgaacagatatcccaggagaggtatcagtatgtcgactgtggaagaaacacaacttatcagttggggcagtctgaatatttaaatgtacttcagccacaacagtaaaaactggaagagatggatttaaagaagaaatatctattgatatttcctatactctcaatgaagaggtatttcctaataggagaccttaaattgaacaaacctaaagtttacacttctaagagtacagttaaaagtatgtggacctgcagttcttgtaactctccactctgtgttaatgatatatttgtactaggatcttttacttgaatctaaatttactggttgatttccttctccagcctatcccctacagggaaaagctgatacttcccctatagtacaataaataattatttaaaagtcatagctccagtcactactgaaaacataattttggtgataaacataatttgagaaacttaatttctgaatgtttttatagaaaattactgaaagtctattactcatggaagacttttaaagaataaccttttttcctgttttataaattcccattgttatatggtagtatttcagctacacaatattttagcttttagctagacatttatagcttttcatttgttgaaatggtaatcatctgcatgtttttgtcacttatttcaggttagtgattgcctaacacttataagccaaaataatctttgcaaaattccatacctaaaattttgaaagcccctaatgttttcacacatctttctgtattagttatagttttgtgaaatctttgtgtgatcttcaaacattatcatttaatgtacaatactgtaaataaactgtgcatggcttttatacagctttagtaaatgtcaaataaagtggtacagactcattacaacaagtttctcataaaaatacaataaataggaaaatgaaattcagaaacccatagactgggaataggttccagttacagcttggatctggcataaaataaatttgaaataaaatattttgatgctccatttttttatgttgcttttcatactaaagaatggtgtagacatgttttgcaactgttaggtacccagttatcaattttatcaatgttttagaggaggaaattatttttttggtagaaattgttcaagaaatccttaattgaatgtcattaaatgatggtggccaaaataaaacctatttagaaatttaatcactttgcacatcacttggaatatgatgcctctagtagttacttttttatagttttctacttttggttttatttaaaattgttttcaaatatagattattgacttattcaactttgctgttttatattttcagtatcatttttcatttttttttttttttgtcttttcacttaccaagttctagggacatttaaaatatgtactaagtgtaggagtggttatgataccaaaaaatgtagctgggttgagattaatttcgttctgttttctcatgacagaaatcaggtttccctttccccacccctaagtgcctaacttaggtctgaaacagcctgtttattagtctgactctctcaaccataaaacataagctttatttaattctgcctttaaacacactcaggtttccccttaattttcatattattttctgcaagttttcttgagtatcttcaattcgttgaatgtggtttttggtttttttttgttttaacactagtcttcccttaattcattgctaactcaagccatccttactattaaacccaaatcagtcctttaagttcattatggcctttctagtatttaaaaaaaaaaaaatcattttcatttttcttctgctacgtttcctgactactactgcatacttctctgatacaggttctgtttgtattttttatatcattctcattttctcatttgacatgatctatgtctatatatgatataggtccccttttgtctcaaaatttttaattatgtgacttcaaaaatcacctgtatctgtagtagggcttccaaatctgcttctccatatgtgaccagtcacctgtctgctttcacatttagctagtgaactacacatttactaaaatgtgtaaattttacacatttagtgactgtgtaaaataaaaaaaaagttattttatcatatcctttctattatgttcccatcctgtcctcatgtcccatttactttattatcaccattcatttcttcaaaattatcttttagatacgctcatacaaaaatcaatccttgttttcttgcttgtgtcttttaaccttggaaaattacatcgtgtaaattaaacagatttttctgatgatctgtgcttcttatatactattagagtgcatgatagtatctcctgaaaaggatggaaagtagaagcatttgcttttagtcacttaattttgaatcttttttcttcatcttttgaattaattttttttattatatctacttttagtggagtttgagtcagaaaaaaacaagaatttgaaacaagtaaaaagatagaagagaaataaagatggtatgtgactactttcagagagagttaagtaactgtcagaataagcctggaacaaaacaggctgtaaattaataaaactacaaacacacattcaggtgaagcagaagtatagccataaaacatctagaaagagtgaatgaggcttttagcttttcttaggtcaatgtccagtgtgcttttttccatgggaataggataggtattaatacgcttttctaaactgctctcagaccttatccagaggacatggtaaagatatgttacagaaatttttctgatacttcctggaataactttaagttacaccctagtagactggtcattctaataaaatccagtactataacaaacctctgtatgttgatagcacattggccctttttagagttctttcctatgtttttcttacgtgatttcccacagttccatgagtccaacaaaggagagtgataggctccttatcttttagaagaggaaggaaaggcatgaagaagttgagggactggctgaagatcacgtacttactaagtagtacaactggagcaagatcaagtatctctgtctcccatatctgtgttctatcatttaaaatatatattggaaatccctgctgactcagattggtatgattaaaaatgagaggaaagttcaaatagttagtagtgacaaactaatactgctggactaagattttggtagcattgttttctaaaatattttaaatggagaatgaacacttataaaatgctttggaacataatctttagcttaattttctgttaaaatttagtaccccttcatcattccaataaagataagactgatccattgtctaaggaaattatttataaataatagagattaatttatttgagatttgaaataagaatagtatgaaaatattagataccacataaattgtttgaaattactgaataaccatcttaagtatggaacatttaaatggctatattttatttgtgtacagtttttctgtgccttgttaggccagtgaagcaattattttctctaagaaaatgacaataaaatataacacacttcagattgtctgatttacagtttggaaaggacaccgcaatgttcaaataggtaggagaccatcaaaaacacaattaaagtaacatattaggagacttgaaacttcagcctaataaatccttcatggttcttagccttattattgtgatataattctagatattttcttggagggcatgtgcccaactctcccgcaccccattttgtttgtcttttaaagttcttagaataaacagttctttatataataattatattttatttaagaaaatagtttgttaggtactttttaaaagatgtaaatttttaaatttacaaatacatatgggtctttgataagcaataggaattgaattacaagttactagggttataagcaaaaggttgcttaccataatgtcattaggtcacgatttttagctcacatctggaagcagcaactacttggctcaagtacatataagagtaattagttttattctctcttttttataaaatcgggtttcagatgagatgtttatcttagactattttagggaaaaattttacatgtttgagatggtggagtaaaaagactgttaaacatttcttttaaaaaattatttttacattacaacaatatatttatgatgtgttcagatcaaaaatttaacttctgtgtcccagatctactttcaaagtgagattttcacttgtcagcttaaatttctgactagaactaacatttgtgtatttttgtgcttagtcggaatacaaatttcacagtggatttttgaagtttgtccttaaattggataaaatcaagtgattaaagttactaaagagataaaaatggtaatttccatttttaaaagtaatttggttgtgtttatagttatttgtacaagtatttatcacagactctaaattgaaaaatgtagtatgatctatatttgaccctaaaaatgttggattaatttaacaaatatggcagatttttcataactaagtcttaagtcttctaaaaggaagctgttacccttctgtttttaattacattaattgaaatgtgttttaagagatacaatttcagcatattttatatattaaaaaacaaaaaaggattagtattgagccagtggccaaaaggtaatattactaccatgtagactgttatagttcaaattgtcccacttcacccagaattttagaaactagaagtctgggaggtactatatcagctgtagttgggtaattccaagtgctgatagtactattcatcttttttattattgtgtcagatgaaacaaatgccaagttgcaaaatatgcagatttttattatataatggttttaggcataaattattaacaagccatgccttatgtgtttcatcttatatttttctttagaactaaactataacagattttggaaaatgatttgacgtgcttgctcacttgattgacttggtcagatatttgaatgatggtattacctagattctaatccttgattctagttatataataaataatatagaatatgaaaatatgtttgggcatttactgtttatattatgtagtagcctccatcatgacacacttactacatttatgaattgagcagttctgtaattgtaattattattgctgttcatgtaacaaaacatgcttataatagcaaacaaatagaaatgcccccaaaatgctatttttttaattcagttataactgttactcttgtagttgtgtatgacgcaataaaatttgtaaaaaaatttcagcatgaaaaataaaatttgtatcactta

SEQ ID NO: 269917 - DNA, 2126 bp, Artificial Sequence
  derived and/or modified sequence
agcagcgcttggcctctgctgatgccgtcgttatcctacccctcccccgtcccagctctacggcggccgcgcgctccaggccggtcgctccaccccccggctcccgggactgtggactccacgaccctgtcctcggccctgtccgcgccgaagcagcccgggactgcgcagcgccccgcgtgccgacatgggaaagtctctttctcatttgcctttgcattcaagcaaagaagatgcttatgatggagtcacatctgaaaacatgaggaatggactggttaatagtgaagtccataatgaagatggaagaaatggagatgtctctcagtttccatatgtggaatttacaggaagagatagtgtcacctgccctacttgtcagggaacaggaagaattcctagggggcaagaaaaccaactggtggcattgattccatatagtgatcagagattaaggccaagaagaacaaagctgtatgtgatggcttctgtgtttgtctgtctactcctttctggattggctgtgtttttccttttccctcgctctatcgacgtgaaatacattggtgtaaaatcagcctatgtcagttatgatgttcagaagcgtacaatttatttaaatatcacaaacacactaaatataacaaacaataactattactctgtcgaagttgaaaacatcactgcccaagttcaattttcaaaaacagttattggaaaggcacgcttaaacaacataaccattattggtccacttgatatgaaacaaattgattacacagtacctaccgttatagcagaggaaatgagttatatgtatgatttctgtactctgatatccatcaaagtgcataacatagtactcatgatgcaagttactgtgacaacaacatactttggccactctgaacagatatcccaggagaggtatcagtatgtcgactgtggaagaaacacaacttatcagttggggcagtctgaatatttaaatgtacttcagccacaacagtaaaaactggaagagatggatttaaagaagaaatatctattgatatttcctatactctcaatgaagaggtatttcctaataggagaccttaaattgaacaaacctaaagtttacacttctaagagtacagttaaaagtatgtggacctgcagttcttgtaactctccactctgtgttaatgatatatttgtactaggatcttttacttgaatctaaatttactggttgatttccttctccagcctatcccctacagggaaaagctgatacttcccctatagtacaataaataattatttaaaagtcatagctccagtcactactgaaaacataattttggtgataaacataatttgagaaacttaatttctgaatgtttttatagaaaattactgaaagtctattactcatggaagacttttaaagaataaccttttttcctgttttataaattcccattgttatatggtagtatttcagctacacaatattttagcttttagctagacatttatagcttttcatttgttgaaatggtaatcatctgcatgtttttgtcacttatttcaggttagtgattgcctaacacttataagccaaaataatctttgcaaaattccatacctaaaattttgaaagcccctaatgttttcacacatctttctgtattagttatagttttgtgaaatctttgtgtgatcttcaaacattatcatttaatgtacaatactgtaaataaactgtgcatggcttttatacagctttagtaaatgtcaaataaagtggtacagactcattacaacaagtttctcataaaaatacaataaataggaaaatgaaattcagaaacccatagactgggaataggttccagttacagcttggatctggcataaaataaatttgaaataaaatattttgatgctccatttttttatgttgcttttcatactaaagaatggtgtagacatgttttgcaactgttaggtacccagttatcaattttatcaatgttttagaggaggaaattatttttttggtagaaattgttcaagaaatccttaattgaatgtcattaaatgatggtggccaaaataaaacctatttagaaatttaa

SEQ ID NO: 269918 - DNA, 584 bp, Artificial Sequence
  derived and/or modified sequence
ctctacggcggccgcgcgctccaggccggtcgctccaccccccggctcccgggactgtggactccacgaccctgtcctcggccctgtccgcgccgaagcagcccgggactgcgcagcgccccgcgtgccggtgagcgaccccggacgtgcagtccccaggtccccttccggagcgaggctgagcggctgcgccgcggcttgagccgggcctgacaaggaggggaggccgctggggtgctgggccagccgcagacatgggaaagtctctttctcatttgcctttgcattcaagcaaagaagatgcttatgatggagtcacatctgaaaacatgaggaatggactggttaatagtgaagtccataatgaagatggaagaaatggagatgtctctcagtttccatatgtggaatttacaggaagagatagtgtcacctgccctacttgtcagggaacaggaagaattcctagggggcaagaaaaccaactggtggcattgattccatatagtgatcagagattaaggccaagaagaacaaagctgtatgtgatggcttctgtgtttgtctgtctactcctttctgga

SEQ ID NO: 269919 - DNA, 498 bp, Artificial Sequence
  derived and/or modified sequence
atggcatctccccccgcctgcccttcagaagaagacgagtctctcaaaggctgcgagctgtatgtgcagctacatgggattcaacaggtgctcaaagactgcatcgtccacttgtgcatttccaagcctgagagacctatgaagtttctgagagagcacttcgaaaagctggagaaggaagaaaaccggcagatccttgcccggcagaaatcaaatagtcagagcgactcacacgacgaagaagtgtctccaacaccgccaaaccccgttgtgaaagcgcgtagacgccgcggaggtgtgagcgcggaggtctacaccgaagaggatgctgtgtcctatgtgaggaaagtgattcccaaagactataaaactatgacagccttagctaaggcgataagtaaaaacgtcctgttcgcacacctcgatgataatgaaagatctgacatattcgatgccatgtttcctgtgacccacatagccggcgagaccgtgatttag

SEQ ID NO: 269920 - DNA, 894 bp, Artificial Sequence
  derived and/or modified sequence
atggcatcaccccccgcttgccctagcgaggaggatgagtccctgaaaggttgcgaactctatgtgcaactgcatggaattcaacaagtcctaaaggattgcatagttcacctctgcatttccaaaccagaacgccccatgaaattccttcgcgaacactttgagaagctcgagaaggaagagaacagacagattctggcccgccagaagagcaattcccagagtgactcacacgatgaagaagtctcgccaactccccctaatcctgtagtgaaggccagacggcggagagggggagtttctgccgaggtgtacaccgaagaggacgcagtgtcttacgttcggaaggtgatacccaaagactacaagactatgactgcgttggctaaggccatcagcaagaacgtattgttcgcccacttggatgataacgagaggtcggacatctttgacgccatgttccctgttacccatatagccggggaaacagttatccagcaaggaaatgaaggggacaacttttacgtcgtcgatcagggggaggttgatgtctacgttaacggtgagtgggtgactaacatttccgaaggcggctcatttggtgagctagctttaatttacgggacgccacgggccgctacagttaaagccaagactgatcttaagctgtggggcatagacagagatagctaccgcagaattttaatgggctctacattgaggaagcggaagatgtacgaagagttcttgtcaaaggtctcaatcctagaatccctggagaagtgggagcgcctgacggtggctgacgccctcgagcccgtccagtttgaagatggcgaaaagattgtagtgcagggcgagcctggagacgacttctacataattacagagtag

SEQ ID NO: 269921 - DNA, 177 bp, Artificial Sequence
  derived and/or modified sequence
atggcttctccccctgcgtgccctagcgaagaagatgagagcctgaaggggtgtgagctttatgtgcagctccatgggatccaacaggtactgaaggactgcatagtacacctgtgtatatcaaaacctgaacgacccatgaaatttttaagggaacatttcgaaaaacttgagtag

SEQ ID NO: 269922 - DNA, 498 bp, Artificial Sequence
  derived and/or modified sequence
atggccagccccccagcctgccccagtgaagaagatgagagcctgaagggctgtgagctgtatgtgcagctgcacggcatccagcaggtgctgaaggactgcatcgtgcacctgtgcatcagcaagccagagcggcccatgaagttcctgcgggagcactttgagaagctggagaaggaggagaaccggcagatcctggcccggcagaagagcaacagccagagcgacagccatgatgaggaggtgagccccaccccacccaaccctgtggtgaaggccaggagaagaagaggaggagtgtctgctgaggtgtacacagaggaggatgctgtgtcctatgtgaggaaggtgatccccaaggactacaagaccatgacagccctggccaaggccatcagcaagaatgtgctgtttgcccacctggatgacaatgaaagaagtgacatctttgatgccatgtttcctgtgacccacatcgccggggagaccgtcatctag

SEQ ID NO: 269923 - DNA, 894 bp, Artificial Sequence
  derived and/or modified sequence
atggccagccccccagcctgccccagtgaagaagatgagagcctgaagggctgtgagctgtatgtgcagctgcacggcatccagcaggtgctgaaggactgcatcgtgcacctgtgcatcagcaagccagagcggcccatgaagttcctgcgggagcactttgagaagctggagaaggaggagaaccggcagatcctggcccggcagaagagcaacagccagagcgacagccatgatgaggaggtgagccccaccccacccaaccctgtggtgaaggccaggagaagaagaggaggagtgtctgctgaggtgtacacagaggaggatgctgtgtcctatgtgaggaaggtgatccccaaggactacaagaccatgacagccctggccaaggccatcagcaagaatgtgctgtttgcccacctggatgacaatgaaagaagtgacatctttgatgccatgtttcctgtgacccacatcgccggggagaccgtcatccagcagggcaatgaaggagacaacttctacgtggtggaccagggcgaggtggatgtgtatgtgaatggagagtgggtgaccaacatcagcgagggcggcagctttggagagctggccctgatctacggcaccccccgggccgccaccgtgaaggccaagacagacctgaagctgtggggcatcgaccgggacagctaccgccgcatcctgatgggcagcaccctgaggaagaggaagatgtatgaggagttcctgagcaaggtgtccatcctggagagcctggagaagtgggagcggctgactgtggctgatgccctggagcctgtgcagtttgaagatggagagaagatcgtggtgcagggcgagcctggagatgacttctacatcatcacagaatag

SEQ ID NO: 269924 - DNA, 177 bp, Artificial Sequence
  derived and/or modified sequence
atggccagccccccagcctgccccagtgaagaagatgagagcctgaagggctgtgagctgtatgtgcagctgcacggcatccagcaggtgctgaaggactgcatcgtgcacctgtgcatcagcaagccagagcggcccatgaagttcctgcgggagcactttgagaagctggagtag

SEQ ID NO: 269925 - DNA, 498 bp, Artificial Sequence
  derived and/or modified sequence
atggccagcccccccgcctgccccagcgaggaggacgagagcctgaagggctgtgaattgtacgtgcagttacacggaattcaacaggtgttgaaggactgcatcgtccacttgtgcatctccaagcctgagcggccgatgaaattcctgcgtgagcattttgaaaagctggaaaaggaggaaaatcgccagattctggcccgccagaaatccaattcccagtctgactctcacgatgaggaggtctccccaacacccccaaacccagtcgtgaaagctaggcgaaggcgtggcggagtgtctgccgaggtgtacacagaagaagatgcagtgagctacgttaggaaggtcatcccgaaggactacaaaaccatgaccgcgctggcgaaggcgatcagcaaaaacgtgctgtttgcccatttggacgacaacgaacggagtgacatctttgatgcgatgttcccagttacgcatatcgcaggcgaaacagttatctag

SEQ ID NO: 269926 - DNA, 894 bp, Artificial Sequence
  derived and/or modified sequence
atggccagcccccccgcctgccccagcgaggaggacgagagcctgaaggggtgtgaactatacgtacagctgcacggaatccagcaagtgctgaaagattgtattgttcacctatgcatatctaagcctgaacggccaatgaaatttttacgggaacactttgaaaagctggagaaagaggagaacagacagattctcgccaggcagaaatccaatagccagagcgacagccacgatgaagaagtgtcacctactcctcctaaccctgtggtaaaggcccgtaggaggaggggaggggtgagcgccgaggtgtacactgaagaagacgccgtgagttacgtgcggaaagtgattcccaaggactataagacaatgacagctcttgccaaagctatttccaaaaacgtgctgtttgcgcaccttgacgacaacgagcgatctgatatttttgatgccatgtttcctgtcacccacatagccggtgaaaccgtcattcagcaggggaatgagggtgataacttctacgtggtagaccagggggaagttgatgtctatgtcaatggggagtgggtgaccaatatcagtgaagggggcagttttggcgagctagccctgatctatgggactccccgagccgccaccgttaaggcaaaaaccgatttgaaactgtggggcattgatagagacagctacaggcgcatccttatggggtctaccctgcgaaaaaggaagatgtacgaggagttcctatccaaggtgagcattctggagagcctcgaaaaatgggagcgactgaccgtggctgacgctttagagcctgtacagttcgaggacggggagaagattgtcgttcagggggaacctggggatgacttttatatcatcactgagtag

SEQ ID NO: 269927 - DNA, 177 bp, Artificial Sequence
  derived and/or modified sequence
atggccagcccccccgcctgccccagcgaggaggacgagagcctgaaagggtgcgagctgtatgtgcaactgcacgggattcagcaagtcttaaaagactgcatcgtgcatctctgtattagcaaaccggagcgtcccatgaaattcttgcgtgaacactttgagaagcttgagtag

SEQ ID NO: 269928 - DNA, 498 bp, Artificial Sequence
  derived and/or modified sequence
atggcctcaccaccagcttgtccgtccgaggaggatgaatctttgaaaggatgcgagctgtatgtgcagctgcacggcatccaacaggtacttaaggattgcattgttcacttgtgcatctccaaacctgaacgccctatgaaatttctacgagaacacttcgagaaactggagaaagaggaaaatcgccagatcctcgccaggcagaagtcaaattcacagtccgacagtcatgacgaggaggtgtctcccacaccgccaaaccccgttgttaaggctaggcgcaggagggggggagttagtgcagaggtttatactgaagaagacgccgtctcttatgtgcgcaaagttattccaaaggattataaaaccatgacagccttggcgaaggccatcagcaaaaacgtgctctttgctcacctggacgataacgagcggtccgacatatttgatgcaatgtttcccgtcacacacatcgccggagaaacggtgatttag

SEQ ID NO: 269929 - DNA, 894 bp, Artificial Sequence
  derived and/or modified sequence
atggctagccctcctgcctgcccttcagaggaggacgagtccctgaaggggtgcgagctatatgtccaactgcacggtatccagcaggtcctgaaagactgtatcgtgcacctgtgcatctccaaacccgagagacctatgaaattcctgagagaacatttcgagaagttagagaaggaggaaaacagacaaatcctagctcgtcagaagtccaactctcagagtgatagtcacgacgaagaggtatcaccaacgccgcctaaccctgtggtcaaggctcggaggcggaggggtggcgtctctgccgaggtctacaccgaagaagacgctgtttcttatgtccgcaaggtgatcccgaaggactacaaaaccatgacagcactggccaaggctatatccaaaaacgtacttttcgcccacctggacgataacgagcgttcagacatcttcgatgccatgtttcctgttacacatattgccggagagacagtgattcagcagggcaacgagggtgacaacttttatgtggtagatcagggtgaagttgatgtttacgtgaacggagagtgggtcactaacatcagtgaagggggatccttcggtgagctggcactgatttatggaacacctcgggctgcgactgtcaaggctaaaacggacctcaaactctgggggatagatcgcgatagttacagacggatccttatgggtagcaccctcagaaaaaggaagatgtacgaagaatttctatctaaggtgtcaatactggaaagcctggaaaaatgggaacgactgaccgtcgccgacgcactggaacccgtgcagttcgaagatggcgagaaaatcgtggtgcagggggaacccggagatgatttttacatcattaccgaatag

SEQ ID NO: 269930 - DNA, 177 bp, Artificial Sequence
  derived and/or modified sequence
atggccagccccccagcttgcccaagcgaggaggacgaatcattgaagggatgcgagttgtacgtccagctccatggaatccagcaggtgcttaaggactgcatagtgcacctgtgcatctcgaaacccgaacggcctatgaagtttctccgcgagcatttcgagaagctggagtag

SEQ ID NO: 269931 - DNA, 651 bp, Artificial Sequence
  derived and/or modified sequence
gtgggagcggggcccggggtgctcaccgggcgtggcctgcgccagggcggcggcgcagctgcagctctcgcggcgcacggcggcgaaggggtcgagcagggagcagcgcagcgcgcgcagagcgtcgtccaggaaggaagcagccaccctcgccatggcctccccgcccgcctgcccctcggaggaggacgagagcctgaagggctgtgagctgtacgtgcagctgcacgggatccagcaggtcctcaaagactgtatcgtccacctctgcatctccaagcccgaacgccccatgaagttcctccgggagcacttcgagaagctggagaaggaagaaaacaggcagattttggcgcggcaaaagtcaaactcacagtcggactcccatgatgaggaggtgtcgcccacccccccgaaccctgtggtgaaggcccgccgccggcgaggaggcgtgagtgccgaggtgtacaccgaggaggacgccgtgtcctacgtcaggaaggtgattcccaaggactacaaaaccatgactgcgctggccaaggccatctccaagaacgtgctcttcgctcacctggatgacaacgagaggagtgacatattcgatgccatgttccctgtcactcacatcgctggggagactgttataca

SEQ ID NO: 269932 - DNA, 1006 bp, Artificial Sequence
  derived and/or modified sequence
ctctggccgctaaggcagagtgagaccccagggaacgggcgtgcttgctgggtaccgggtgtcctgcagaggcagggatgtgatcccctaggtgaaggaagcagccaccctcgccatggcctccccgcccgcctgcccctcggaggaggacgagagcctgaagggctgtgagctgtacgtgcagctgcacgggatccagcaggtcctcaaagactgtatcgtccacctctgcatctccaagcccgaacgccccatgaagttcctccgggagcacttcgagaagctggagaaggaagaaaacaggcagattttggcgcggcaaaagtcaaactcacagtcggactcccatgatgaggaggtgtcgcccacccccccgaaccctgtggtgaaggcccgccgccggcgaggaggcgtgagtgccgaggtgtacaccgaggaggacgccgtgtcctacgtcaggaaggtgattcccaaggactacaaaaccatgactgcgctggccaaggccatctccaagaacgtgctcttcgctcacctggatgacaacgagaggagtgacatattcgatgccatgttccctgtcactcacatcgctggggagactgttatacagcaagggaatgaaggagacaacttctatgtcgttgatcaaggggaagtggatgtgtacgtgaacggagagtgggtgaccaacatcagcgagggaggcagcttcggggagctggcgctcatctacggcacccccagggctgcgaccgtgaaagccaagacggacctcaagctctgggggatcgaccgggacagctaccggcgcatccttatgggcagcacgctgaggaaacgcaagatgtacgaggagttcctcagcaaggtctccatcctagagtccctggagaagtgggagcgtctgaccgtggcggatgcgctggagcccgtccagtttgaagatggagagaaaattgtggtccagggagagcctggggacgacttttacatcatcacggag

SEQ ID NO: 269933 - DNA, 346 bp, Artificial Sequence
  derived and/or modified sequence
ggatccccaagaaaggtgggaaagaatttaggagggttccgatttcccactgggcatcggggtgaagctggtgcgcctaagcgctgggagtcacctggggaagcggggctgggcccacctggccaccctctctggccgctaaggcagagaaggaagcagccaccctcgccatggcctccccgcccgcctgcccctcggaggaggacgagagcctgaagggctgtgagctgtacgtgcagctgcacgggatccagcaggtcctcaaagactgtatcgtccacctctgcatctccaagcccgaacgccccatgaagttcctccgggagcacttcgagaagctggagaa

SEQ ID NO: 269934 - DNA, 498 bp, Artificial Sequence
  derived and/or modified sequence
atggccagcccccccgcctgccccagcgaggaggacgagagcctgaagggctgcgagctgtacgtgcagctgcacggcatccagcaggtgctgaaggactgcatcgtgcacctgtgcatcagcaagcccgagagacccatgaagttcctgagagagcacttcgagaagctggagaaggaggagaacagacagatcctggccagacagaagagcaacagccagagcgacagccacgacgaggaggtgagccccaccccccccaaccccgtggtgaaggccagaagaagaagaggcggcgtgagcgccgaggtgtacaccgaggaggacgccgtgagctacgtgagaaaggtgatccccaaggactacaagaccatgaccgccctggccaaggccatcagcaagaacgtgctgttcgcccacctggacgacaacgagagaagcgacatcttcgacgccatgttccccgtgacccacatcgccggcgagaccgtgatctag

SEQ ID NO: 269935 - DNA, 894 bp, Artificial Sequence
  derived and/or modified sequence
atggccagcccccccgcctgccccagcgaggaggacgagagcctgaagggctgcgagctgtacgtgcagctgcacggcatccagcaggtgctgaaggactgcatcgtgcacctgtgcatcagcaagcccgagagacccatgaagttcctgagagagcacttcgagaagctggagaaggaggagaacagacagatcctggccagacagaagagcaacagccagagcgacagccacgacgaggaggtgagccccaccccccccaaccccgtggtgaaggccagaagaagaagaggcggcgtgagcgccgaggtgtacaccgaggaggacgccgtgagctacgtgagaaaggtgatccccaaggactacaagaccatgaccgccctggccaaggccatcagcaagaacgtgctgttcgcccacctggacgacaacgagagaagcgacatcttcgacgccatgttccccgtgacccacatcgccggcgagaccgtgatccagcagggcaacgagggcgacaacttctacgtggtggaccagggcgaggtggacgtgtacgtgaacggcgagtgggtgaccaacatcagcgagggcggcagcttcggcgagctggccctgatctacggcacccccagagccgccaccgtgaaggccaagaccgacctgaagctgtggggcatcgacagagacagctacagaagaatcctgatgggcagcaccctgagaaagagaaagatgtacgaggagttcctgagcaaggtgagcatcctggagagcctggagaagtgggagagactgaccgtggccgacgccctggagcccgtgcagttcgaggacggcgagaagatcgtggtgcagggcgagcccggcgacgacttctacatcatcaccgagtag

SEQ ID NO: 269936 - DNA, 177 bp, Artificial Sequence
  derived and/or modified sequence
atggccagcccccccgcctgccccagcgaggaggacgagagcctgaagggctgcgagctgtacgtgcagctgcacggcatccagcaggtgctgaaggactgcatcgtgcacctgtgcatcagcaagcccgagagacccatgaagttcctgagagagcacttcgagaagctggagtag

SEQ ID NO: 269937 - protein, 363 aa, Artificial Sequence
  derived and/or modified sequence
MASKSWLNFLTFLCGSAIGFLLCSQLFSILLGEKVDTQPNVLHNDPHARHSDDNGQNHLEGQMNFNADSSQHKDENTDIAENLYQKVRILCWVMTGPQNLEKKAKHVKATWAQRCNKVLFMSSEENKDFPAVGLKTKEGRDQLYWKTIKAFQYVHEHYLEDADWFLKADDDTYVILDNLRWLLSKYDPEEPIYFGRRFKPYVKQGYMSGGAGYVLSKEALKRFVDAFKTDKCTHSSSIEDLALGRCMEIMNVEAGDSRDTIGKETFHPFVPEHHLIKGYLPRTFWYWNYNYYPPVEGPGCCSDLAVSFHYVDSTTMYELEYLVYHLRPYGYLYRYQPTLPERILKEISQANKNEDTKVKLGNP

SEQ ID NO: 269938 - protein, 309 aa, Artificial Sequence
  derived and/or modified sequence
MASKSWLNFLTFLCGSAIGFLLCSQLFSILLGEKVDTQPNVLHNDPHARHSDDNGQNHLEGQMNFNADSSQHKDENTDIAENLYQKVRILCWVMTGPQNLEKKAKHVKATWAQRCNKVLFMSSEENKDFPAVGLKTKEGRDQLYWKTIKAFQYVHEHYLEDADWFLKADDDTYVILDNLRWLLSKYDPEEPIYFGRRFKPYVKQGYMSGGAGYVLSKEALKRFVDAFKTDKCTHSSSIEDLALGRCMEIMNVEAGDSRDTIGKETFHPFVPEHHLIKGYLPRTFWYWNYNYYPPVEVSLEILLLCQYLD

SEQ ID NO: 269939 - DNA, 1777 bp, Artificial Sequence
  derived and/or modified sequence
tacagctttgattttataacatcctgctaatttttgttcttacagaaatacactttcgggaaatggcctctaaatcctggctgaattttttaaccttcctctgtggatcagcaataggatttcttttatgttctcagctatttagtattttgttgggagaaaaggttgacacccagcctaatgttcttcataatgatcctcatgcaaggcattcagatgataatggacagaatcatctagaaggacaaatgaacttcaatgcagattctagccaacataaagatgagaacacagacattgctgaaaacctctatcagaaagttagaattctttgctgggttatgaccggccctcaaaacctagagaaaaaggccaaacacgtcaaagctacttgggcccagcgttgtaacaaagtgttgtttatgagttcagaagaaaataaagacttccctgctgtgggactgaaaaccaaagaaggcagagatcaactatactggaaaacaattaaagcttttcagtatgttcatgaacattatttagaagatgctgattggtttttgaaagcagatgatgacacgtatgtcatactagacaatttgaggtggcttctttcaaaatacgaccctgaagaacccatttactttgggagaagatttaagccttatgtaaagcagggctacatgagtggaggagcaggatatgtactaagcaaagaagccttgaaaagatttgttgatgcatttaaaacagacaagtgtacacatagttcctccattgaagacttagcactggggagatgcatggaaattatgaatgtagaagcaggagattccagagataccattggaaaagaaacttttcatccctttgtgccagaacaccatttaattaaaggttatctacctagaacgttttggtactggaattacaactattatcctcctgtagagggtcctggttgctgctctgatcttgcagtttcttttcactatgttgattctacaaccatgtatgagttagaatacctcgtttatcatcttcgtccatatggttatttatacagatatcaacctaccttacctgaacgtatactaaaggaaattagtcaagcaaacaaaaatgaagatacaaaagtgaagttaggaaatccttgaaagaaaatcatgaatgaacaaaggtaatatgtctagcactgcactgaaaaaggacttctgcatttctgacatagaacactggaatcccagtgaggaattctaagtgaacattccttatagaaacctttcacatgaatgactataaactgaagctttaaatgagctgtgaagtgtgttaaaatgtgttttgatacagtaatatataaatatgtctatatatatgaggaacttgtgttttttaaatggtggccaggtagaggaactagaaaagagattttgttgcctgttttctgaccatctgtgttattgtcactgagaaactaaaatagtaaatttactaaaactacactgcaccatgttagtaataaacagatctgccttaaagaaaagaaaattttagaaagaaatattgttgctcagtgttgttaatatagctcaagaattgagtttatatttgcagtatgctataaatgatacccccctaccacacccacacacacagtttttgtctaatgaaaatgttgctgtgattatttataattggtagtatttcttccagaagaagctaaaataagactggcacttaccctgaagtgcattaataaaaccacactttaaaatta

SEQ ID NO: 269940 - DNA, 591 bp, Artificial Sequence
  derived and/or modified sequence
agacttcgggtggcggctgcgccataggcgggccacggcctggacgcgctgcggggaggggcggagcgagcgggcgggagcgcgcgctgggcccgccttggccgccgccgctgtgctgccgctgccggggaataatctgggcggcagcgggcggcctcggctagcggccacgagccacttctgcggctgcccagagaagcaaaggtcaccagtcccaagtcgtccccctctccgccccccaggaggggcgagagggagccgcagctgatgtcagaaatacactttcgggaaatggcctctaaatcctggctgaattttttaaccttcctctgtggatcagcaataggatttcttttatgttctcagctatttagtattttgttgggagaaaaggttgacacccagcctaatgttcttcataatgatcctcatgcaaggcattcagatgataatggacagaatcatctagaaggacaaatgaacttcaatgcagattctagccaacataaagatgagaacacagacattgctgaaaacctctatcagaaagttagaattctttgctgggttatgaccggccctcaaaaccta

SEQ ID NO: 269941 - DNA, 802 bp, Artificial Sequence
  derived and/or modified sequence
gtcaaaatattggatttactctcagagtttctatcctgctcaatttgaattttcttcacggaagtgttttcctcaggaaagatattttattggctatttctgagttatttgagtacataagccacccagtaccttctgatcttcccattttctcttagtgtgtggctgagatatttttattctactcagccataaattggagtcagaagccttctcctttttactgttattttcacaatatttacttgctgagaatcccactcaagctgctaaaactaggcatgctctgtatgagttctactgctgttgtctgtggtttgggtggggcaaaacccactggcattctgaggctcatggggatgttttttcagttggctttctggaggatgtgaaatacactttcgggaaatggcctctaaatcctggctgaattttttaaccttcctctgtggatcagcaataggatttcttttatgttctcagctatttagtattttgttgggagaaaaggttgacacccagcctaatgttcttcataatgatcctcatgcaaggcattcagatgataatggacagaatcatctagaaggacaaatgaacttcaatgcagattctagccaacataaagatgagaacacagacattgctgaaaacctctatcagaaagttagaattctttgctgggttatgaccggccctcaaaacctagagaaaaaggccaaacacgtcaaagctacttgggcccagcgttgtaacaaagtgttgtttatgagttcagaagaaaataaagacttccctgctg

SEQ ID NO: 269942 - DNA, 6208 bp, Artificial Sequence
  derived and/or modified sequence
agcgggcgggagcgcgcgctgggcccgccttggccgccgccgctgtgctgccgctgccggggaataatctgggcggcagcgggcggcctcggctagcggccacgagccacttctgcggctgcccagagaagcaaaggtcaccagtcccaagtcgtccccctctccgccccccaggaggggcgagagggagccgcagctgatgtcagaaatacactttcgggaaatggcctctaaatcctggctgaattttttaaccttcctctgtggatcagcaataggatttcttttatgttctcagctatttagtattttgttgggagaaaaggttgacacccagcctaatgttcttcataatgatcctcatgcaaggcattcagatgataatggacagaatcatctagaaggacaaatgaacttcaatgcagattctagccaacataaagatgagaacacagacattgctgaaaacctctatcagaaagttagaattctttgctgggttatgaccggccctcaaaacctagagaaaaaggccaaacacgtcaaagctacttgggcccagcgttgtaacaaagtgttgtttatgagttcagaagaaaataaagacttccctgctgtgggactgaaaaccaaagaaggcagagatcaactatactggaaaacaattaaagcttttcagtatgttcatgaacattatttagaagatgctgattggtttttgaaagcagatgatgacacgtatgtcatactagacaatttgaggtggcttctttcaaaatacgaccctgaagaacccatttactttgggagaagatttaagccttatgtaaagcagggctacatgagtggaggagcaggatatgtactaagcaaagaagccttgaaaagatttgttgatgcatttaaaacagacaagtgtacacatagttcctccattgaagacttagcactggggagatgcatggaaattatgaatgtagaagcaggagattccagagataccattggaaaagaaacttttcatccctttgtgccagaacaccatttaattaaaggttatctacctagaacgttttggtactggaattacaactattatcctcctgtagagggtcctggttgctgctctgatcttgcagtttcttttcactatgttgattctacaaccatgtatgagttagaatacctcgtttatcatcttcgtccatatggttatttatacagatatcaacctaccttacctgaacgtatactaaaggaaattagtcaagcaaacaaaaatgaagatacaaaagtgaagttaggaaatccttgaaagaaaatcatgaatgaacaaaggtaatatgtctagcactgcactgaaaaaggacttctgcatttctgacatagaacactggaatcccagtgaggaattctaagtgaacattccttatagaaacctttcacatgaatgactataaactgaagctttaaatgagctgtgaagtgtgttaaaatgtgttttgatacagtaatatataaatatgtctatatatatgaggaacttgtgttttttaaatggtggccaggtagaggaactagaaaagagattttgttgcctgttttctgaccatctgtgttattgtcactgagaaactaaaatagtaaatttactaaaactacactgcaccatgttagtaataaacagatctgccttaaagaaaagaaaattttagaaagaaatattgttgctcagtgttgttaatatagctcaagaattgagtttatatttgcagtatgctataaatgatacccccctaccacacccacacacacagtttttgtctaatgaaaatgttgctgtgattatttataattggtagtatttcttccagaagaagctaaaataagactggcacttaccctgaagtgcattaataaaaccacactttaaaattatcatgggccttgactatattatatacttgattctaattagtcatcttttacgcaatctctgttgtctcttttctaaatgtgtttagccactcttgaataccattctccactattaacattaatttactcaaaccgttcatagcattctgtaaacatgtattttacatatttgttcccaaatttgcccattgttcattatgggtaactaataataaatttaatgctgtttcaggatgcttttcttataacagtgccactctcaggaattactaagtgacattttaaattgatattttaaactctttccaactacatagttatggtttatttcattctcatcctgttgggatgagaacttgtttgtgcctttcataacttgtttaaagcagagttttaaaattagtttataggatctgaggtggctattagttacagtggcaagattatttagaaagcaagattttgatgagaattaaaaacaatagaaaatgtagagtgcttaaacaaaaatgttatattttgaaagagtagatacttaatttataaataacagtctgaaggttggtgctattttgggataattgttttgctaatggataattctaacaatgcagaatacctagtcaagactgtcatcaaaaacattcacaaatgtttcattctatttttagtgactctgtttaaagagtttctgaaaggaaagaaattttttatttttattatctttagcagtactgagtgtcatagcagaatattttacagactttctatgagattatttttatggtacaaagtatttacatttccctcatgtttatcattatgccaattttacatggcagtcatgccactgactctgctatttagctaagtaatttcttttttcggagactgtctcactctgtctcccaggctggactgcagtggtgcgattctcctgcctcagcctcccgagtagcggggattacaggcacgcgctgccacgccccgccagttttcatatttttagtagagacagggttttgccgtgttggccaggctggtcttgaactcctgacctcaggtgatccacccaccttggcatcccaaagtgctgggattacgagcgtgagtcacagcacccggctaagtaatttctatttattgtgccaaaacatgtcaaaatcatgacctctttgaatggtatatttgagaggatgttcatttcattggttaaccatggactactctgtccacgtagtgaaaacatgcaccagtttttacctattatcatggtagtatcatctgccaaaatttcaaggcattcattttattctttgaacaactcttcaccatggtgtggacatgaattttcatatgtgttacttgactagaagtataaatggtttactatagatatccaaaaaccttgagatttgctcataggaaatgaatattgtgatgaatcctgggctctagagtcagacttgcttgggtttaaattcttgctctaacacttactgtttttgtaaccttgagcaattttaatctctctgtgtctcaatttcctcatcttttaattagggatgataatactacctacctcacaggatttttatgaggattaaataaatgtaaggtttttagaacattgatagggagcaataaatagaagattgtattattattctgttaccttggagtgtaagtactgcatttaagtgaatgaaaaatttgctttgaccagatactgaaggaaataagtaatagctagtatttatccaatgccaactgtatgctaggtactgtgcttagataatctgtgtataatagtgttaatcctcaaaatttgggtgttatacccctattatagataaggaaactgaggctcagagacaaagtaactttgtcactgtcacaaagctagtaagtaacagaggtaggatttatattcaaaaccctgtgtgttcattggaaccgtatcaggcttggggctattcatgtagcattatttccatttttatgtatatgatatatgacgtctgatgcattggccagtaatagtcaaattaacccagccaaattgtcacagtgattcttaaactgtggttctcacacttgcccaggatgttgttaaatgcagatctgaagaccccaatctcagaaattcaaatttaagcatggggcccaagagtatgcattcttaccagataccttgggcagtgactgtcaaaagtctggtcccaacaaacagcattaacgtcacctgggaacttgttggaaatgcagcctctctcggggcctcatctcagatcagatctactaaatcagatactctaggggcaggggcaggggcaggggctagcagttgtgtttaagcaaactctgcaggtgtctttcttatcctagtttgagaaccaatacccaacaacctacgtgattttggtgcaagtagtgtttgaaacacactgaagattactgcccaattactaagacatttttcaaaaagcatgttttaaatcagtgtagtccaggatcacactatattaaatataaagataacttaaaggatcattggatcattcattttggccaaatttttagcttctccaaagtgactaacatcagggcctacaataaaatctgtaattctccaagtttagtaattttatattgaggcaggaagggctcattaagtactaataagtacataatttattaaaaacatacataagtgtcatcaaaaaggtccacaattgttagtaaaaaaaattaaattgaagtagtaaatgctgttttataacatacatttttctgctaattcattctgttttgtgtgacctaataaagcaaaagaaaaataaaaaagcaattctccaagtacttcatagagcacataaaaccagatttcatgatgatgatgtattcactatcttttagattaagatctttgttatttggtaaatgatttcagtatggttttaaaacataaggcttttgatgtcttatgttctctaataatggtatgcttgtattttctagtgggaagttcatagataaagcagatttttgtcccagtttgctttcaaatataaatttcagagggctttttcttactgtaatgaggtatgaaaataaatcattgatcagctcttaatattttttgaatacagaattggatttgagcagtaaatttgctaactggttattttcacaattttcttgaatattaatttttcacttctttgagactgtcaaactatagttactaccaggttgatgcactgtacttgaaagaatcccttgattaaattacatctagcattttatttgccatttcaattttcagttcattagactataattctttgacagtttctgcctggtgtttattgcccttctttgtttgctttattactaacttccattttctagttactcttaaatgctgccttcacaaggttaatttggctgttaatagtgattagaatttttatcacttaattgataattttaagcctactaactagggttccctatgaaattgaaagtaaaagtctaagaataatgcctgctggctctcgagatacttgccctacttaaaaatctataatttaaaattaattctatgtctacaattattaaaggaagtaaagttatttgggttcttccactcacccttttctcaaaaacaacaacaaaaaacaaaactcattttatttttctactttatagtaggcctgacagaaacatagtgaagcaatctgggaggcaacctgtggtagattttatgctaaatgttaatgtaacctctgttgattttttaaaaatgtgtttatatataagatttgaaataaaaactttaatacaggctagaataaggaattttacaaattctctttagagcaaccaacattaaagttttagagttgaattttgctctatttcaactcccttacctctctagttttcagtttatattaagttttaataactttgcggggccctgcaaattaataatctacatgaagtatattattagagggaaactaatcttactgctaagcagtgtgttgtactacatagtgaatgttcgtgttttggaatttaaaaattatttaaggtaatggtgttacgaatggtttaaaaatgtctggtgacttgcttatttttaagtgatcaccattaagtcagaaaaatgtatttttaaatgtttcttgaagtgccttttgaacatttttaaacagcggatttaaataatgcataaaataaattgccatgttcaaagttg

SEQ ID NO: 269943 - DNA, 300 bp, Artificial Sequence
  derived and/or modified sequence
atgtgggagcactggctgggcgacagcggcgtgggcctgctgatgcgactgcgtagtgacgtgagtcaggtgtgcttgcagctaaacgcctgtgtcgaggtcgaagatccgctaccaggctggttaacacattgcctgcctggcagggccggatgttggtgggaagcaagcgttcctttccacggatgcttccaatactcttgtggaatcccacccgaacaagtcatgaaggagaataaggccgaagccgcggtactttttacagcgtccttccggtctcacgtgccgagcgacctctag

SEQ ID NO: 269944 - protein, 138 aa, Artificial Sequence
  derived and/or modified sequence
MTSFQEVPLQTSNFAHVIFQNVAKSYLPNAHLECHYTLTPYIHPHPKDWVGIFKVGWSTARDYYTFLWSPMPEHYVEGSTVNCVLAFQGYYLPNDDGEFYQFCYVTHKGEIRGASTPFQFRASSPVEELLTMEDEGNS

SEQ ID NO: 269945 - protein, 98 aa, Artificial Sequence
  derived and/or modified sequence
MTSFQEVPLQTSNFAHVIFQNVAKSYLPNAHLECHYTLTPYIHPHPKDWVGIFKVGWSTARDYYTFLWSPMPEHYVEGSTVNCVLAFQGYYLPNDDGE

SEQ ID NO: 269946 - DNA, 417 bp, Artificial Sequence
  derived and/or modified sequence
atgaccagcttccaggaggtgcccctgcagaccagcaacttcgcccacgtgatcttccagaacgtggccaagagctacctgcccaacgcccacctggagtgccactacaccctgaccccctacatccacccccaccccaaggactgggtgggcatcttcaaggtgggctggagcaccgccagagactactacaccttcctgtggagccccatgcccgagcactacgtggagggcagcaccgtgaactgcgtgctggccttccagggctactacctgcccaacgacgacggcgagttctaccagttctgctacgtgacccacaagggcgagatcagaggcgccagcacccccttccagttcagagccagcagccccgtggaggagctgctgaccatggaggacgagggcaacagctag

SEQ ID NO: 269947 - DNA, 297 bp, Artificial Sequence
  derived and/or modified sequence
atgaccagcttccaggaggtgcccctgcagaccagcaacttcgcccacgtgatcttccagaacgtggccaagagctacctgcccaacgcccacctggagtgccactacaccctgaccccctacatccacccccaccccaaggactgggtgggcatcttcaaggtgggctggagcaccgccagagactactacaccttcctgtggagccccatgcccgagcactacgtggagggcagcaccgtgaactgcgtgctggccttccagggctactacctgcccaacgacgacggcgagtag

SEQ ID NO: 269948 - DNA, 417 bp, Artificial Sequence
  derived and/or modified sequence
atgaccagttttcaggaggtgccactacaaacttccaacttcgcacacgttatcttccagaatgtggctaagtcttatctgccaaacgctcacctagagtgtcactataccctaactccctacatccatccacacccaaaggattgggtcggcatcttcaaggtcggttggagcactgcccgagactattatacattcctatggtcacctatgcccgagcactacgtagagggtagtaccgtcaactgcgtgctggctttccagggctactatctcccaaatgacgatggtgagttttaccagttctgctacgttacacacaaaggggagattcgaggtgcttctacgcccttccagtttagggcctccagtccagtggaggagctccttaccatggaagatgagggaaatagttag

SEQ ID NO: 269949 - DNA, 297 bp, Artificial Sequence
  derived and/or modified sequence
atgacctccttccaagaggtgcctctgcagacctctaacttcgctcacgttatcttccagaacgttgctaaatcttacctgcctaatgctcacctggaatgccactacaccctcactccctacatccacccgcacccaaaggactgggttggaatattcaaggtgggctggtcgactgcaagggactactatacattcctgtggagtccgatgcctgaacattacgtcgaaggtagcaccgtgaactgtgtcctcgctttccaggggtattatctaccaaatgatgacggtgagtag

SEQ ID NO: 269950 - DNA, 417 bp, Artificial Sequence
  derived and/or modified sequence
atgaccagcttccaggaggtgcccctgcagaccagcaactttgcccacgtgatcttccagaatgtggccaagagctacctgcccaatgcccacctggagtgccactacaccctgaccccctacatccacccccaccccaaggactgggtgggcatcttcaaggtgggctggagcacagcccgggactactacaccttcctgtggagccccatgcctgagcactacgtggagggcagcacagtgaactgtgtgctggccttccagggctactacctgcccaatgatgatggagagttctaccagttctgctacgtgacccacaagggggagatccggggggccagcacccccttccagttccgggccagcagccctgtggaggagctgctgaccatggaggatgagggcaacagctag

SEQ ID NO: 269951 - DNA, 297 bp, Artificial Sequence
  derived and/or modified sequence
atgaccagcttccaggaggtgcccctgcagaccagcaactttgcccacgtgatcttccagaatgtggccaagagctacctgcccaatgcccacctggagtgccactacaccctgaccccctacatccacccccaccccaaggactgggtgggcatcttcaaggtgggctggagcacagcccgggactactacaccttcctgtggagccccatgcctgagcactacgtggagggcagcacagtgaactgtgtgctggccttccagggctactacctgcccaatgatgatggagagtag

SEQ ID NO: 269952 - DNA, 417 bp, Artificial Sequence
  derived and/or modified sequence
atgaccagcttccaggaggtgcccctgcagaccagcaacttcgcccatgtgatcttccaaaacgtggccaagagctacctcccaaacgcgcacttagagtgccactatactctgactccttacattcatccgcaccctaaagattgggtgggcatcttcaaagtgggctggtcaacggcacgggattactacacgttcctgtggagtccaatgccagaacattacgtggagggctctactgtgaattgtgtgctcgcgtttcaggggtattacttgccaaacgatgatggcgagttctaccagttttgctatgtaactcacaagggcgaaatccgaggagcatccaccccatttcaatttagggcctcctcccccgtggaggagctgcttaccatggaggatgagggtaactcctag

SEQ ID NO: 269953 - DNA, 297 bp, Artificial Sequence
  derived and/or modified sequence
atgaccagcttccaggaggtgcccctgcagaccagcaacttcgcccatgtgatattccagaatgtagccaagagctatttgcccaacgcacatctggagtgccactacactctcaccccctacatccatccccatccaaaggactgggtgggcatttttaaagtcggatggtcaactgcgcgggactattacacgttcctgtggtctcccatgccagagcattatgtggagggtagcacggtgaattgcgtgttagctttccagggatattatttgccaaacgacgacggcgaatag

SEQ ID NO: 269954 - DNA, 417 bp, Artificial Sequence
  derived and/or modified sequence
atgactagctttcaagaagtgcccctgcagacttcgaacttcgcacatgtgattttccaaaatgtggccaaaagttatttgcccaatgctcacctagagtgtcattatactctgacaccatacatccacccccacccgaaggattgggtcgggatttttaaggtggggtggtccactgcaagggattattatacctttctgtggagtcccatgcctgagcattacgtggagggatcaaccgtcaactgtgtgttggccttccagggatattatctgcccaatgacgacggagaattctatcagttttgttacgtgacacataagggagaaataagaggggcttcaacccccttccagttcagagcaagtagccctgtagaggaacttctgactatggaggacgaaggaaactcttag

SEQ ID NO: 269955 - DNA, 297 bp, Artificial Sequence
  derived and/or modified sequence
atgaccagtttccaagaggtcccgcttcaaactagtaatttcgcacacgtgattttccagaatgtggccaagtcttatttacctaatgcccacttggagtgccattataccttgaccccatacatccacccacacccaaaagattgggtcgggatcttcaaggtaggttggtccacggccagggattattacacctttttgtggagtccaatgcccgaacattacgtcgaggggtcgacagttaattgcgtgcttgcattccagggttattatcttcccaacgacgacggagagtag

SEQ ID NO: 269956 - DNA, 641 bp, Artificial Sequence
  derived and/or modified sequence
acatatcctttctggtgctattgcaaggtttgtcagggttttacggcaacagaagactatgatgaattcgaatgggacacatttgcttctgtggagttacgattcaaactgaatgtccaatataggaaggcaacatatacaacaagcaaaagtgattttagaaataacagaacgcgggagaaaattcacacacggaaaatgatacggataacaaaagcagattcacaatgacatcctttcaagaagtcccattgcagacttccaactttgcccatgtcatctttcaaaatgtggccaagagttaccttcctaatgcacacctggaatgtcattacaccttaactccatatattcatccacatccaaaagattgggttggtatattcaaggttggatggagtactgctcgtgattattacacgtttttatggtcccctatgcctgaacattatgtggaaggatcaacagtcaattgtgtactagcattccaaggatattaccttccaaatgatgatggagaattttatcagttctgttacgttacccataagggtgaaattcgtggagcaagtacacctttccagtttcgagcttcttctccagttgaagagctgcttactatggaagatgaaggaaattct

SEQ ID NO: 269957 - DNA, 570 bp, Artificial Sequence
  derived and/or modified sequence
aatagaatcagagggcattagaactgaaaagctcctaggagctttcagtgaacaaaacttcatagccaaaaaagcacacgactgggccaggagttcagagacagtcttggtgctcaggggtttgcagccctagccgtgtggtcactcccttgcttctctggctatttccttatctataaaatgagtgggctagtttaggccgactgagacgcagacagggatacggtactgtccatggacctctgagctgccctttccacatcgctgattcacaatgacatcctttcaagaagtcccattgcagacttccaactttgcccatgtcatctttcaaaatgtggccaagagttaccttcctaatgcacacctggaatgtcattacaccttaactccatatattcatccacatccaaaagattgggttggtatattcaaggttggatggagtactgctcgtgattattacacgtttttatggtcccctatgcctgaacattatgtggaaggatcaacagtcaattgtgtactagcattccaaggatattaccttccaaatgatgatggagaatt

SEQ ID NO: 269958 - protein, 730 aa, Artificial Sequence
  derived and/or modified sequence
MAIGVWQLLLDMGIMLSVDQHLYFQDTYVFYQFSSDECSYLYCEFEREEEWQNGVKLLLQLVPLIPARGGICELSHQKIEDSEESSDEILVRLTSAVQRELAAVIALKARKSAIEQDEENNDKHVAVTEAESVPDSQAGVMCKLQERDEIGRIELVQKLAKENYQFLQTDKKEQEKSEHQDDEVTTVQVKEQDQSVLVLKKVQCCGPAPTAGSAESHWRYVVVSGTPEKILEHLLNDLHLEEVQDKETETLLDDFLLTYTVFMTTDDLCQALLRHYSAKKYQGKEENSDVPRRKRKVLHLVSQWIALYKDWLPEDEHSKMFLKTIYRNVLDDVYEYPILEKELKEFQKILGMHRRHTVDEYSPQKKNKALFHQFSLKENWLQHRGTVTETEEIFCHVYITEHSYVSVKAKVSSIAQEILKVVAEKIQYAEEDLALVAITFSGEKHELQPNDLVISKSLEASGRIYVYRKDLADTLNPFAENEESQQRSMRILGMNTWDLALELMNFDWSLFNSIHEQELIYFTFSRQGSGEHTANLSLLLQRCNEVQLWVATEILLCSQLGKRVQLVKKFIKIAAHCKAQRNLNSFFAIVMGLNTASVSRLSQTWEKIPGKFKKLFSELESLTDPSLNHKAYRDAFKKMKPPKIPFMPLLLKDVTFIHEGNKTFLDNLVNFEKLHMIADTVRTLRHCRTNQFGDLSPKEHQELKSYVNHLYVIDSQQALFELSHRIEPRV

SEQ ID NO: 269959 - protein, 580 aa, Artificial Sequence
  derived and/or modified sequence
MGSSRLRVFDPHLERKDSAAALSDRELPLPTFDVPYFKYIDEEDEDDEWSSRSQSSTEDDSVDSLLSDRYVVVSGTPEKILEHLLNDLHLEEVQDKETETLLDDFLLTYTVFMTTDDLCQALLRHYSAKKYQGKEENSDVPRRKRKVLHLVSQWIALYKDWLPEDEHSKMFLKTIYRNVLDDVYEYPILEKELKEFQKILGMHRRHTVDEYSPQKKNKALFHQFSLKENWLQHRGTVTETEEIFCHVYITEHSYVSVKAKVSSIAQEILKVVAEKIQYAEEDLALVAITFSGEKHELQPNDLVISKSLEASGRIYVYRKDLADTLNPFAENEESQQRSMRILGMNTWDLALELMNFDWSLFNSIHEQELIYFTFSRQGSGEHTANLSLLLQRCNEVQLWVATEILLCSQLGKRVQLVKKFIKIAAHCKAQRNLNSFFAIVMGLNTASVSRLSQTWEKIPGKFKKLFSELESLTDPSLNHKAYRDAFKKMKPPKIPFMPLLLKDVTFIHEGNKTFLDNLVNFEKLHMIADTVRTLRHCRTNQFGDLSPKEHQELKSYVNHLYVIDSQQALFELSHRIEPRV

SEQ ID NO: 269960 - DNA, 6621 bp, Artificial Sequence
  derived and/or modified sequence
gctgcggccgcggctgagggacctgcccgcgctgctgcggagcgggctcacgctgcggaggaagcggagcgccgctgggggccggactctatcaagaagaatatctaatccgtaccttgaacatacgccttcccagatttatggagagaattcttcttgtgcaggaagagcattgaggaatattattatcgttcaagcagctgacctgataaaggacagagtgaacctcaaggggttttacaggaggagctgcgttgggtcagagctggtagactggcttctagaacactgtcctttcgtccagtgcagatctatggccataggagtctggcaactcctactggacatgggaattatgttatcagtggaccagcatctatactttcaagatacttatgttttctaccagttttcctctgatgaatgtagctacttgtactgtgaatttgaaagagaagaagaatggcaaaatggtgtcaagcttttactgcaacttgtgcctctcattcctgccagaggtggcatctgtgaactgtctcatcagaaaattgaagactccgaagaaagcagtgatgaaattcttgtgcgtctaacatctgcggtgcagagagagctagcagctgttattgctttgaaagcaaggaagtctgcaattgaacaagatgaagaaaacaacgacaaacatgtagctgtaacagaagccgaaagtgttccagattctcaggcaggggtgatgtgcaagctccaggaaagagatgaaatcggacgaattgaactagtccagaagctggcaaaagaaaactatcagtttttgcagacggacaaaaaagaacaggagaagtctgaacaccaagatgatgaagtgacgactgttcaggttaaagagcaagaccagagcgtcctggtgctgaagaaagtgcagtgctgtggcccagcccccacagctgggagtgcggagagccattggagatatgtggtggtgtccgggaccccggagaagattttggagcaccttttgaatgacttgcacctggaagaagtccaggacaaagaaacagagaccctcctggatgacttccttctcacgtacactgtcttcatgacaactgatgacttgtgccaggctctgttaaggcactattctgctaagaagtatcaaggcaaagaggaaaactcagacgttccgcgtaggaaacgtaaagtcttgcatcttgtttcccagtggattgctctgtacaaagactggttacctgaagatgaacattcaaaaatgtttttaaagaccatatataggaatgtactggatgatgtttatgaatatccaatacttgaaaaagaattgaaagaatttcaaaagatacttggaatgcaccgtcgtcacactgtagatgaatattcaccacaaaaaaagaataaagcccttttccaccaattcagtcttaaggagaactggctccagcatagaggaactgtgactgaaacggaggaaattttctgccacgtgtatataacagagcactcctatgtcagtgtgaaggcaaaagtttccagtatagcccaagagatcctaaaagtcgtggcagaaaagatccagtatgcagaagaggatctggctctggtggccatcacattctctggggaaaagcatgaacttcagccaaatgacttagtcatctccaaatccctcgaggcatctggtcgaatatatgtctaccggaaagacctggcggacactttgaacccatttgcagaaaatgaggaatcacagcaaaggtcgatgaggattttgggaatgaacacttgggatcttgctctggaattaatgaattttgattggagtctattcaattcaattcacgagcaagagctgatctacttcacgttcagcagacagggaagtggggaacacactgcaaatctcagccttctgctccagagatgcaatgaggtccagctttgggtggccacggagattctgctctgcagccagctgggcaagcgagtgcagctggtgaaaaaattcatcaaaattgcggctcactgcaaagcccagagaaacctgaattctttctttgccattgtgatgggtctcaacactgcttctgtcagtcgactgtcgcagacctgggagaaaatccctgggaagtttaagaaacttttctctgaacttgaaagtttaacagatccttccctaaatcacaaagcctacagagatgcattcaaaaagatgaagccaccaaaaatccctttcatgcccttattgcttaaagatgtaacatttattcatgaaggaaataaaacttttttggataatcttgtcaattttgaaaagctgcatatgatcgcagacactgtccgaaccctgagacactgcaggactaaccagtttggtgacctgtctccaaaagagcatcaagagttaaagtcctatgttaatcacctgtatgtcattgacagccagcaggctctgtttgagctctcacacaggatcgagcctcgggtgtgagccccactgcctcacctcccctgtatctgcagcactttgagctacgggaatgtctatgccaagcacgttgctttcctgtgagaaaagaagttgctgagttttatcagtataacccaagacattcacaggaaagccagccaaagcgtgttcaggaagtgatgtcagccaccagagagggggagaggtttctccatgctactctcgggacaagaaggcagaaggagagtcagaagcattcttgagatggagaaggctggtttcttatgatcacattgttgatccagtccagttttcaatatgagatgtgccagcatcaagacaagacaacgtcttgacatgcaatgaccaaatatttcattaagagcgtgcatgaaacaggaaggagtttttactttgcctagttttagattactgtccataagctgtcaaagaagtcattcttttgaacacctgatgacagagacagcatctctagatctccagggaggagaggtttctgttgatacaacctgtgacatcaccaaaagccacttgtgtctagggagttagtgaggactgcagctagcatccatgctctgatgggcagatgaacaatgtcaaggtgtgcatcactttgcaccacaatcaactattgacacatgcttgcaggtgaaattagtttctgtacaactgatttgcagctataggcaaggtagatgaagttgctttgccagtaaggaaaaatagtaatctttaagaaattgactcattgtttaatttctggggattttctttatacttctaagcaggctcttatcttttattggacataatatgattttgaaaaagcacagtgcctgacacattgcaaacactcaccaactgcttgctgaggtgacagagtcacaaaagtctgcattcttgtgcctgatgatgcattttgcgtacctcatacaggctccttgcccacactatggaatgacagcagccagtgcagggaggttaagtgacatttaatgagtgaagcacttagcactctctaggtaataagatagtggtaattactagtgttttggcaaatgaaaaatgccctgaaatagccaaatgtctgattaatgttggcaacttagaagtcctataatccaactaccagccaaagcagggagcctttctataatttgcctttttttttttttttttcaaaatctgagtcttctaaaatcttattattcccatttttaccaattgaggctcctgtagcaaataagacctcttgatattttcaaggactggttagaggatttctttcaaccttcacatgaacaaaacagcctatgggtcaaaataatgaaatccacccctgcctgctagatacttgtcaccttgctaaaatgcaagggcctggtccattcattttccaaatgcaggagtcttggtgcacttctcactcttcctgcctgttcatctctttcatgcccacacagacctgtttcctttttgtctcatcaacgcctcattcatcctcattactgaggcgtgtccaatgctttttgacatctttatagcagtgctgtttcctgggctcaggaaccacactgagcttgagatactgctggaaggaaccatgtggagagaaggtttgggagaactttgagagagacttagtttggcccagcatgtaaaacttcagtcctgaacatttatagggttttatagaagggcatcctccagggctggtccattcagagaaatgctgcatgctgccgtcatggaatgtggcccacaggacaccagagccgtgagaaccggagagcagacttccctcacggctgggctgagcaaaccctccaaagccctcctcacgcagttactaacaatagcatgggcttacagcacaagcacgtgttctcacctttttcctatgccctggactaaggtttggccagtgtaatcatataaggccatcctgacattgtttctgtgtttcaaaatttggatttttatttacattagaactacattgctcctagtagaacattacctttaggggactaattttccatggagaactatttcagcatattgcatgctgctcagaccccaagtcagatatgcccaccaagccagatgaagctacacaaatgtggtatttaaatgcattttgtacagtgacttcagagtatctcacatgacatgggtgtaaactggctggggagaaaatgatgcttgttcacctcttcctccagccgtggttaggtggtcctaggggtagcagagggaagggaggattttgtgcagtcaagatttgcttttccatccttgtcttctgaatgtctaaaatctctgcatctttctgaagtttaacaactgtctccagaggtttgccaggcagcagctctcagaagtttccaaagctttgcagaatcttagatctggaattaaagaattcaagcccgaattgtgagaaccagatattactcaacagaaagctctttctaaggaatctgagctgttcactggtggacagtggtggggcttgagtgctccttgttaataggatgggccatgcaccctctctggatattcaccaaggcctcttcagaatagggtttgttctggctagaagcgtggtctagaagatggctaagctctttgccagctctcatttggagttttattattgcataaaatcttcgctcactctgcaaatcttacgtaatctggcaccttcggcaccaggtggtgcaggggcacttctaagtgggctctttttgttacagcacaactctcagacagtcctgtgggtctttggattcgtcagcattccagcaaactagccctgcttagaagttagcacaagacagcagaatgcaggaccccgtaggcaaaatcacaaccttgctattaaaaaaaattttgttttacatacacatttgcaggtgttccctagagtgtggtgttttgaatttgctctttgtcatctgtataattgccaaatgattatagtgatacacatgacctgcattcacttttttctagtttccttaattatgtttagaataaattcatttccctagaccgagaaccacaaacaggtagtgtggagcatacaccgaatttagaagcatgtggataaggtcagtgctcacactgcctagtccacagggagaggatgctgcatgaatatatacttgcctctgagtggaggagaaatcgtggcatgaaagagagagtaccagtgatgacttcttatccctggagctgggctttcactgctacccatatcccagccctgcgagtctgttctagccagcacagacaccgcagatccggaactgaatgttcctaaatggcgcagccaatccaggcttttcagaaactgggcaaaaacattaaaatggggacgatcgggtcttccgcagtggtccaacacaggatttcttttaaatgtttcaaaaacatgtccttaaaatttcagcctgcttcttagcgagtgggccagttttgcttaaaactggtgggggggcgggggggaagtttttaaaaattgccaaaaagttagatgcaaatgtattactgtataaagcaaagctgtatatactaaacattttttagcagagtaatatttatttgcatagtctatttattgtattcgtatcacactgttattaaatactgggatgaaatcagtgacctgaagcaagaaatcttgccttttaatgtatcattaattagggctgctgtgatattgtcagcttgcattaacaattagaagatagagaacccgccatcagggtgtctacctaacttctcagggactacacttggtagttttccaccatttaaagaactggtaaatatgaaacatttgttgagttaccagaattgccattaacagtgttttctttcccatattccatgctttctgcctctgtgtatatatataatatatatgtatatgactgtgctgtgtatttatcgaagctagtaagcaataatttatatgtaaaaatggccaagcaatataaggttaaaacttatataagtaacccttaccttatcttgtattttcaatttttttttaaaactgcttttccaaatatgagactatgttaaagacactattcatgcctctt

SEQ ID NO: 269961 - protein, 727 aa, Artificial Sequence
  derived and/or modified sequence
MPPPADIVKVAIEWPGAYPKLMEIDQKKPLSAIIKEVCDGWSLANHEYFALQHADSSNFYITEKNRNEIKNGTILRLTTSPAQNAQQLHERIQSSSMDAKLEALKDLASLSRDVTFAQEFINLDGISLLTQMVESGTERYQKLQKIMKPCFGDMLSFTLTAFVELMDHGIVSWDTFSVAFIKKIASFVNKSAIDISILQRSLAILESMVLNSHDLYQKVAQEITIGQLIPHLQGSDQEIQTYTIAVINALFLKAPDERRQEMANILAQKQLRSIILTHVIRAQRAINNEMAHQLYVLQVLTFNLLEDRMMTKMDPQDQAQRDIIFELRRIAFDAESEPNNSSGSMEKRKSMYTRDYKKLGFINHVNPAMDFTQTPPGMLALDNMLYFAKHHQDAYIRIVLENSSREDKHECPFGRSSIELTKMLCEILKVGELPSETCNDFHPMFFTHDRSFEEFFCICIQLLNKTWKEMRATSEDFNKVMQVVKEQVMRALTTKPSSLDQFKSKLQNLSYTEILKIRQSERMNQEDFQSRPILELKEKIQPEILELIKQQRLNRLVEGTCFRKLNARRRQDKFWYCRLSPNHKVLHYGDLEESPQGEVPHDSLQDKLPVADIKAVVTGKDCPHMKEKGALKQNKEVLELAFSILYDSNCQLNFIAPDKHEYCIWTDGLNALLGKDMMSDLTRNDLDTLLSMEIKLRLLDLENIQIPDAPPPIPKEPSNYDFVYDCN

SEQ ID NO: 269962 - protein, 429 aa, Artificial Sequence
  derived and/or modified sequence
MSEHQKEQTLDTPSLRTVTLTVRVHGFILEVSKTKNPPIPDTFWPPRWDHRPSPGGETNAYCQMNHVNPAMDFTQTPPGMLALDNMLYFAKHHQDAYIRIVLENSSREDKHECPFGRSSIELTKMLCEILKVGELPSETCNDFHPMFFTHDRSFEEFFCICIQLLNKTWKEMRATSEDFNKVMQVVKEQVMRALTTKPSSLDQFKSKLQNLSYTEILKIRQSERMNQEDFQSRPILELKEKIQPEILELIKQQRLNRLVEGTCFRKLNARRRQDKFWYCRLSPNHKVLHYGDLEESPQGEVPHDSLQDKLPVADIKAVVTGKDCPHMKEKGALKQNKEVLELAFSILYDSNCQLNFIAPDKHEYCIWTDGLNALLGKDMMSDLTRNDLDTLLSMEIKLRLLDLENIQIPDAPPPIPKEPSNYDFVYDCN

SEQ ID NO: 269963 - protein, 631 aa, Artificial Sequence
  derived and/or modified sequence
MDAKLEALKDLASLSRDVTFAQEFINLDGISLLTQMVESGTERYQKLQKIMKPCFGDMLSFTLTAFVELMDHGIVSWDTFSVAFIKKIASFVNKSAIDISILQRSLAILESMVLNSHDLYQKVAQEITIGQLIPHLQGSDQEIQTYTIAVINALFLKAPDERRQEMANILAQKQLRSIILTHVIRAQRAINNEMAHQLYVLQVLTFNLLEDRMMTKMDPQDQAQRDIIFELRRIAFDAESEPNNSSGSMEKRKSMYTRDYKKLGFINHVNPAMDFTQTPPGMLALDNMLYFAKHHQDAYIRIVLENSSREDKHECPFGRSSIELTKMLCEILKVGELPSETCNDFHPMFFTHDRSFEEFFCICIQLLNKTWKEMRATSEDFNKVMQVVKEQVMRALTTKPSSLDQFKSKLQNLSYTEILKIRQSERMNQEDFQSRPILELKEKIQPEILELIKQQRLNRLVEGTCFRKLNARRRQDKFWYCRLSPNHKVLHYGDLEESPQGEVPHDSLQDKLPVADIKAVVTGKDCPHMKEKGALKQNKEVLELAFSILYDSNCQLNFIAPDKHEYCIWTDGLNALLGKDMMSDLTRNDLDTLLSMEIKLRLLDLENIQIPDAPPPIPKEPSNYDFVYDCN

SEQ ID NO: 269964 - protein, 247 aa, Artificial Sequence
  derived and/or modified sequence
MQVVKEQVMRALTTKPSSLDQFKSKLQNLSYTEILKIRQSERMNQEDFQSRPILELKEKIQPEILELIKQQRLNRLVEGTCFRKLNARRRQDKFWYCRLSPNHKVLHYGDLEESPQGEVPHDSLQDKLPVADIKAVVTGKDCPHMKEKGALKQNKEVLELAFSILYDSNCQLNFIAPDKHEYCIWTDGLNALLGKDMMSDLTRNDLDTLLSMEIKLRLLDLENIQIPDAPPPIPKEPSNYDFVYDCN

SEQ ID NO: 269965 - DNA, 2184 bp, Artificial Sequence
  derived and/or modified sequence
atgcccccacccgcagacattgttaaagtggccatcgaatggccaggcgcgtaccctaaactcatggagatcgaccaaaagaagcctctttctgccatcattaaggaagtctgcgacggctggtccctcgcaaaccatgaatacttcgcactgcagcacgccgatagctccaacttttacatcacggagaagaatagaaacgagattaaaaatgggacgatactgcgcttaacgacttcaccagctcagaacgcccagcagctccacgaacggatccagagctcctccatggacgcaaagcttgaggctctgaaagaccttgcttcactttcaagggacgttactttcgcacaggaattcataaacttggacgggatctctctgcttacccagatggtggagtccgggaccgagcgctatcaaaagctgcagaaaatcatgaaaccatgctttggggatatgttgtcttttacactgacagcctttgttgaactgatggatcacggtatagtgtcctgggacaccttcagcgtggcgtttataaagaagattgcatcgtttgtgaacaagtccgccattgatatttcaatcctgcagcggtcactggctatactggagtctatggtactgaatagccacgatctatatcaaaaagtggcccaggagattaccatcggtcagctaataccacacctgcaagggagcgaccaggaaattcagacttataccattgctgtgattaacgctttgttcttgaaggcccctgacgagcggaggcaggaaatggctaacatcttggcccagaagcaactgaggtcaataattctgacccacgtaattagggcgcagagagcgataaataatgaaatggcacaccagctttatgtactccaggttctaacatttaacctattagaggatcgaatgatgacaaagatggacccgcaggaccaggctcagagggacatcatctttgaattacggcggatcgccttcgatgctgagtcagagcctaataattcatctggatcaatggagaaaaggaaatctatgtacacacgtgactataaaaaactggggtttatcaaccacgtgaatcctgcaatggacttcactcagacgcctccagggatgttagccctggacaatatgctgtactttgcaaaacaccatcaggacgcctatatcagaatcgtgctcgaaaatagttcccgggaggataaacacgagtgcccgttcggtcgatcatctattgaattgaccaaaatgctgtgtgaaatactgaaagtgggcgaactgccttctgagacatgtaatgatttccaccccatgttctttacgcatgacaggtcgtttgaagagtttttttgtatttgcatccagttactaaataagacctggaaagaaatgagggccacctccgaggactttaataaggttatgcaggtcgtgaaggagcaggtgatgcgtgcgttgactacaaaaccatcctcattggaccagttcaaaagcaagctgcagaaccttagctacactgaaatcttgaaaatcaggcagagtgaaaggatgaatcaggaggactttcagtcgaggccgatcttggaactcaaggagaaaattcagcctgaaatcctggagttgatcaagcaacagagactcaatagacttgtcgagggcacatgtttccgaaagctgaacgctaggcggcgacaggataaattttggtactgtagactgtcccccaatcacaaggtgctgcactatggagatttggaggaatctccacagggagaagtcccccatgatagcctgcaggacaagctgcccgtcgccgacatcaaggctgtggtgacagggaaagactgcccccatatgaaagaaaaaggtgctctaaagcaaaataaggaggtcctggagctcgccttcagcatcctgtatgatagcaactgccagctcaactttatcgcaccagacaagcacgaatactgtatttggacagacgggttgaacgcgctgcttggcaaagacatgatgtctgatttaaccagaaacgacctggacacactgctctccatggagataaagctgcggctgctcgatttggagaatatccagattccagacgctcctcccccaattccgaaagagccatccaactatgacttcgtgtacgattgcaattag

SEQ ID NO: 269966 - DNA, 1290 bp, Artificial Sequence
  derived and/or modified sequence
atgagtgagcaccagaaagaacagacattagatactccctctctgcgcaccgtcacgctcaccgttcgggtgcatgggtttattctagaggtgagcaaaacaaagaatccccccatcccagataccttttggccacctaggtgggatcaccgtccgagcccaggaggagagacgaatgcctattgccagatgaatcacgtgaatccagcgatggatttcacccaaacccctcctgggatgttagccctcgacaacatgctgtacttcgcaaaacaccatcaggatgcttacattaggatcgttcttgagaacagtagccgcgaggacaagcatgagtgccccttcggacgctctagcattgaactgaccaaaatgctgtgcgaaattctgaaggtgggcgagctgccatcagaaacatgtaatgatttccatccgatgttctttacacatgataggagtttcgaagagtttttttgcatttgcatccagttgctgaataagacatggaaagagatgcgcgctaccagcgaagattttaataaggtgatgcaggtagtgaaggagcaggtcatgcgggccctgactaccaagccctcttccctcgatcagttcaaaagtaagctacaaaatttgagctatactgaaattctcaagataaggcagtccgagaggatgaatcaggaagactttcagtcccgccctatactcgaactgaaagaaaaaatccagccagaaatactggaactgattaagcagcaaaggctcaatcggctggttgagggaacctgcttcagaaaattaaacgcccgcaggcgacaggataaattttggtattgcaggctatcccctaaccataaggttctgcattatggtgacctggaggagtcaccccagggggaagtgccacatgactccctgcaggacaagcttcctgtggccgacatcaaagccgttgtaacagggaaggattgtccgcacatgaaggaaaagggggctttaaagcagaacaaggaggttttggaactggcttttagcattctttacgattccaactgccagctgaactttatcgccccagataaacacgagtactgtatttggaccgatggtttgaacgccctcctgggaaaggacatgatgtcggacttgacacgaaatgacctggacactctccttagtatggaaattaaattgcgtctactggacctcgaaaatatccagatccccgatgccccgcccccaatcccaaaggagccgtctaactatgactttgtatatgattgtaattag

SEQ ID NO: 269967 - DNA, 1896 bp, Artificial Sequence
  derived and/or modified sequence
atggacgccaagctcgaagctctcaaagatctggctagtctgtctagggacgtcactttcgctcaggagttcataaacctggacggaatatcccttcttacacaaatggttgaatcgggcaccgagcgataccagaagcttcaaaaaattatgaagccttgcttcggcgatatgctgagcttcaccttgaccgcatttgtggagctgatggaccacggtattgtaagctgggataccttcagtgtggcgtttatcaagaagatcgctagcttcgtcaataagagcgccattgatataagtattctccagaggagcctggccattctggagtctatggtattgaactctcatgatctgtatcagaaagtcgcccaggaaatcacgataggacaacttattccacacttgcagggatctgatcaggaaattcagacatacaccatagccgtcatcaatgccctgttcctgaaggcaccggatgagcggaggcaagagatggcaaacattctagcacagaagcaattacggtctatcattctcacgcacgtgattcgtgctcagagggctatcaataatgagatggcccaccagttgtacgtactgcaagtgctgacattcaaccttctggaagaccgaatgatgactaaaatggaccctcaggatcaggctcagcgcgacatcatctttgagctccgaagaatcgctttcgacgccgaatcagagcctaataattcctcagggagtatggagaaacggaagtcaatgtatactcgtgactacaagaaactcggcttcattaatcatgtcaaccccgcaatggatttcacacagaccccccccgggatgcttgctttagacaacatgctatactttgcaaaacatcaccaggatgcatacattaggatcgtgctggagaatagttccagagaagacaagcacgaatgtccgttcggtcgaagcagtatcgagttaacgaaaatgttgtgtgaaatcctgaaagttggcgagctgccatccgagacatgtaatgacttccatcccatgttcttcacgcacgataggtcgttcgaagagtttttctgcatctgcattcagttgctgaacaagacttggaaagaaatgcgggccacatccgaggattttaataaagttatgcaggtggtgaaggaacaggtgatgcgcgctctcacaactaaaccctcttctttagaccagttcaagtcgaaactgcagaacctgtcctacactgagatcctgaaaatccgccagagtgagagaatgaaccaggaggatttccaaagtcggccgatactggaactgaaggagaagatccaacctgagatcctggaacttatcaaacagcagaggctgaatcgacttgtggagggaacgtgctttcgaaaactcaatgcccggcgccggcaggacaagttctggtattgtcgcttgtccccaaatcacaaggtgctgcattatggcgacctggaggagtccccccagggagaagttcctcacgactctttgcaggataagctgcctgtggcagacatcaaggctgtggtcaccggaaaggactgcccccatatgaaggagaagggggccctgaagcagaacaaagaggtgctggaactggccttctctattctgtacgattcaaattgtcaactgaacttcattgctcccgataaacacgagtactgtatctggaccgatggcttaaatgccctgctcggtaaggacatgatgtctgatttgacgcgtaatgacctagacacactgttgagtatggagataaagttgaggctcctcgacttggaaaatatccagattccggatgccccccctcccatcccgaaagagccaagtaactacgattttgtctatgattgtaactag

SEQ ID NO: 269968 - DNA, 2184 bp, Artificial Sequence
  derived and/or modified sequence
atgccaccgcctgctgatatagtgaaagtggccattgaatggcccggcgcctacccaaaattaatggaaatcgatcagaaaaagcctctctcagcaattataaaagaggtgtgtgacggttggagccttgcgaatcacgaatactttgcacttcagcacgctgacagttctaacttctacatcacagagaagaatcgaaacgaaataaagaatggcaccattcttcggctgacgacgtcccccgcgcagaatgcgcagcagctccacgagcggattcagagcagcagtatggacgcaaagctagaggcgctcaaagacctcgcctcattgagccgtgacgtgaccttcgcgcaagagttcattaatctggacggcataagcctcctgacacaaatggtggagtcaggcaccgagcggtaccaaaagctgcagaaaattatgaaaccatgcttcggtgatatgctgtcattcacacttacggcattcgtggaactaatggaccatggaattgtatcttgggacactttctcagtcgccttcattaaaaagattgccagctttgtcaacaaatctgctatcgatatctctatcctgcagcggagcttggccatccttgagtcaatggtgctcaactctcatgatctgtaccagaaagtggcgcaggaaatcacaattgggcagctcattccacatctccaaggaagtgaccaggaaattcagacatacacaatcgcagttattaatgccctctttcttaaagcacctgatgaaaggagacaggagatggcaaatatcctggctcagaagcaactgaggagcataattctgacccatgtaataagagcccaacgtgcaatcaacaacgagatggcccaccagctgtatgtcttgcaggtgctgactttcaacttactcgaggatcgcatgatgacaaaaatggacccccaggaccaagcacaacgggatatcatttttgagctccgtcgaatcgctttcgacgcggagtccgaacctaataacagttccggaagcatggagaagcgcaagagcatgtatacccgagactataaaaagctagggttcattaatcatgtgaatcctgctatggatttcacacagacccccccgggcatgctggctctggacaatatgctttactttgccaaacaccaccaggatgcgtacattagaatcgttctggaaaactcttcgcgggaggataagcacgagtgtcccttcgggagatcctccatcgagctgactaaaatgttgtgtgaaattctaaaagtgggggagctaccaagcgaaacgtgtaacgactttcacccgatgttttttacacacgaccggtctttcgaggagttcttctgcatatgcattcaactgctgaacaaaacttggaaagagatgcgcgctacctccgaggacttcaacaaagttatgcaggtggtgaaggagcaagtgatgcgcgctctgactacaaagccaagctccttagatcagtttaaatccaagctccagaatctctcgtatacggagatcctcaaaataagacagtctgagagaatgaaccaggaagacttccagtccagacctattttggagctcaaggagaagatacagcctgaaatcctggaacttattaagcagcagaggttgaatcggctggtggaggggacctgtttccggaaattgaatgcgcgccgcagacaggacaaattttggtattgtaggttgagccccaatcataaagtgcttcattacggtgacctcgaagaaagtccacaaggtgaggttccgcacgatagtctgcaggataaattgccggtagcggatatcaaagccgtggttaccggaaaagactgtccccacatgaaagagaagggagcactcaagcagaataaggaagtgcttgaattggccttttctatattatacgactccaattgccagctgaacttcatagccccggataagcacgaatactgcatttggactgacggccttaacgctttacttggtaaggatatgatgtctgacctgacccggaatgacctcgatacactgctgtccatggagatcaagctgaggctgttagatctcgagaacattcagatacccgatgcgcctccccctataccaaaggagcccagtaactatgacttcgtgtacgactgcaactag

SEQ ID NO: 269969 - DNA, 2184 bp, Artificial Sequence
  derived and/or modified sequence
atgcccccaccagccgacatcgtgaaagtggccatcgagtggccgggggcttatcccaagcttatggagatagatcaaaaaaagcccttgtctgccatcattaaagaagtgtgtgacggctggtctctggccaaccatgaatattttgccttgcagcatgccgatagcagcaacttttacatcactgagaagaatcgaaatgaaatcaaaaatgggactatccttcggctcaccaccagtccagctcagaacgcacagcagctgcacgagaggatacagtcctcaagtatggatgccaagctcgaagcactgaaagacctagcctcattaagcagagatgtcaccttcgcccaggagtttatcaacctggatggcatatccctgttgacccaaatggtagagagtggcacagaacggtaccagaaactccagaagattatgaaaccctgcttcggtgacatgctcagctttacactcacagcctttgtcgagctgatggaccatggcatcgtgtcatgggacacttttagcgtcgcttttattaaaaagatcgcatcctttgtgaataagtctgcaatcgatatcagcattcttcagaggtcactggccatcctcgagtcaatggtgctgaactcccatgatctttaccagaaggtggcccaggagattacaatcggacagctgattcctcacttacaaggctctgatcaagagatacaaacctacacaattgcagtcataaacgccctcttcttaaaagctcctgacgagcgacggcaggaaatggccaatattctggctcagaaacagctgcgctcaataattctgacgcacgttattagggcgcagcgggctattaacaacgaaatggcccaccaactatatgtgcttcaggttttaaccttcaacctcctagaagataggatgatgaccaaaatggacccacaggaccaggcacagagggatataatattcgagcttaggcgcatcgcctttgacgccgagagcgagccgaacaacagcagcggctccatggagaagcgtaaatctatgtatacgcgagactataaaaagttaggcttcataaatcatgttaatcccgccatggattttactcaaaccccccctggcatgttagccctggataacatgctctacttcgccaagcaccaccaggacgcctatataaggattgttctggagaattcaagtcgtgaggataaacatgagtgcccttttggcagatcctcaatcgaactaacgaagatgctgtgtgagattttgaaggtcggcgaactgccatcggagacctgcaacgacttccacccgatgtttttcacacatgatcgctctttcgaagaattcttctgcatttgtattcagttactgaataaaacttggaaggagatgcgagccacgagcgaagattttaacaaagtgatgcaggttgttaaggagcaggtgatgagagccctgaccaccaagccatccagtctcgatcaattcaagtcaaagctgcaaaatttatcatacacagaaatcttgaaaatcagacaaagtgagcgtatgaaccaggaggatttccagtcacgtcccatactagaactgaaagagaagatccagcccgagatccttgagctgattaagcagcagagactgaacaggctggtggagggcacgtgttttaggaagctgaacgctcgccgccgtcaggacaagttctggtactgtaggctaagccctaaccacaaggttttgcattatggggatctagaggaatcaccacagggcgaggttccccacgatagtctccaggataagttaccagtcgctgacattaaggctgttgtgaccggcaaggactgccctcacatgaaggagaagggcgccctgaaacagaataaggaggttttagagctcgctttcagcatactgtacgactcgaattgccagctgaatttcattgctcccgataagcacgagtattgcatttggaccgatggactgaatgcacttctcggcaaggacatgatgtcagacttaacccggaatgacctagatacgcttttaagcatggaaatcaaattaaggcttttagacctggaaaacatccagataccggacgctcctcccccgattccaaaagaaccaagtaactatgattttgtctatgattgcaattag

SEQ ID NO: 269970 - DNA, 2184 bp, Artificial Sequence
  derived and/or modified sequence
atgcctcctcctgctgacatcgtgaaggtggccatcgagtggccaggggcctaccccaagctgatggagattgaccagaagaagcccctgagcgccatcatcaaggaggtgtgtgatggctggagcctggccaaccacgagtactttgccctgcagcacgccgacagcagcaacttctacatcacagagaagaacagaaatgagatcaagaatggcaccatcctgcggctgaccaccagccctgcccagaatgcccagcagctgcacgagcgcatccagagcagctccatggatgccaagctggaggccctgaaggacctggccagcctgagcagagatgtgacctttgcccaggagttcatcaacctggatggcatcagcctgctgacccagatggtggagagcggcacagagcgctaccagaagctgcagaagatcatgaagccctgctttggagacatgctgtccttcaccctgacagcctttgtggagctgatggaccacggcatcgtgtcctgggacaccttctctgtggccttcatcaagaagatcgccagctttgtgaacaagagcgccatcgacatcagcatcctgcagaggagcctggccatcctggagagcatggtgctgaacagccatgacctgtaccagaaggtggcccaggagatcaccatcggccagctgatcccccacctgcagggcagtgaccaggagatccagacctacaccatcgctgtgatcaatgccctcttcctgaaggccccagatgagcggcggcaggagatggccaacatcctggcccagaagcagctgcggagcatcatcctgacccacgtgatccgggcccagagggccatcaacaatgagatggcccaccagctgtatgtgctgcaggtgctgaccttcaacctgctggaggacaggatgatgaccaagatggacccccaggaccaggcccagagggacatcatctttgagctgcggcgcatcgcctttgatgctgagagcgagcccaacaacagcagcggctccatggagaagaggaagtccatgtacacccgggactacaagaagctgggcttcatcaaccacgtgaacccagccatggacttcacccagaccccacctggcatgctggccctggacaacatgctgtactttgccaagcaccaccaggatgcctacatccgcatcgtgctggagaacagcagccgggaggacaagcatgagtgccccttcggccgcagcagcattgagctgaccaagatgctgtgtgagatcctgaaggtgggggagctgcccagcgagacctgcaatgacttccaccccatgttcttcacccatgacaggagctttgaggagttcttctgcatctgcatccagctgctgaacaagacctggaaggagatgagggccaccagcgaggacttcaacaaggtgatgcaggtggtgaaggagcaggtgatgagggccctgaccaccaagcccagcagcctggaccagttcaagagcaagctgcagaacctgagctacacagagatcctgaagatccggcagagcgagaggatgaaccaggaggacttccagagccggcccatcctggagctgaaggagaagatccagcctgagatcctggagctgatcaagcagcagaggctgaaccggctggtggagggcacctgcttcaggaagctgaatgcccggcggcggcaggacaagttctggtactgccgcctgagccccaaccacaaggtgctgcactacggggacctggaggagagcccccagggcgaggtgccccatgacagcctgcaggacaagctgcctgtggccgacatcaaggctgtggtgacaggcaaggactgcccccacatgaaggagaagggggccctgaagcagaacaaggaggtgctggagctggccttcagcatcctgtatgacagcaactgccagctgaacttcatcgccccagacaagcatgagtactgcatctggacagatggcctgaatgccctgctgggcaaggacatgatgtctgacctgaccagaaatgacctggacaccctgctgtccatggagatcaagctgcggctgctggacctggagaacatccagatcccagatgcccccccacccatccccaaggagcccagcaactatgactttgtgtatgactgcaactag

SEQ ID NO: 269971 - DNA, 1290 bp, Artificial Sequence
  derived and/or modified sequence
atgtctgagcaccagaaggagcagaccctggacacccccagcctgaggacagtgaccctgactgtgcgggtgcacggcttcatcctggaggtgtccaagaccaagaacccccccatcccagacaccttctggcccccacgctgggaccaccggcccagccctggaggagagaccaatgcctactgccagatgaaccacgtgaacccagccatggacttcacccagaccccacctggcatgctggccctggacaacatgctgtactttgccaagcaccaccaggatgcctacatccgcatcgtgctggagaacagcagccgggaggacaagcatgagtgccccttcggccgcagcagcattgagctgaccaagatgctgtgtgagatcctgaaggtgggggagctgcccagcgagacctgcaatgacttccaccccatgttcttcacccatgacaggagctttgaggagttcttctgcatctgcatccagctgctgaacaagacctggaaggagatgagggccaccagcgaggacttcaacaaggtgatgcaggtggtgaaggagcaggtgatgagggccctgaccaccaagcccagcagcctggaccagttcaagagcaagctgcagaacctgagctacacagagatcctgaagatccggcagagcgagaggatgaaccaggaggacttccagagccggcccatcctggagctgaaggagaagatccagcctgagatcctggagctgatcaagcagcagaggctgaaccggctggtggagggcacctgcttcaggaagctgaatgcccggcggcggcaggacaagttctggtactgccgcctgagccccaaccacaaggtgctgcactacggggacctggaggagagcccccagggcgaggtgccccatgacagcctgcaggacaagctgcctgtggccgacatcaaggctgtggtgacaggcaaggactgcccccacatgaaggagaagggggccctgaagcagaacaaggaggtgctggagctggccttcagcatcctgtatgacagcaactgccagctgaacttcatcgccccagacaagcatgagtactgcatctggacagatggcctgaatgccctgctgggcaaggacatgatgtctgacctgaccagaaatgacctggacaccctgctgtccatggagatcaagctgcggctgctggacctggagaacatccagatcccagatgcccccccacccatccccaaggagcccagcaactatgactttgtgtatgactgcaactag

SEQ ID NO: 269972 - DNA, 1896 bp, Artificial Sequence
  derived and/or modified sequence
atggatgccaagctggaggccctgaaggacctggccagcctgagcagagatgtgacctttgcccaggagttcatcaacctggatggcatcagcctgctgacccagatggtggagagcggcacagagcgctaccagaagctgcagaagatcatgaagccctgctttggagacatgctgtccttcaccctgacagcctttgtggagctgatggaccacggcatcgtgtcctgggacaccttctctgtggccttcatcaagaagatcgccagctttgtgaacaagagcgccatcgacatcagcatcctgcagaggagcctggccatcctggagagcatggtgctgaacagccatgacctgtaccagaaggtggcccaggagatcaccatcggccagctgatcccccacctgcagggcagtgaccaggagatccagacctacaccatcgctgtgatcaatgccctcttcctgaaggccccagatgagcggcggcaggagatggccaacatcctggcccagaagcagctgcggagcatcatcctgacccacgtgatccgggcccagagggccatcaacaatgagatggcccaccagctgtatgtgctgcaggtgctgaccttcaacctgctggaggacaggatgatgaccaagatggacccccaggaccaggcccagagggacatcatctttgagctgcggcgcatcgcctttgatgctgagagcgagcccaacaacagcagcggctccatggagaagaggaagtccatgtacacccgggactacaagaagctgggcttcatcaaccacgtgaacccagccatggacttcacccagaccccacctggcatgctggccctggacaacatgctgtactttgccaagcaccaccaggatgcctacatccgcatcgtgctggagaacagcagccgggaggacaagcatgagtgccccttcggccgcagcagcattgagctgaccaagatgctgtgtgagatcctgaaggtgggggagctgcccagcgagacctgcaatgacttccaccccatgttcttcacccatgacaggagctttgaggagttcttctgcatctgcatccagctgctgaacaagacctggaaggagatgagggccaccagcgaggacttcaacaaggtgatgcaggtggtgaaggagcaggtgatgagggccctgaccaccaagcccagcagcctggaccagttcaagagcaagctgcagaacctgagctacacagagatcctgaagatccggcagagcgagaggatgaaccaggaggacttccagagccggcccatcctggagctgaaggagaagatccagcctgagatcctggagctgatcaagcagcagaggctgaaccggctggtggagggcacctgcttcaggaagctgaatgcccggcggcggcaggacaagttctggtactgccgcctgagccccaaccacaaggtgctgcactacggggacctggaggagagcccccagggcgaggtgccccatgacagcctgcaggacaagctgcctgtggccgacatcaaggctgtggtgacaggcaaggactgcccccacatgaaggagaagggggccctgaagcagaacaaggaggtgctggagctggccttcagcatcctgtatgacagcaactgccagctgaacttcatcgccccagacaagcatgagtactgcatctggacagatggcctgaatgccctgctgggcaaggacatgatgtctgacctgaccagaaatgacctggacaccctgctgtccatggagatcaagctgcggctgctggacctggagaacatccagatcccagatgcccccccacccatccccaaggagcccagcaactatgactttgtgtatgactgcaactag

SEQ ID NO: 269973 - DNA, 2184 bp, Artificial Sequence
  derived and/or modified sequence
atgcccccccccgccgacatcgtgaaggtggccatcgagtggcccggtgcctaccccaaactgatggagattgaccagaagaagccattgtccgctatcattaaggaggtgtgcgatgggtggtcccttgctaatcacgagtactttgctctccagcacgccgacagttcaaacttctacattacagaaaagaatagaaacgagattaagaacggaacgatcctcaggttgaccacatctccagcccagaatgcccagcaattgcacgagagaatacagagctcaagcatggacgctaaacttgaggcactgaaggacctcgcgagcttaagccgcgacgtgacttttgcacaggagtttatcaatctcgacggtatctcgttgctcacccagatggtagagtccggcaccgagcgttaccaaaaattgcagaaaataatgaaaccatgcttcggagacatgctcagttttaccttgaccgcctttgtggaattaatggaccatgggatcgtttcctgggacacattctctgtggctttcattaagaaaattgcatcctttgttaacaagtcagctatcgacatctcgattcttcagaggtctctggccatcctggaatctatggtcttaaacagtcatgacctgtatcaaaaggtggcgcaggaaattaccatcgggcagcttatccctcaccttcaaggttcagaccaggagattcagacttatactatcgccgtcattaacgcactatttctaaaagcccccgacgagcgccgacaggagatggccaacatcctcgctcaaaaacagctgcgctccattatccttacacacgtgattagggctcaacgcgcaataaataacgagatggcccaccagctctacgtgctgcaggttctcacatttaatttactggaggacaggatgatgacaaaaatggacccccaggaccaggcccaaagggacattatctttgagctgcgacggatcgcctttgacgcagaaagtgaaccaaataactcgtctggaagcatggagaagcggaagtctatgtacacgcgggactataagaaattaggctttatcaatcacgtgaaccccgccatggattttacccagaccccgccaggaatgttggcactggacaacatgctgtatttcgccaaacatcatcaggatgcatacatccggattgtgctggagaactcatcccgggaagacaaacatgaatgtccctttggtagatcctccattgagctgaccaaaatgctgtgcgaaatcctcaaagtgggggagcttcccagcgagacctgtaatgatttccatccaatgtttttcacccatgaccgctcttttgaagaatttttctgtatctgcattcagctcctgaacaaaacctggaaggagatgagggctacaagcgaggactttaacaaagtgatgcaggtcgtcaaggaacaggtaatgagggctctgactaccaagccttcatcactggatcagtttaagtccaaactccagaatctctcatacactgagatcttaaaaatccggcagtccgagcggatgaaccaggaggacttccagtcccgtccgatcctcgaactgaaggagaagatccaacccgaaattttggagctgatcaaacagcagcggctgaaccgcctggtcgagggaacgtgctttagaaagctgaacgcccgccgtagacaagataaattctggtactgtcggctctcccccaatcacaaagttttacattacggtgatttagaggaatcgccccaaggtgaagtaccacatgatagcttgcaggacaagctccccgtcgctgacatcaaggctgtggtgacagggaaagactgcccgcacatgaaggagaagggcgctctgaagcagaacaaggaggtgctagagctggccttttctatcctatatgatagcaactgtcagttgaattttatagctcccgataagcatgaatattgcatttggactgatggactgaacgctctgttaggaaaagacatgatgtctgacttgacgcggaacgatctggatactctactctccatggagatcaagctgagactcctggatctcgaaaacatccagattcctgatgcaccgcccccaatccccaaggaaccgtccaactacgacttcgtttatgattgcaattag

SEQ ID NO: 269974 - DNA, 1290 bp, Artificial Sequence
  derived and/or modified sequence
atgagcgagcaccagaaggagcagaccctggacacccccagcctgcggacagttactctcacggtcagagtgcacggatttattctggaagtcagtaaaaccaaaaacccgcctattcctgacacattttggccacctagatgggatcatcggccctcacctgggggggagactaatgcatattgtcagatgaaccacgtgaacccagccatggattttactcagactccacctgggatgctggcactggacaacatgctgtacttcgctaaacatcaccaagatgcttacattaggatcgtcctggaaaatagtagccgcgaggataaacacgagtgcccatttggccgctctagtatcgaattgactaagatgctgtgtgaaatcttgaaagttggagagctgccttcagaaacctgcaatgactttcaccctatgttcttcacgcatgacagaagtttcgaggagtttttctgcatctgcatccagctgctcaacaaaacttggaaggagatgagagccacaagtgaggacttcaacaaggtgatgcaggtggtgaaggagcaggtgatgcgggccttgaccacaaagccctccagccttgatcagttcaaatcaaagttgcagaatttaagctatactgaaattttaaaaattcgacaatccgagagaatgaaccaggaggacttccagtcccgccctattctcgaactgaaggaaaagatacagcctgagatcctggagctgattaaacagcagagactaaataggctggtcgaaggcacctgcttccgtaagcttaacgctaggcggaggcaagacaaattctggtattgcagactctcaccaaaccataaagtcttacactacggagatttggaagagtctcctcaaggggaagtgcctcatgattctctgcaggacaaactccccgtggccgacatcaaggccgtggttactgggaaggattgtccccacatgaaagagaagggggcactcaaacagaacaaggaggtcctggagcttgccttttctatcttatatgattccaactgccaattaaacttcattgcgcctgataagcacgagtactgtatctggacggacggactgaacgccctcctgggaaaagacatgatgtcagaccttaccaggaatgacctggatacacttctgagtatggaaataaaacttagacttctggacctggagaatattcaaatacctgacgcccctcctccgatccctaaggagccgagcaactacgacttcgtatatgattgtaactag

SEQ ID NO: 269975 - DNA, 1896 bp, Artificial Sequence
  derived and/or modified sequence
atggacgccaagctggaggccctgaaggacctggccagcctgagccgggacgtcaccttcgcccaggagtttattaatctggatggaatctcgctgctgactcagatggtcgagtccggaaccgaacggtatcagaagttacaaaaaattatgaaaccttgctttggagacatgctgagttttaccttaacagcctttgtcgagctaatggaccacgggatcgtgagctgggataccttctcagtcgccttcattaagaaaatcgcaagctttgtcaacaagagtgccattgacattagtattcttcagcggtccctggcaatcctggaatctatggttcttaacagtcatgatctgtaccagaaggtggcccaagagatcactattggtcagctcatcccccacctgcagggttcggatcaggagatacagacatatacgatcgccgtcatcaatgccttgtttttaaaagcccctgacgaaaggcgacaagagatggccaacatcttggctcagaagcagttgagaagcatcatattgactcacgtgattagagcccagagggcaatcaataatgagatggctcatcagctttacgtactgcaagtgcttacctttaatctactcgaagataggatgatgaccaaaatggacccccaggaccaggctcaaagggatattatatttgagttgcggcgtattgcattcgacgcagagtcggaacccaacaatagctctggctctatggagaagcggaaatctatgtatacgagagactataaaaagcttggtttcattaatcatgtcaatccagctatggattttacacagacccctcctggcatgctggccctggataatatgctctattttgccaaacaccatcaggacgcatacatacgtattgtgctggagaatagttccagggaggataaacacgagtgcccttttgggcgctccagcatcgaattgaccaaaatgctctgcgaaatcctgaaagtgggggaactaccctctgaaacttgcaacgatttccacccaatgttttttactcacgataggtcgttcgaagagtttttctgcatctgcatacagttgctcaacaaaacctggaaggagatgcgcgcaacaagcgaggatttcaacaaagtgatgcaggtcgtgaaagagcaagtcatgagagctctgaccacaaaaccctcgtccctggatcagttcaagtctaagctgcagaacctgagctataccgagatcctcaagattcggcaatcagaacggatgaaccaggaggatttccaatctaggcctatccttgagctgaaagaaaagatccaacctgagatccttgaactcattaagcagcaacgattgaacagactggttgaaggcacctgcttcaggaagctcaatgcacgtcgcagacaggataagttctggtactgtcgactgtcacccaaccacaaagtgctgcattacggtgacctcgaggaatctccccaaggggaggtgccccatgacagtctccaggataagttgccggtagctgatatcaaagccgtcgtgaccgggaaggattgcccccatatgaaagaaaaaggcgcactgaagcagaataaagaagtgcttgaactggcattctccatcctttacgatagtaattgtcaactgaatttcattgcccccgataaacatgagtattgtatttggacagacgggttgaacgccttgttgggtaaagatatgatgagcgacctgactaggaacgacctggataccttgctgtctatggagattaagctgaggttactggatctggagaatattcagatcccggatgccccacccccgatccccaaggagccctccaattacgatttcgtttacgactgcaactag

SEQ ID NO: 269976 - DNA, 2184 bp, Artificial Sequence
  derived and/or modified sequence
atgcccccccccgccgacatcgtgaaggtggccatcgagtggcccggtgcatatccgaagctcatggaaattgatcaaaaaaagccactgtccgctatcataaaggaggtctgtgacggctggagcctggccaatcacgagtacttcgctctgcagcacgctgattcctctaacttctacattactgaaaaaaataggaatgagatcaaaaacggcacaatactgaggctgactacttcacctgcacagaacgcccagcaactgcatgagcgtatccagagctcttccatggatgcgaagctggaggctcttaaggacctggccagcctgtcacgggacgtgaccttcgcgcaggagtttattaatctcgacggcatctcccttctgacccagatggttgaaagtggcaccgaaagatatcagaaattgcagaaaattatgaagccctgcttcggagatatgctgtctttcactctgacagcgttcgtcgaactgatggaccacggcatcgtctcatgggatacatttagcgtggccttcatcaaaaagatcgctagtttcgtgaacaagtccgccatcgacataagcattttgcagagaagtcttgcaatcctcgagagcatggtgctgaatagtcatgacctgtatcagaaggtcgcccaggagattaccattggtcaactgattccccatctacagggaagcgaccaggagattcagacctacactattgccgtgatcaacgctctgttcctaaaagcacctgatgagaggcgccaggagatggctaacattttagcccaaaagcagctgcgttcaatcatccttactcacgtgatcagggcacagcgagccattaataacgaaatggctcaccagctgtacgtgctacaggtgctgacatttaatctacttgaagataggatgatgactaaaatggatccgcaggatcaagctcaacgggacatcatcttcgagctgagacgcatagctttcgacgctgagtctgaaccaaataactcttccggttccatggaaaaacgcaaaagcatgtacacacgtgattataagaagcttggatttatcaatcatgttaacccagctatggactttacgcagactccgcccggaatgctcgcattggataacatgttgtattttgcgaagcatcatcaggatgcttacattcggattgtgctggaaaatagttctcgggaggataagcatgaatgccccttcgggcgcagctccatcgagctcaccaaaatgctgtgcgagattctgaaggtgggcgaacttcctagcgaaacttgcaacgacttccatcccatgtttttcactcatgacagatctttcgaagagttcttctgcatctgtatacaattgctcaataaaacatggaaagaaatgagagccacatcagaggatttcaataaagtgatgcaggtggttaaggaacaggtgatgagggctttgacaaccaaaccgtccagtctggatcagttcaagagcaaactgcagaatctgagctacaccgagatattgaaaattcgccagtccgaacgcatgaatcaggaggacttccaatccagaccgatattggaactgaaggagaagattcagcctgaaattcttgagctgatcaagcagcagcggctaaaccgcctggtggaaggaacttgtttccgcaagttgaacgcgagacgcaggcaggataaattctggtattgtcggctgtcacccaatcacaaggttctgcattatggtgacctggaggagagcccgcaaggggaggtaccccatgactctttgcaggataaactgcccgtagccgacatcaaggcagtcgtgaccggaaaagactgtcctcacatgaaagaaaaaggcgctctgaagcaaaacaaagaagttttagagctggctttctctattttgtacgacagtaattgccagctgaatttcatagctccagacaagcacgagtactgtatatggacagacggcctaaatgcactgctcggtaaggatatgatgagtgatctgacccgaaatgacctagacaccttattgtccatggagatcaagctcagattactggatctcgagaacatacagattcccgacgcacctccacccatcccaaaggagccctcaaactacgattttgtgtacgactgcaactag

SEQ ID NO: 269977 - DNA, 2184 bp, Artificial Sequence
  derived and/or modified sequence
atgcccccccccgccgacatcgtgaaggtggccatcgagtggcccggggcataccctaagctgatggagattgatcaaaaaaaaccactcagcgccataatcaaggaagtatgcgatgggtggagcttggcaaatcatgagtacttcgcgctgcagcacgcggacagctccaatttttacattaccgagaagaatagaaatgaaattaagaatggcaccatcctgcggctgaccacgtcacctgcccagaacgcccagcaactgcacgaaagaattcagtcttcttccatggacgcgaagctggaggctctgaaggatcttgccagtctgagtcgcgatgttacctttgcgcaggaatttatcaacctggatggcatcagcttgctcacgcaaatggtggagtcaggaactgagagatatcagaagttgcagaagatcatgaagccctgctttggcgacatgcttagtttcaccctaaccgcatttgttgaacttatggaccacggaattgtaagctgggatactttttcagtggcctttataaagaaaattgcatccttcgttaacaaaagtgctatcgacatcagtattctgcaacggagtctggccatcctggagtctatggtgctgaatagccatgatctttaccagaaggtggcccaggagatcacaatcgggcagttaattccacaccttcagggctccgaccaggaaatacagacctatacaatcgccgtgatcaatgcgttgttcctgaaggccccggacgagcgtcgtcaggagatggccaatattttggcccaaaagcagctgagatcaattatcctgactcacgttattagggcccagagagccatcaataacgagatggctcaccagctatacgtactgcaagtgttgaccttcaacctattggaagacaggatgatgactaagatggatccacaggatcaagctcagagggacatcatctttgagctccggcgaatcgccttcgatgcagaatcagaacctaacaacagtagcggcagcatggaaaagcggaagagtatgtacactagagattacaagaagctggggtttatcaatcatgtcaaccccgcaatggatttcacgcagactcccccggggatgctggcactggacaacatgctgtacttcgccaagcaccaccaggatgcatacattagaatcgtcctcgaaaacagttcacgtgaagacaaacatgaatgtccctttggccggagcagtatcgaattaactaagatgctctgcgagatcctcaaggtgggagagctcccctccgagacctgcaacgatttccacccgatgttttttacccatgatcgttcgtttgaggaatttttctgtatttgtatccaattgctaaacaaaacttggaaggaaatgagagccactagcgaggattttaacaaagttatgcaagtggtgaaggaacaggtgatgagagcactcactactaagccgtctagcctggaccagttcaaatcaaagctacaaaacttgtcttacaccgagattctcaaaattcgccagtccgaaagaatgaaccaggaagactttcagagtcgacccattctcgaactcaaggagaagattcagcccgagatcctggaacttattaaacagcagcgcctgaatcggctcgtggagggcacctgcttccggaaattgaacgcacggagacggcaagacaagttctggtattgtcggcttagtccaaaccataaggtgttacactatggcgacctggaggaatccccccagggagaggtgccacacgactcattgcaggataagttaccggtggccgacattaaggccgtcgtcactgggaaggattgtccacacatgaaggaaaaaggcgccctgaagcagaataaggaggttctggagctggcatttagtatcttatacgacagtaactgccagctgaattttatcgcccctgataagcacgagtactgcatatggactgatgggttaaatgccctgctcggtaaggatatgatgtccgatctcacaaggaatgacctggacaccctgctttctatggaaataaaattgagactgcttgacctggagaacattcagatccccgatgcccctccaccaatcccaaaggagccatccaactatgactttgtgtacgactgcaattag

SEQ ID NO: 269978 - DNA, 2184 bp, Artificial Sequence
  derived and/or modified sequence
atgccccctcctgccgacattgtgaaggtggcgattgaatggcctggtgcgtacccaaagcttatggaaatcgatcagaagaagccactcagtgcaattataaaggaggtatgtgacggttggagcctggcaaatcacgagtatttcgcactccagcacgccgactcctcaaacttctacattactgagaaaaatcggaacgagatcaagaacggcacaatcctccgccttactacgagccctgctcagaatgcccagcagctgcacgaacgcatccagtcctcaagcatggacgctaaactggaggcgctgaaggatctggcatccctgagcagagatgtgacctttgctcaggagttcataaaccttgatggaattagcttattgacacagatggtggagtccggcacggagagataccagaagctacaaaaaataatgaagccatgttttggcgatatgctttccttcaccctcacagccttcgttgagttaatggatcacggcatagtgagctgggatacattctctgtcgcctttattaaaaaaatcgcttcctttgtgaataaatcagctatagacatttcgattttacagagaagcttggcgatattagagagcatggtgctgaactcccacgatctctaccagaaggtcgcccaggagatcaccattggtcaattgatccctcacctgcagggctccgatcaggagattcagacctatacgatagcggtcattaacgctctttttctgaaagcccctgatgaacgacgccaagaaatggcaaacatccttgcccagaaacaactgcgctccataattcttactcacgtaatccgtgcccagcgagctataaacaacgagatggctcaccaattgtacgtgctccaagtcctgaccttcaaccttctggaagacaggatgatgaccaagatggacccccaagaccaagcgcagcgggatataatcttcgagctcaggcgcatcgccttcgacgcagagtcagaacctaataacagctcagggtccatggaaaagcgtaaaagtatgtatactagagattataagaagctgggtttcatcaatcacgtgaatccagcgatggactttacgcagacccctccaggaatgctggcacttgataacatgctctatttcgctaagcatcaccaggatgcctacatccggatcgttctagagaattcctccagggaggataaacatgagtgtccttttggacgaagctctatcgagctgactaaaatgctctgtgagatcctgaaagtaggcgaactgccttccgaaacctgcaatgactttcatcctatgttcttcacgcacgacaggtctttcgaggagttcttttgtatctgtattcaactgctgaacaagacttggaaggagatgcgtgccacatccgaggattttaacaaagtgatgcaggtggttaaggaacaagtgatgcgcgctttgaccacgaaaccatccagcctggatcagttcaagtccaagctgcagaacctgtcttacaccgaaatcctcaagatcaggcagagcgagagaatgaatcaggaggatttccagagtagacctatattggaactcaaggagaaaatacaacccgagatccttgaactgattaaacagcaacgcctgaaccggttggttgaaggcacctgcttcagaaagctcaatgcgagacgacggcaggacaaattttggtactgcaggctgtccccaaaccacaaagtcctgcattatggggatctggaagagtcccctcagggagaggtaccacatgattccctgcaggataagctcccggtcgcggatatcaaagctgtggtaacaggcaaagattgtccccatatgaaagagaaaggagctctcaagcagaacaaggaggtgctggagctggccttcagcatcttgtatgactccaattgccaactcaacttcatcgccccagacaagcacgagtactgcatttggaccgacggcctgaacgcactcctcgggaaggacatgatgtctgaccttacgaggaatgatttagacaccctgctttccatggaaataaagctgcggctgctggacctcgagaatattcagattccggacgctcctccccctattccaaaagagccgagcaactacgactttgtatatgactgtaactag

SEQ ID NO: 269979 - DNA, 1290 bp, Artificial Sequence
  derived and/or modified sequence
atgtctgagcaccaaaaggagcaaaccttagacaccccctctctgcgaactgtgactctcaccgtgagggtgcacgggtttatactggaagttagcaaaacaaagaacccccctatccctgataccttttggccaccacggtgggaccaccgtccctcgcccggaggagaaacgaacgcatattgccagatgaaccatgtcaatcctgctatggacttcactcaaacgcccccagggatgctggcgctggacaatatgctgtattttgcaaaacaccaccaggatgcgtatattcggatagtgctcgaaaattcttcacgggaagacaagcatgaatgtcccttcgggaggagtagtatcgagctgaccaagatgctgtgcgagatccttaaggtcggcgagctaccatctgagacttgtaacgattttcaccccatgttttttacccatgaccgcagctttgaggaattcttttgtatctgtatccaactgctcaacaaaacttggaaagaaatgcgcgctacttctgaggactttaacaaggtgatgcaggtcgtgaaggagcaagtgatgcgggcacttacaaccaaaccatcgtccctcgaccagtttaagagcaagcttcagaacctgtcctacacagagatcctgaagataaggcagagcgagagaatgaaccaagaggacttccagtctagacctattttggagctgaaggaaaagatacaaccggaaattctggagcttatcaaacagcagaggttgaatagactggtcgaaggcacttgtttcaggaagttaaacgctaggaggcggcaggataaattttggtactgtcgacttagtcccaaccacaaggtgctgcattatggagatctggaggaaagtccacagggtgaagtcccccatgatagcctccaagataagctgcctgtggccgatatcaaggccgtggtaaccggtaaggattgtcctcatatgaaagaaaaaggtgccctgaaacagaacaaagaagtactcgagctggccttttcaatactctacgacagcaactgccaactcaatttcattgctccagacaaacacgaatactgcatttggacagacggcttgaacgccctcctgggaaaagacatgatgagcgacttgacccgcaacgatctagacactctcctgtccatggagataaagctgaggttgcttgatctggagaatatacaaatccctgatgccccacctcctatcccaaaagagccttccaattatgacttcgtctacgactgcaactag

SEQ ID NO: 269980 - DNA, 1896 bp, Artificial Sequence
  derived and/or modified sequence
atggatgctaaactcgaggcgttgaaggatctggcctctctctctagagacgttacatttgcccaggagttcattaatcttgatggaatctctctcctcacacaaatggttgagtccggtacagaacgctaccagaagttgcaaaagatcatgaagccatgcttcggagatatgctctctttcactctgacagcattcgttgagttgatggatcacggaatcgtatcctgggatacattctccgtggcattcatcaaaaagatcgctagctttgtcaataagtctgccatcgatatcagtatactacagagatccctcgcaattctggaatccatggtgctgaattcacatgatttataccaaaaggtagctcaggagatcaccatcggccagctgattcctcacctgcagggaagcgaccaggagatccagacttacaccatagccgtcatcaacgcgctctttctgaaagccccagacgaacgacgccaggagatggccaacatccttgcccaaaagcagcttaggagtataatcctaacccacgtcatcagggcccagagggcaataaacaatgaaatggcgcatcagctttacgtgctgcaggtgttaacgttcaacctcctagaggacagaatgatgacaaaaatggacccacaggatcaggcccagcgagatataatattcgaacttagacggattgctttcgatgcggaatcagaacctaacaacagcagtggaagcatggagaagagaaaaagtatgtacacccgcgactataagaaactggggtttattaatcacgttaaccctgcaatggactttacacaaacaccccctgggatgcttgccctcgacaacatgctatattttgctaaacaccatcaggatgcgtatattcgtattgtcctcgaaaactcatcaagagaggacaagcacgaatgcccttttggcaggtcctccattgaattgaccaagatgctgtgtgaaattctcaaggtgggggagcttcctagtgagacctgcaatgatttccaccccatgttctttacgcacgaccggagtttcgaggagttcttctgtatctgcattcaattgctgaacaaaacatggaaggaaatgcgggctactagtgaggattttaacaaagtgatgcaggtagttaaggaacaggttatgcgggctctcacaaccaaaccctctagtttagaccagttcaaatcaaagttgcagaacctttcctatactgaaatcctgaagattcgacaatctgagcgaatgaatcaggaagactttcagtcccggccaatattggaactgaaggagaaaatacagccagaaattttagagctcatcaaacaacagcgcctcaacaggctggtcgagggaacttgctttcgtaaactcaacgctcgacggcgtcaggacaaattctggtattgtaggctgtctcccaaccataaggtgctgcactatggcgacctggaggagagcccccagggcgaggtcccccacgacagcttgcaggacaagctgccagttgccgatatcaaagctgtggtgaccgggaaagattgccctcacatgaaggaaaagggcgcactgaaacaaaacaaggaggtgctcgaattggcgttcagcattctttatgacagcaattgccagctcaatttcatcgccccagataaacatgaatactgcatttggactgacggactcaacgcactactcggcaaagatatgatgagtgatctgacaaggaacgacctcgacacgcttcttagcatggaaattaaactgcgactgctggatctagagaacatccagatccctgacgctccaccacctatccctaaggagccaagcaactatgatttcgtgtatgactgcaactag

SEQ ID NO: 269981 - DNA, 2184 bp, Artificial Sequence
  derived and/or modified sequence
atgccccctcccgcagatatcgtgaaagtcgctatcgagtggcccggtgcctaccccaagcttatggaaattgaccaaaagaaacccctgtctgcgataatcaaagaagtgtgcgacggctggagcctggcaaaccacgaatacttcgcccttcagcatgcagacagcagtaacttctacatcaccgaaaagaaccggaatgaaattaaaaatgggacaatattaaggcttaccaccagcccggctcagaatgctcaacagctacacgagcgtatccagtcgtcctcaatggacgcaaagttggaggcacttaaggacttagctagccttagtcgcgacgtcacgtttgcgcaagaatttataaacctggatgggatttctttattaacacagatggtggaatctggaaccgagagataccagaagctccagaagatcatgaaaccgtgctttggtgacatgctctcatttacattaaccgcctttgttgagctcatggatcacggcatagtttcttgggatactttttccgtggctttcattaagaagatcgcgtcgtttgttaataagagtgccatcgacatctccatcttgcaaaggagtctggctattctcgagagcatggtgctgaattcacatgacctgtaccagaaggtggcccaggagatcaccatcggccagttgataccccatttacaaggctctgaccaggagatccagacatatacgattgccgtgatcaatgccctctttctgaaggccccagacgaaaggaggcaggagatggctaatatactggcccagaaacagctgagatctattatactgacacacgttattcgggcacagagggccattaataacgagatggctcaccaattgtacgtgctccaagtcctaacctttaatctgctggaggaccgtatgatgacaaagatggatcctcaggatcaagcccagagggacatcatctttgagctcaggaggattgcatttgacgcagagtccgaacctaacaacagctccgggagcatggaaaaacgcaaaagcatgtatacccgcgattacaagaaactcggcttcataaaccatgtgaatcctgcaatggactttacacagacacccccaggcatgcttgccttagataatatgttgtatttcgccaaacaccaccaggacgcatatattcggatcgtcctggaaaacagcagtcgcgaagacaaacatgagtgcccgttcggacggtcctctattgagctcaccaagatgctgtgtgagatactgaaggtcggcgaattgccctctgaaacctgcaacgattttcaccccatgttcttcactcatgatcgttcgtttgaggaattcttctgcatatgcatccagttacttaataaaacgtggaaggagatgagggcgaccagcgaggatttcaacaaagttatgcaggtggtgaaagagcaggtcatgcgggcactcacaacaaaaccatctagtctggaccaattcaaatcaaaattacagaatttgagttacacagaaattttgaagatacgccagtccgagcggatgaaccaagaagacttccagtctcgcccaattctcgagctgaaggagaagatccaaccagagatcctggaattgattaaacagcagagacttaacagacttgtggagggaacttgtttcaggaaacttaacgccaggagacgccaggacaaattttggtactgcaggctgtcacctaaccacaaggtgctgcattacggggatttagaggagtcaccccagggagaggtccctcacgatagtctgcaggataagctgcccgtcgctgatatcaaggcggtcgtgaccggcaaagattgcccacatatgaaagagaagggcgctttgaagcagaataaggaagtgctggagttggcgttctccatactgtatgattccaattgccagctgaattttatcgcccctgacaagcatgaatattgcatttggaccgacgggttgaatgcacttctgggaaaggacatgatgtccgaccttacgcgcaatgacctggacacactgctgtccatggagataaagttacgccttctggacttggagaacattcaaatccccgacgccccaccgcctattccaaaggaacccagcaattatgactttgtgtatgattgcaattag

SEQ ID NO: 269982 - DNA, 2184 bp, Artificial Sequence
  derived and/or modified sequence
atgccacccccagcagatatcgttaaggtcgccatcgagtggcctggcgcttatcccaaacttatggagattgatcaaaaaaaacccctctctgccatcattaaggaagtgtgcgacgggtggagcttagccaaccacgaatactttgctttgcagcacgctgactcctctaatttttacattacagagaagaatcggaatgagattaagaatggcactatcttgcggttaactacgagcccagcccaaaatgcacaacagctgcacgaacgaattcaatcatcctcgatggacgcgaaattagaggctctcaaggacctcgcctctctgtcccgagacgttacatttgcccaggaatttattaatctcgacggtatatcgcttttaactcagatggtggaatccggcactgaaaggtaccaaaaattacagaaaattatgaaaccctgctttggggatatgctatctttcacattgaccgcgtttgtggaattgatggatcacggcatagtctcttgggatactttttcagtggcattcattaagaaaatcgccagcttcgtcaataaaagtgccatcgatatcagcatcctacaacgtagccttgccatcctggaatcaatggtgctgaatagtcatgacctgtaccagaaagtcgcccaagaaattactattggacagctgatcccacatctgcagggaagcgaccaggaaatccagacctacacaattgctgttatcaacgccctctttctgaaagctcctgacgaacgcagacaggagatggctaatatcctcgctcagaaacagctcaggtctatcatactgactcacgtcatcagagctcagcgcgctataaataacgaaatggcccatcagctgtacgttttacaggtcctgacattcaacctcttagaggacagaatgatgaccaaaatggacccacaagaccaggcccagcgggatatcatttttgagctcagacggatcgcctttgacgccgagagtgaacccaataatagttctggatcaatggaaaagcgtaagtccatgtatactagggattacaagaagctgggattcattaatcatgtcaatcctgccatggacttcacgcagactcctccaggaatgctggcccttgataatatgttgtatttcgcaaagcatcatcaggacgcctacataaggatcgtgctggagaactcgtcaagagaggacaagcacgaatgtccttttgggaggtcatctattgagttgaccaagatgctgtgcgagatcctcaaagtcggagagcttccatcagagacatgtaacgactttcaccctatgttcttcactcatgatcggtcatttgaggagtttttctgcatttgtatccagctgctgaataaaacatggaaggagatgcgggctacaagcgaagactttaacaaagtgatgcaggtcgtgaaggagcaggtcatgcgcgctcttacgaccaagcccagttctcttgaccaatttaagtctaagttgcagaacttgtcttacactgagatcctaaagattcggcaaagtgagcgcatgaatcaggaggacttccagagccggccaatcctggagctgaaagagaaaatccaacctgagatacttgagctcatcaagcagcagaggctgaacagactcgtggaaggcacctgctttcggaaactgaacgccagaagaagacaggataaattctggtactgcaggctgagccccaaccacaaagtcctccactatggtgacctggaggaatcccctcagggagaggtgccccacgatagcctgcaagataagctgcctgtggcggatatcaaggcggtcgtgacagggaaagattgtcctcatatgaaggagaaaggtgcactgaagcagaacaaagaagtattggaactcgcgttttctatcctgtacgatagtaattgtcaactcaacttcattgcccctgacaagcatgagtattgtatatggaccgatggcttgaacgccctcctgggcaaggacatgatgagtgaccttacaaggaatgatctggataccctgcttagcatggagattaagctaaggctgctggacctcgagaacattcagatacccgacgcaccccctcccatccccaaagagccaagtaattacgattttgtatatgactgtaattag

SEQ ID NO: 269983 - DNA, 2184 bp, Artificial Sequence
  derived and/or modified sequence
atgcccccccccgccgacatcgtgaaggtggccatcgagtggcccggcgcctaccccaagctgatggagatcgaccagaagaagcccctgagcgccatcatcaaggaggtgtgcgacggctggagcctggccaaccacgagtacttcgccctgcagcacgccgacagcagcaacttctacatcaccgagaagaacagaaacgagatcaagaacggcaccatcctgagactgaccaccagccccgcccagaacgcccagcagctgcacgagagaatccagagcagcagcatggacgccaagctggaggccctgaaggacctggccagcctgagcagagacgtgaccttcgcccaggagttcatcaacctggacggcatcagcctgctgacccagatggtggagagcggcaccgagagataccagaagctgcagaagatcatgaagccctgcttcggcgacatgctgagcttcaccctgaccgccttcgtggagctgatggaccacggcatcgtgagctgggacaccttcagcgtggccttcatcaagaagatcgccagcttcgtgaacaagagcgccatcgacatcagcatcctgcagagaagcctggccatcctggagagcatggtgctgaacagccacgacctgtaccagaaggtggcccaggagatcaccatcggccagctgatcccccacctgcagggcagcgaccaggagatccagacctacaccatcgccgtgatcaacgccctgttcctgaaggcccccgacgagagaagacaggagatggccaacatcctggcccagaagcagctgagaagcatcatcctgacccacgtgatcagagcccagagagccatcaacaacgagatggcccaccagctgtacgtgctgcaggtgctgaccttcaacctgctggaggacagaatgatgaccaagatggacccccaggaccaggcccagagagacatcatcttcgagctgagaagaatcgccttcgacgccgagagcgagcccaacaacagcagcggcagcatggagaagagaaagagcatgtacaccagagactacaagaagctgggcttcatcaaccacgtgaaccccgccatggacttcacccagaccccccccggcatgctggccctggacaacatgctgtacttcgccaagcaccaccaggacgcctacatcagaatcgtgctggagaacagcagcagagaggacaagcacgagtgccccttcggcagaagcagcatcgagctgaccaagatgctgtgcgagatcctgaaggtgggcgagctgcccagcgagacctgcaacgacttccaccccatgttcttcacccacgacagaagcttcgaggagttcttctgcatctgcatccagctgctgaacaagacctggaaggagatgagagccaccagcgaggacttcaacaaggtgatgcaggtggtgaaggagcaggtgatgagagccctgaccaccaagcccagcagcctggaccagttcaagagcaagctgcagaacctgagctacaccgagatcctgaagatcagacagagcgagagaatgaaccaggaggacttccagagcagacccatcctggagctgaaggagaagatccagcccgagatcctggagctgatcaagcagcagagactgaacagactggtggagggcacctgcttcagaaagctgaacgccagaagaagacaggacaagttctggtactgcagactgagccccaaccacaaggtgctgcactacggcgacctggaggagagcccccagggcgaggtgccccacgacagcctgcaggacaagctgcccgtggccgacatcaaggccgtggtgaccggcaaggactgcccccacatgaaggagaagggcgccctgaagcagaacaaggaggtgctggagctggccttcagcatcctgtacgacagcaactgccagctgaacttcatcgcccccgacaagcacgagtactgcatctggaccgacggcctgaacgccctgctgggcaaggacatgatgagcgacctgaccagaaacgacctggacaccctgctgagcatggagatcaagctgagactgctggacctggagaacatccagatccccgacgcccccccccccatccccaaggagcccagcaactacgacttcgtgtacgactgcaactag

SEQ ID NO: 269984 - DNA, 1290 bp, Artificial Sequence
  derived and/or modified sequence
atgagcgagcaccagaaggagcagaccctggacacccccagcctgagaaccgtgaccctgaccgtgagagtgcacggcttcatcctggaggtgagcaagaccaagaacccccccatccccgacaccttctggccccccagatgggaccacagacccagccccggcggcgagaccaacgcctactgccagatgaaccacgtgaaccccgccatggacttcacccagaccccccccggcatgctggccctggacaacatgctgtacttcgccaagcaccaccaggacgcctacatcagaatcgtgctggagaacagcagcagagaggacaagcacgagtgccccttcggcagaagcagcatcgagctgaccaagatgctgtgcgagatcctgaaggtgggcgagctgcccagcgagacctgcaacgacttccaccccatgttcttcacccacgacagaagcttcgaggagttcttctgcatctgcatccagctgctgaacaagacctggaaggagatgagagccaccagcgaggacttcaacaaggtgatgcaggtggtgaaggagcaggtgatgagagccctgaccaccaagcccagcagcctggaccagttcaagagcaagctgcagaacctgagctacaccgagatcctgaagatcagacagagcgagagaatgaaccaggaggacttccagagcagacccatcctggagctgaaggagaagatccagcccgagatcctggagctgatcaagcagcagagactgaacagactggtggagggcacctgcttcagaaagctgaacgccagaagaagacaggacaagttctggtactgcagactgagccccaaccacaaggtgctgcactacggcgacctggaggagagcccccagggcgaggtgccccacgacagcctgcaggacaagctgcccgtggccgacatcaaggccgtggtgaccggcaaggactgcccccacatgaaggagaagggcgccctgaagcagaacaaggaggtgctggagctggccttcagcatcctgtacgacagcaactgccagctgaacttcatcgcccccgacaagcacgagtactgcatctggaccgacggcctgaacgccctgctgggcaaggacatgatgagcgacctgaccagaaacgacctggacaccctgctgagcatggagatcaagctgagactgctggacctggagaacatccagatccccgacgcccccccccccatccccaaggagcccagcaactacgacttcgtgtacgactgcaactag

SEQ ID NO: 269985 - DNA, 1896 bp, Artificial Sequence
  derived and/or modified sequence
atggacgccaagctggaggccctgaaggacctggccagcctgagcagagacgtgaccttcgcccaggagttcatcaacctggacggcatcagcctgctgacccagatggtggagagcggcaccgagagataccagaagctgcagaagatcatgaagccctgcttcggcgacatgctgagcttcaccctgaccgccttcgtggagctgatggaccacggcatcgtgagctgggacaccttcagcgtggccttcatcaagaagatcgccagcttcgtgaacaagagcgccatcgacatcagcatcctgcagagaagcctggccatcctggagagcatggtgctgaacagccacgacctgtaccagaaggtggcccaggagatcaccatcggccagctgatcccccacctgcagggcagcgaccaggagatccagacctacaccatcgccgtgatcaacgccctgttcctgaaggcccccgacgagagaagacaggagatggccaacatcctggcccagaagcagctgagaagcatcatcctgacccacgtgatcagagcccagagagccatcaacaacgagatggcccaccagctgtacgtgctgcaggtgctgaccttcaacctgctggaggacagaatgatgaccaagatggacccccaggaccaggcccagagagacatcatcttcgagctgagaagaatcgccttcgacgccgagagcgagcccaacaacagcagcggcagcatggagaagagaaagagcatgtacaccagagactacaagaagctgggcttcatcaaccacgtgaaccccgccatggacttcacccagaccccccccggcatgctggccctggacaacatgctgtacttcgccaagcaccaccaggacgcctacatcagaatcgtgctggagaacagcagcagagaggacaagcacgagtgccccttcggcagaagcagcatcgagctgaccaagatgctgtgcgagatcctgaaggtgggcgagctgcccagcgagacctgcaacgacttccaccccatgttcttcacccacgacagaagcttcgaggagttcttctgcatctgcatccagctgctgaacaagacctggaaggagatgagagccaccagcgaggacttcaacaaggtgatgcaggtggtgaaggagcaggtgatgagagccctgaccaccaagcccagcagcctggaccagttcaagagcaagctgcagaacctgagctacaccgagatcctgaagatcagacagagcgagagaatgaaccaggaggacttccagagcagacccatcctggagctgaaggagaagatccagcccgagatcctggagctgatcaagcagcagagactgaacagactggtggagggcacctgcttcagaaagctgaacgccagaagaagacaggacaagttctggtactgcagactgagccccaaccacaaggtgctgcactacggcgacctggaggagagcccccagggcgaggtgccccacgacagcctgcaggacaagctgcccgtggccgacatcaaggccgtggtgaccggcaaggactgcccccacatgaaggagaagggcgccctgaagcagaacaaggaggtgctggagctggccttcagcatcctgtacgacagcaactgccagctgaacttcatcgcccccgacaagcacgagtactgcatctggaccgacggcctgaacgccctgctgggcaaggacatgatgagcgacctgaccagaaacgacctggacaccctgctgagcatggagatcaagctgagactgctggacctggagaacatccagatccccgacgcccccccccccatccccaaggagcccagcaactacgacttcgtgtacgactgcaactag

SEQ ID NO: 269986 - DNA, 4022 bp, Artificial Sequence
  derived and/or modified sequence
aattagtgcctccaaacgccgtgtgtgagctcatcgaagtcatgctctgcacacatattatttatagcagatctgaggcatgcatggtgtttgacatttctgtcttttaagtagggggacttcaaaaagtcgtgggcatccccctaggcaaagtgcagtgggcagggaccaggcagggtgcgggcgcaaggcgaacgcgcagaccacgagtgtcctggcgcaggtgccgggggcggcggctgcaactccgcagcgtccgctcgggaggagagttcgcggctgatctccggatgccttgcagatgcaaaatgtgtctctggccagcaggaggaaggaagaggaagtgagagcagcggcagccggcggtgcagcagccggccgacccagagtgtaagtgcgtgtgctggggcgagcgggagcgggcgaggatgggcacaggatagaggcagagccacccacgccgccgcggccccacgctgggcgacagagcctccagttccccttcaatggtggcgggtcgccggagctctgatcgccgggaacccttgccgctgctgtcctgcgaccccaagcaggtatagacacgtgtggccgtttacgctgtaggatcctcattcccactggctttgaacattttggggacttacaatgccgccacccgcggacatcgtcaaggtggccatagaatggccgggcgcctaccccaaactcatggaaattgatcagaaaaaaccactgtctgcaataataaaggaagtctgtgatgggtggtctcttgccaaccatgaatattttgcactccagcatgccgatagttcaaacttctatatcacagaaaagaaccgcaatgagataaaaaatggcactatccttcgattaaccacatctccagctcagaacgcccagcagctccatgaacgaatccagtcctcgagtatggatgccaagctggaagccctgaaggacttggccagcctctcccgggatgtcacgtttgcccaggagtttataaacctggacggtatctctctcctcacgcagatggtggagagcggcactgagcgataccagaaattgcagaagatcatgaagccttgctttggagacatgctgtccttcaccctgacggccttcgttgagctgatggaccatggcatagtgtcctgggatacattttcggtggcgttcattaagaagatagcaagttttgtgaacaagtcagccatagacatctcgatcctgcagcggtccttggccattttggagtcgatggtgctcaatagccatgacctctaccagaaagtggcgcaggagatcaccatcggccagctcattccacacctgcaagggtcagatcaagaaatccaaacctatactattgcagtgattaatgcgcttttcctgaaggctcctgatgagaggaggcaggagatggcgaatattttggctcagaagcaactgcgttccatcattttaacacatgtcatccgagcccagcgggccatcaacaatgagatggcgcaccagctgtatgttctacaagtgctcacctttaacctcctggaagacaggatgatgaccaaaatggacccccaggaccaggctcagagggacatcatatttgaacttcgaagaattgcttttgatgctgagtctgaacctaacaacagcagtggcagcatggagaaacgcaagtccatgtacacgcgagattataagaagcttgggttcattaatcatgtcaaccctgccatggacttcacgcagactccacctgggatgttggctctggacaacatgctgtactttgccaagcaccaccaagatgcctacatccggattgtgcttgagaacagtagtcgagaagacaagcatgaatgtccctttggccgcagtagtatagagctgaccaagatgctatgtgagatcttgaaagtgggcgagttgcctagtgagacctgcaacgacttccacccgatgttcttcacccacgacagatcctttgaggagtttttctgcatctgtatccagctcctgaacaagacatggaaggaaatgagggcaacttctgaagacttcaacaaggtaatgcaggtggtgaaggagcaggttatgagagcacttacaaccaagcctagctccctggaccagttcaagagcaaactgcagaacctgagctacactgagatcctgaaaatccgccagtccgagaggatgaaccaggaagatttccagtcccgcccgattttggaactaaaggagaagattcagccagaaatcttagagctgatcaaacagcaacgcctgaaccgccttgtggaagggacctgctttaggaaactcaatgcccggcggaggcaagacaagttttggtattgtcggctttcgccaaatcacaaagtcctgcattacggagacttagaagagagtcctcagggagaagtgccccacgattccttgcaggacaaactgccggtggcagatatcaaagccgtggtgacgggaaaggactgccctcatatgaaagagaaaggtgcccttaaacaaaacaaggaggtgcttgaactcgctttctccatcttgtatgactcaaactgccaactgaacttcatcgctcctgacaagcatgagtactgtatctggacggatggactgaatgcgctactcgggaaggacatgatgagcgacctgacgcggaatgacctggacaccctgctcagcatggaaatcaagctccgcctcctggacctggaaaacatccagatccctgacgcacctccgccgattcccaaggagcccagcaactatgacttcgtctatgactgtaactgaagtggccgggcccagacatgccccttccaaaactggaacacctagctaacaggagagaggaatgaaaacacacccacgccttggaaccgtcctttggtaaagggaagctgtgggtccacattcccttcagcatcacctctagccctggcaactttcagcccctagctggcatcttgctcaccgccctgattctgttcctcggctccactgcttcaggtcacttcccatggctgcagtccactggtgggacaagagcaaagcccactgccagtaagaaggccaaagggcccttccatcctagccctctgcaggcatgcccttccttcccttgggcaggaaagccagcagccccagactgcccaaaaacttgcccaccagaccaagggcagtgccccaaggcccctgtctggaggaaatggcctagctatttgatgagaagaccaaaccccacatcctcctttcccctctctctagaatcatctcgcaccaccagttacacttgaattaagatctgcgctcaaatctcctcccacctctctccctgcttttgccttgctctgttcctctttggtcccaagagcagcagccgcagcctcctcgtgatcctccctagcataaatttcccaaacagtccacaggtcccatgcccactttgcgtctgcactgtgatcgtgacaaatcttccctcctcaccagctagtctggggtttcctctccctgccccaggccagaactgccttcttcatttccacccacgctcccagcctcttagctgaaagcacaaatggtgaaatcagtagtctcgctccatctctaatagactaaacctaaatgcctctaggacggactgttgctatccaagcgtttggtgttaccttctcctgggaggtcctgctgcaactcaagttccacaggatggtcaagctgtcagacatccaagtttacatcattgtaattattactggtatttacaatttgcaagagttttgggttagtttttttttttttttttgctttgtttttgtacaaaagagtctaacattttttgccaaacagatatatatttaatgaaaagaagagatacataaatgtgtgaatttccagtttttttttaattattttaatcccaaacatcttcctgaaaataacattcccttaaacatgctgtggaataaaatggattgtgatga

SEQ ID NO: 269987 - DNA, 2485 bp, Artificial Sequence
  derived and/or modified sequence
atgtccgaacatcagaaggaacaaactctggacacaccatctttaagaactgtaacactcactgtgagggtccatggcttcattcttgaagtcagcaagaccaagaacccaccaattccagacacattttggccacccagatgggaccatcgcccatcgccaggcggtgagactaatgcctattgccaaatgaatcatgtcaaccctgccatggacttcacgcagactccacctgggatgttggctctggacaacatgctgtactttgccaagcaccaccaagatgcctacatccggattgtgcttgagaacagtagtcgagaagacaagcatgaatgtccctttggccgcagtagtatagagctgaccaagatgctatgtgagatcttgaaagtgggcgagttgcctagtgagacctgcaacgacttccacccgatgttcttcacccacgacagatcctttgaggagtttttctgcatctgtatccagctcctgaacaagacatggaaggaaatgagggcaacttctgaagacttcaacaaggtaatgcaggtggtgaaggagcaggttatgagagcacttacaaccaagcctagctccctggaccagttcaagagcaaactgcagaacctgagctacactgagatcctgaaaatccgccagtccgagaggatgaaccaggaagatttccagtcccgcccgattttggaactaaaggagaagattcagccagaaatcttagagctgatcaaacagcaacgcctgaaccgccttgtggaagggacctgctttaggaaactcaatgcccggcggaggcaagacaagttttggtattgtcggctttcgccaaatcacaaagtcctgcattacggagacttagaagagagtcctcagggagaagtgccccacgattccttgcaggacaaactgccggtggcagatatcaaagccgtggtgacgggaaaggactgccctcatatgaaagagaaaggtgcccttaaacaaaacaaggaggtgcttgaactcgctttctccatcttgtatgactcaaactgccaactgaacttcatcgctcctgacaagcatgagtactgtatctggacggatggactgaatgcgctactcgggaaggacatgatgagcgacctgacgcggaatgacctggacaccctgctcagcatggaaatcaagctccgcctcctggacctggaaaacatccagatccctgacgcacctccgccgattcccaaggagcccagcaactatgacttcgtctatgactgtaactgaagtggccgggcccagacatgccccttccaaaactggaacacctagctaacaggagagaggaatgaaaacacacccacgccttggaaccgtcctttggtaaagggaagctgtgggtccacattcccttcagcatcacctctagccctggcaactttcagcccctagctggcatcttgctcaccgccctgattctgttcctcggctccactgcttcaggtcacttcccatggctgcagtccactggtgggacaagagcaaagcccactgccagtaagaaggccaaagggcccttccatcctagccctctgcaggcatgcccttccttcccttgggcaggaaagccagcagccccagactgcccaaaaacttgcccaccagaccaagggcagtgccccaaggcccctgtctggaggaaatggcctagctatttgatgagaagaccaaaccccacatcctcctttcccctctctctagaatcatctcgcaccaccagttacacttgaattaagatctgcgctcaaatctcctcccacctctctccctgcttttgccttgctctgttcctctttggtcccaagagcagcagccgcagcctcctcgtgatcctccctagcataaatttcccaaacagtccacaggtcccatgcccactttgcgtctgcactgtgatcgtgacaaatcttccctcctcaccagctagtctggggtttcctctccctgccccaggccagaactgccttcttcatttccacccacgctcccagcctcttagctgaaagcacaaatggtgaaatcagtagtctcgctccatctctaatagactaaacctaaatgcctctaggacggactgttgctatccaagcgtttggtgttaccttctcctgggaggtcctgctgcaactcaagttccacaggatggtcaagctgtcagacatccaagtttacatcattgtaattattactggtatttacaatttgcaagagttttgggttagtttttttttttttttttgctttgtttttgtacaaaagagtctaacattttttgccaaacagatatatatttaatgaaaagaagagatacataaatgtgtgaatttccagtttttttttaattattttaatcccaaacatcttcctgaaaataacattcccttaaacatgctgtggaataaaatggattgtgatgatttgg

SEQ ID NO: 269988 - DNA, 2948 bp, Artificial Sequence
  derived and/or modified sequence
aatacaaagcatgcttgtgagacagaattcctccttagacatgccggtcaacttacagaagagaaccgcaatgagataaaaaatggcactatccttcgattaaccacatctccagctcagaacgcccagcagctccatgaacgaatccagtcctcgagtatggatgccaagctggaagccctgaaggacttggccagcctctcccgggatgtcacgtttgcccaggagtttataaacctggacggtatctctctcctcacgcagatggtggagagcggcactgagcgataccagaaattgcagaagatcatgaagccttgctttggagacatgctgtccttcaccctgacggccttcgttgagctgatggaccatggcatagtgtcctgggatacattttcggtggcgttcattaagaagatagcaagttttgtgaacaagtcagccatagacatctcgatcctgcagcggtccttggccattttggagtcgatggtgctcaatagccatgacctctaccagaaagtggcgcaggagatcaccatcggccagctcattccacacctgcaagggtcagatcaagaaatccaaacctatactattgcagtgattaatgcgcttttcctgaaggctcctgatgagaggaggcaggagatggcgaatattttggctcagaagcaactgcgttccatcattttaacacatgtcatccgagcccagcgggccatcaacaatgagatggcgcaccagctgtatgttctacaagtgctcacctttaacctcctggaagacaggatgatgaccaaaatggacccccaggaccaggctcagagggacatcatatttgaacttcgaagaattgcttttgatgctgagtctgaacctaacaacagcagtggcagcatggagaaacgcaagtccatgtacacgcgagattataagaagcttgggttcattaatcatgtcaaccctgccatggacttcacgcagactccacctgggatgttggctctggacaacatgctgtactttgccaagcaccaccaagatgcctacatccggattgtgcttgagaacagtagtcgagaagacaagcatgaatgtccctttggccgcagtagtatagagctgaccaagatgctatgtgagatcttgaaagtgggcgagttgcctagtgagacctgcaacgacttccacccgatgttcttcacccacgacagatcctttgaggagtttttctgcatctgtatccagctcctgaacaagacatggaaggaaatgagggcaacttctgaagacttcaacaaggtaatgcaggtggtgaaggagcaggttatgagagcacttacaaccaagcctagctccctggaccagttcaagagcaaactgcagaacctgagctacactgagatcctgaaaatccgccagtccgagaggatgaaccaggaagatttccagtcccgcccgattttggaactaaaggagaagattcagccagaaatcttagagctgatcaaacagcaacgcctgaaccgccttgtggaagggacctgctttaggaaactcaatgcccggcggaggcaagacaagttttggtattgtcggctttcgccaaatcacaaagtcctgcattacggagacttagaagagagtcctcagggagaagtgccccacgattccttgcaggacaaactgccggtggcagatatcaaagccgtggtgacgggaaaggactgccctcatatgaaagagaaaggtgcccttaaacaaaacaaggaggtgcttgaactcgctttctccatcttgtatgactcaaactgccaactgaacttcatcgctcctgacaagcatgagtactgtatctggacggatggactgaatgcgctactcgggaaggacatgatgagcgacctgacgcggaatgacctggacaccctgctcagcatggaaatcaagctccgcctcctggacctggaaaacatccagatccctgacgcacctccgccgattcccaaggagcccagcaactatgacttcgtctatgactgtaactgaagtggccgggcccagacatgcccttccttcccttgggcaggaaagccagcagccccagactgcccaaaaacttgcccaccagaccaagggcagtgccccaaggcccctgtctggaggaaatggcctagctatttgatgagaagaccaaaccccacatcctcctttcccctctctctagaatcatctcgcaccaccagttacacttgaattaagatctgcgctcaaatctcctcccacctctctccctgcttttgccttgctctgttcctctttggtcccaagagcagcagccgcagcctcctcgtgatcctccctagcataaatttcccaaacagtccacaggtcccatgcccactttgcgtctgcactgtgatcgtgacaaatcttccctcctcaccagctagtctggggtttcctctccctgccccaggccagaactgccttcttcatttccacccacgctcccagcctcttagctgaaagcacaaatggtgaaatcagtagtctcgctccatctctaatagactaaacctaaatgcctctaggacggactgttgctatccaagcgtttggtgttaccttctcctgggaggtcctgctgcaactcaagttccacaggatggtcaagctgtcagacatccaagtttacatcattgtaattattactggtatttacaatttgcaagagttttgggttagtttttttttttttttttgctttgtttttgtacaaaagagtctaacattttttgccaaacagatatatatttaatgaaaagaagagatacataaatgtgtgaatttccagtttttttttaattattttaatcccaaacatcttcctgaaaataacattcccttaaacatgctgtggaataaaatggattgtgatg

SEQ ID NO: 269989 - DNA, 3154 bp, Artificial Sequence
  derived and/or modified sequence
ataaacgcaggtcacctgagccagtagcagcaacctgggtccccttccacgctgtggaatctttgtttttttttcactgctcgcaataaatcttgctgctgcttattatttgggtccgtgttacctttatgagctgtagcactcaccgcgaaggtttgcagcttcgctattcactcttgaagccagcgagaccacgaacccaccgggaggaagaaacaactccggacgcgccacctttaagagctgtaacactaacggtgaaagtctgcggtatcactcctgaagtcagggagaccacgaaccccccagaagaaactccggacgcatctgaacatctgaaggaacaaactctggacacaccatctttaagaactgaaacaccgcgacagttcgctgcttcattcttaaaggcagtgagaccgagaacgcaccaattctggacacaaaaggaccttagcaggctcaggaaatggcaagccatttatgaagagggaagagatagcaaacgttggtctcaagttctctagttctttacccagaccatagctggctgggggatgatcctgatttagtctggggggttcctttacgcattgccaccagcaggtgccgcaaatggaccattggcagtcttaaggtatagacacgtgtggccgtttacgctgtaggatcctcattcccactggctttgaacattttggggacttacaatgccgccacccgcggacatcgtcaaggtggccatagaatggccgggcgcctaccccaaactcatggaaattgatcagaaaaaaccactgtctgcaataataaaggaagtctgtgatgggtggtctcttgccaaccatgaatattttgcactccagcatgccgatagttcaaacttctatatcacagaaaagaaccgcaatgagataaaaaatggcactatccttcgattaaccacatctccagctcagaacgcccagcagctccatgaacgaatccagtcctcgagtatggatgccaagctggaagccctgaaggacttggccagcctctcccgggatgtcacgtttgcccaggagtttataaacctggacggtatctctctcctcacgcagatggtggagagcggcactgagcgataccagaaattgcagaagatcatgaagccttgctttggagacatgctgtccttcaccctgacggccttcgttgagctgatggaccatggcatagtgtcctgggatacattttcggtggcgttcattaagaagatagcaagttttgtgaacaagtcagccatagacatctcgatcctgcagcggtccttggccattttggagtcgatggtgctcaatagccatgacctctaccagaaagtggcgcaggagatcaccatcggccagctcattccacacctgcaagggtcagatcaagaaatccaaacctatactattgcagtgattaatgcgcttttcctgaaggctcctgatgagaggaggcaggagatggcgaatattttggctcagaagcaactgcgttccatcattttaacacatgtcatccgagcccagcgggccatcaacaatgagatggcgcaccagctgtatgttctacaagtgctcacctttaacctcctggaagacaggatgatgaccaaaatggacccccaggaccaggctcagagggacatcatatttgaacttcgaagaattgcttttgatgctgagtctgaacctaacaacagcagtggcagcatggagaaacgcaagtccatgtacacgcgagattataagaagcttgggttcattaatcatgtcaaccctgccatggacttcacgcagactccacctgggatgttggctctggacaacatgctgtactttgccaagcaccaccaagatgcctacatccggattgtgcttgagaacagtagtcgagaagacaagcatgaatgtccctttggccgcagtagtatagagctgaccaagatgctatgtgagatcttgaaagtgggcgagttgcctagtgagacctgcaacgacttccacccgatgttcttcacccacgacagatcctttgaggagtttttctgcatctgtatccagctcctgaacaagacatggaaggaaatgagggcaacttctgaagacttcaacaaggtaatgcaggtggtgaaggagcaggttatgagagcacttacaaccaagcctagctccctggaccagttcaagagcaaactgcagaacctgagctacactgagatcctgaaaatccgccagtccgagaggatgaaccaggaagatttccagtcccgcccgattttggaactaaaggagaagattcagccagaaatcttagagctgatcaaacagcaacgcctgaaccgccttgtggaagggacctgctttaggaaactcaatgcccggcggaggcaagacaagttttggtattgtcggctttcgccaaatcacaaagtcctgcattacggagacttagaagagagtcctcagggagaagtgccccacgattccttgcaggacaaactgccggtggcagatatcaaagccgtggtgacgggaaaggactgccctcatatgaaagagaaaggtgcccttaaacaaaacaaggaggtgcttgaactcgctttctccatcttgtatgactcaaactgccaactgaacttcatcgctcctgacaagcatgagtactgtatctggacggatggactgaatgcgctactcgggaaggacatgatgagcgacctgacgcggaatgacctggacaccctgctcagcatggaaatcaagctccgcctcctggacctggaaaacatccagatccctgacgcacctccgccgattcccaaggagcccagcaactatgacttcgtctatgactgtaactgaagtggccgggcccagacatgccccttccaaaactggaacacctagctaacaggagagaggaatgaaaacacacccacgccttggaaccgtcctttggtaaagggaagctgtgggtccacattcccttcagcatcacctctagccctggcaactttcagcccctagctggcatcttgctcaccgccctgattctgttcctcggctccactgcttcaggtcacttcccatggctgcagtccactggtgggacaagagcaaag

SEQ ID NO: 269990 - DNA, 2621 bp, Artificial Sequence
  derived and/or modified sequence
gagctcatcgaagtcatgctctgcacacatattatttatagcagatctgaggcatgcatggtgtttgacatttctgtcttttaagtagggggacttcaaaaagtcgtgggcatccccctaggcaaagtgcagtgggcagggaccaggcagggtgcgggcgcaaggcgaacgcgcagaccacgagtgtcctggcgcaggtgccgggggcggcggctgcaactccgcagcgtccgctcgggaggagagttcgcggctgatctccggatgccttgcagatgcaaaatgtgtctctggccagcaggaggaaggaagaggaagtgagagcagcggcagccggcggtgcagcagccggccgacccagagtgtatagacacgtgtggccgtttacgctgtaggatcctcattcccactggctttgaacattttggggacttacaatgccgccacccgcggacatcgtcaaggtggccatagaatggccgggcgcctaccccaaactcatggaaattgatcagaaaaaaccactgtctgcaataataaaggaagtctgtgatgggtggtctcttgccaaccatgaatattttgcactccagcatgccgatagttcaaacttctatatcacagaaaagaaccgcaatgagataaaaaatggcactatccttcgattaaccacatctccagctcagaacgcccagcagctccatgaacgaatccagtcctcgagtatggatgccaagctggaagccctgaaggacttggccagcctctcccgggatgtcacgtttgcccaggagtttataaacctggacggtatctctctcctcacgcagatggtggagagcggcactgagcgataccagaaattgcagaagatcatgaagccttgctttggagacatgctgtccttcaccctgacggccttcgttgagctgatggaccatggcatagtgtcctgggatacattttcggtggcgttcattaagaagatagcaagttttgtgaacaagtcagccatagacatctcgatcctgcagcggtccttggccattttggagtcgatggtgctcaatagccatgacctctaccagaaagtggcgcaggagatcaccatcggccagctcattccacacctgcaagggtcagatcaagaaatccaaacctatactattgcagtgattaatgcgcttttcctgaaggctcctgatgagaggaggcaggagatggcgaatattttggctcagaagcaactgcgttccatcattttaacacatgtcatccgagcccagcgggccatcaacaatgagatggcgcaccagctgtatgttctacaagtgctcacctttaacctcctggaagacaggatgatgaccaaaatggacccccaggaccaggctcagagggacatcatatttgaacttcgaagaattgcttttgatgctgagtctgaacctaacaacagcagtggcagcatggagaaacgcaagtccatgtacacgcgagattataagaagcttgggttcattaatcatgtcaaccctgccatggacttcacgcagactccacctgggatgttggctctggacaacatgctgtactttgccaagcaccaccaagatgcctacatccggattgtgcttgagaacagtagtcgagaagacaagcatgaatgtccctttggccgcagtagtatagagctgaccaagatgctatgtgagatcttgaaagtgggcgagttgcctagtgagacctgcaacgacttccacccgatgttcttcacccacgacagatcctttgaggagtttttctgcatctgtatccagctcctgaacaagacatggaaggaaatgagggcaacttctgaagacttcaacaaggtaatgcaggtggtgaaggagcaggttatgagagcacttacaaccaagcctagctccctggaccagttcaagagcaaactgcagaacctgagctacactgagatcctgaaaatccgccagtccgagaggatgaaccaggaagatttccagtcccgcccgattttggaactaaaggagaagattcagccagaaatcttagagctgatcaaacagcaacgcctgaaccgccttgtggaagggacctgctttaggaaactcaatgcccggcggaggcaagacaagttttggtattgtcggctttcgccaaatcacaaagtcctgcattacggagacttagaagagagtcctcagggagaagtgccccacgattccttgcaggacaaactgccggtggcagatatcaaagccgtggtgacgggaaaggactgccctcatatgaaagagaaaggtgcccttaaacaaaacaaggaggtgcttgaactcgctttctccatcttgtatgactcaaactgccaactgaacttcatcgctcctgacaagcatgagtactgtatctggacggatggactgaatgcgctactcgggaaggacatgatgagcgacctgacgcggaatgacctggacaccctgctcagcatggaaatcaagctccgcctcctggacctggaaaacatccagatccctgacgcacctccgccgattcccaaggagcccagcaactatgacttcgtctatgactgtaactga

SEQ ID NO: 269991 - DNA, 321 bp, Artificial Sequence
  derived and/or modified sequence
atgcccgacgcccagttccacagaatcatggccagcgagaagctgagcttcatcagagtgcaggagaacgagtacagcctgaacagcgtgagagccagcggcttccagagagtgctgaacctgctggagagcagcctgctgtggctgtacctgcccaccaccgagaacctgctgtgcagcagccccagactgagcggcgaccccaccggctacgccgacccccccccccagaaccacagaagaagacagagcagaagcacccccagactgcccggccccggccagctgctgagcagcagaaccagaaccctggagggctag

SEQ ID NO: 269992 - DNA, 321 bp, Artificial Sequence
  derived and/or modified sequence
atgcccgacgcccagttccaccggatcatggccagcgagaagctgtcttttattcgggtacaggaaaacgaatatagtctgaacagcgtccgcgcctccggctttcagagagtgctgaacctcctggaatctagtctgttgtggttgtacctgccaactaccgaaaacctgctttgctcctctcctcgcctgagtggtgatcccacaggctacgccgatcctcctccccagaaccataggaggaggcagagccgatctaccccacgcttacctgggccgggccagctattgtcttccaggaccaggaccctcgaaggttag

SEQ ID NO: 269993 - DNA, 321 bp, Artificial Sequence
  derived and/or modified sequence
atgcccgacgctcagtttcacaggattatggccagtgagaagctctcctttattcgtgtccaagagaatgagtactccttaaacagtgtcagagctagtggctttcaacgggttctgaacttactggaaagttctctcctttggctgtacctgcccaccacggaaaatctgttatgctcgtctcccaggctgtccggggatcctaccggctacgctgatcccccaccacagaaccaccggcgtcgacagtcaaggagcacgcccagactgcccggacccggacagctgctgtcctcccgcactcggaccttggagggctag

SEQ ID NO: 269994 - protein, 665 aa, Artificial Sequence
  derived and/or modified sequence
MSEQSCQMSELRLLLLGKCRSGKSATGNAILGKHVFKSKFSDQTVIKMCQRESWVLRERKVVVIDTPDLFSSIACAEDKQRNIQHCLELSAPSLHALLLVIAIGHFTREDEETAKGIQQVFGAEARRHIIIVFTRKDDLGDDLLQDFIEKNKPLKQLVQDYEGRYCIFNNKTNSKDEQITQVLELLRKVESLVNTNGGPYHVNFKTEGSRFQDCVNEAASQEGDKPQGPRERQLQSTGPEQNPGTSELTVLLVGKRGAGKSAAGNSILGRQAFQTGFSEQSVTQSFLSESRSWRKKKVSIIDAPDISSLKNIDSEVRKHICTGPHAFLLVTPLGFYTKNDEAVLSTIQNNFGEKFFEYMIILLTRKEDLGDQDLDTFLRNSNKALYGLIQKCKNRYSAFNYRATGEEEQRQADELLEKIESMVHQNGNKHCVFREKETLNIVLVGRSGTGKSATGNSILGSLVFTSRLRAQPVTKTSQSGRRTWDGQEVVVVDTPSFNQMLDVEKDPSRLEEEVKRCLSCCEKGDTFFVLVFQLGRFTEEDKTAVAKLEAIFGADFTKYAIMLFTRKEDLGAGNLEDFMKNSDNKALRRIFKKCGRRVCAFNNKETGQAQETQVKALLTKVNDLRKESGWSGYPHTQENVSKLIKNVQEMSQAEKLLKNLIGILQ

SEQ ID NO: 269995 - DNA, 1998 bp, Artificial Sequence
  derived and/or modified sequence
atgagcgagcagagctgccagatgagcgagctgagactgctgctgctgggcaagtgcagaagcggcaagagcgccaccggcaacgccatcctgggcaagcacgtgttcaagagcaagttcagcgaccagaccgtgatcaagatgtgccagagagagagctgggtgctgagagagagaaaggtggtggtgatcgacacccccgacctgttcagcagcatcgcctgcgccgaggacaagcagagaaacatccagcactgcctggagctgagcgcccccagcctgcacgccctgctgctggtgatcgccatcggccacttcaccagagaggacgaggagaccgccaagggcatccagcaggtgttcggcgccgaggccagaagacacatcatcatcgtgttcaccagaaaggacgacctgggcgacgacctgctgcaggacttcatcgagaagaacaagcccctgaagcagctggtgcaggactacgagggcagatactgcatcttcaacaacaagaccaacagcaaggacgagcagatcacccaggtgctggagctgctgagaaaggtggagagcctggtgaacaccaacggcggcccctaccacgtgaacttcaagaccgagggcagcagattccaggactgcgtgaacgaggccgccagccaggagggcgacaagccccagggccccagagagagacagctgcagagcaccggccccgagcagaaccccggcaccagcgagctgaccgtgctgctggtgggcaagagaggcgccggcaagagcgccgccggcaacagcatcctgggcagacaggccttccagaccggcttcagcgagcagagcgtgacccagagcttcctgagcgagagcagaagctggagaaagaagaaggtgagcatcatcgacgcccccgacatcagcagcctgaagaacatcgacagcgaggtgagaaagcacatctgcaccggcccccacgccttcctgctggtgacccccctgggcttctacaccaagaacgacgaggccgtgctgagcaccatccagaacaacttcggcgagaagttcttcgagtacatgatcatcctgctgaccagaaaggaggacctgggcgaccaggacctggacaccttcctgagaaacagcaacaaggccctgtacggcctgatccagaagtgcaagaacagatacagcgccttcaactacagagccaccggcgaggaggagcagagacaggccgacgagctgctggagaagatcgagagcatggtgcaccagaacggcaacaagcactgcgtgttcagagagaaggagaccctgaacatcgtgctggtgggcagaagcggcaccggcaagagcgccaccggcaacagcatcctgggcagcctggtgttcaccagcagactgagagcccagcccgtgaccaagaccagccagagcggcagaagaacctgggacggccaggaggtggtggtggtggacacccccagcttcaaccagatgctggacgtggagaaggaccccagcagactggaggaggaggtgaagagatgcctgagctgctgcgagaagggcgacaccttcttcgtgctggtgttccagctgggcagattcaccgaggaggacaagaccgccgtggccaagctggaggccatcttcggcgccgacttcaccaagtacgccatcatgctgttcaccagaaaggaggacctgggcgccggcaacctggaggacttcatgaagaacagcgacaacaaggccctgagaagaatcttcaagaagtgcggcagaagagtgtgcgccttcaacaacaaggagaccggccaggcccaggagacccaggtgaaggccctgctgaccaaggtgaacgacctgagaaaggagagcggctggagcggctacccccacacccaggagaacgtgagcaagctgatcaagaacgtgcaggagatgagccaggccgagaagctgctgaagaacctgatcggcatcctgcagtag

SEQ ID NO: 269996 - DNA, 1998 bp, Artificial Sequence
  derived and/or modified sequence
atgagcgaacagtcttgtcaaatgtccgaactcaggctgttgctgttgggtaagtgtcgctccgggaaatctgccacaggcaatgccatcctcggcaaacacgtttttaaatcaaaattctctgatcagacggtgataaaaatgtgtcaaagagaatcttgggttcttcgcgaacgtaaggtggtggtgatcgacacgcctgatttgttcagtagcatcgcttgcgccgaagataagcaaagaaacatacagcattgcttagagctatctgccccctcccttcatgccctcctgttagttattgccattgggcatttcacaagggaggatgaagaaacggccaagggtattcagcaagttttcggcgccgaagcacgccgccacatcattattgtgtttactagaaaagacgacctcggtgacgacttgttacaagatttcatcgagaagaataagcctttgaaacaactcgttcaggactatgagggcaggtactgcatcttcaataataaaacgaattctaaggacgaacagatcacgcaggtcttggagctcctgaggaaggtagaatcgctcgtgaataccaatggtggcccgtaccatgtgaacttcaaaacggaaggaagcagattccaagactgcgtgaacgaggccgcgagccaggagggagataaaccccagggcccccgcgaacgccagttacagtccacggggccagagcagaatcccggtaccagtgaacttaccgtgcttttagtgggtaaaaggggtgccggcaagtctgcggccggtaactcgatcctcggcagacaggccttccagaccgggttttcagaacagtcagtgacgcagagttttctgtccgagtcacggagttggaggaaaaagaaagtctctatcattgatgctcccgacatttcaagcctcaaaaatatagatagtgaagtcaggaagcacatttgtacagggcctcacgccttcttgctggtgactccccttggcttttacactaagaacgacgaagccgtcttgtctacaatccagaacaattttggagagaagttctttgaatatatgatcattctgttgacccggaaagaagaccttggtgatcaggatctggacacattccttcggaacagtaacaaagccctttacggtttaattcagaaatgcaaaaatcgctattctgcgttcaattatcgagcaaccggagaggaggagcaaaggcaggctgacgaacttttagagaaaatcgagagcatggtgcatcagaacggtaacaaacactgtgtctttagggagaaagaaacccttaatatcgtccttgtgggtcgttctggtacgggcaagtctgcaaccggcaactcaattctcggaagcctagtgttcacatctcgcctgcgagctcagcctgtgaccaagacctcacaatcaggacgaagaacatgggatggccaggaagttgttgtcgtcgacacccccagttttaaccaaatgctggacgtcgagaaggacccaagtcgtctggaagaggaagtgaagagatgtctatcctgctgtgaaaagggcgacacattctttgtgcttgtttttcagctgggaaggtttactgaagaagacaagacagcagtcgcgaagctggaggcgatctttggtgctgattttacaaaatacgcaatcatgctgtttacacgaaaggaggacctgggggccggcaacttagaggacttcatgaaaaacagcgataacaaggcccttcgcagaatcttcaaaaagtgcggaagaagggtttgtgccttcaataacaaagagaccggccaggcccaggaaactcaggtgaaagctctgctgacgaaggtgaacgatttgaggaaagagtcgggatggtccggctacccccacactcaggagaatgtgagcaaactcatcaagaatgtacaagaaatgagtcaggcagagaaattactgaagaacttaatcggaattctgcagtag

SEQ ID NO: 269997 - DNA, 4184 bp, Artificial Sequence
  derived and/or modified sequence
ggctttgctcagagcttgtagcggcgccacaatctctgtcctctcaggaacaggaactggcttgacgtccttttcctgccctatccaagcccctgttcttgcagcccttctgaagctcagcctggcaccggccccggcgccccagcccctggccaagcctctgctgtcatttctcctccctcctctcagtctgcagctgcgggacgggccgggctcctcagtttctgctgtgttgtgaccccacgaggcgctcagcacccagggaaggcgcgtgtgtccccgatgctggctcctccctgagccccgacggctctcgaggttctgagcctgtggcctgcacagggaacttcctctccgactgcatttatgcctctgtggatgtgaaggctatttctagaaatctcttcctttgcagaaacacccgaaaccctcctgccaggaagaccagggcctgggaagagggtcgctctccggccattctcccctcaccctcctcaccttcctcacatcctgtgccctgggggaccagcagctgcttccacccagaacaagcgggagcctgtgtcaggaaagcatgtcagagcagagctgccagatgtccgaactgcggctcctcctcctgggaaaatgccgctcgggaaaaagtgccacaggaaatgccattctgggcaaacatgtgttcaagtccaagttcagtgatcagacagtgatcaaaatgtgccagagagagagttgggtcctgagagaaaggaaggttgtggtaattgacacccctgaccttttctcctcaatagcttgtgctgaagacaagcaacgcaacatccaacactgcttggagctctctgctcccagcctccatgctctgctcttggtaattgccatcggccatttcacaagggaggatgaggaaacagccaagggcatccaacaagtgtttggagctgaagccaggaggcacatcattattgtcttcactcggaaggatgatttgggggatgacttgctgcaagatttcattgaaaaaaacaaacctctcaagcagttggttcaagactatgagggccgatactgcattttcaacaacaagaccaatagtaaggatgagcagatcacccaggtgttggagctccttcgcaaggttgagtctttggtgaatacgaacggaggaccctatcatgtgaacttcaaaactgaaggcagcaggtttcaagattgtgtgaatgaagctgcatctcaagagggagacaagccacagggcccaagggaaaggcagctgcagtccacaggacccgagcagaatccggggacatcagaactgacagtcctccttgtggggaaacgcggtgctggaaaaagtgcagcaggaaacagcattctggggaggcaggcctttcagaccggatttagtgagcagtcagtaacccagagcttcttgtctgagagcagaagctggagaaaaaagaaagtttcgatcattgatgctccggacatctcatctttaaagaacattgactcagaagttagaaaacacatctgtacaggcccccatgccttcctgctggtgacaccactgggcttttacactaagaatgatgaggcagtgctgagcaccatccaaaacaattttggagaaaaattctttgagtacatgatcatacttcttaccaggaaagaagatttaggggatcaggatctagatacgttcttaagaaacagcaataaagctctctatggtctcatccagaagtgtaaaaacagatatagtgccttcaactaccgggcaacaggagaagaagagcaaaggcaggcggacgagctcctggaaaaaattgagagcatggtgcatcagaatgggaacaagcattgtgttttcagagaaaaagaaaccctgaacattgtccttgtggggagaagcgggactgggaagagtgcgaccgggaactctatcctggggagcctcgtcttcacctctcggctccgggcccagccagtcaccaagaccagccagagtggcaggaggacatgggacggacaggaggtggtggttgtggacactccttccttcaaccagatgctggatgtcgaaaaggacccatcccggttagaagaggaggtcaagcgctgtttgtcctgctgtgaaaaaggggacacattttttgtcctggtgttccagctgggacgattcactgaagaggacaaaacagctgtggcgaaactggaggccatctttggagcagactttacgaaatacgcgattatgctgttcacccggaaggaagacctaggggcggggaatttggaagacttcatgaagaactcagataacaaagcccttcggcgcatttttaaaaagtgtgggcggcgagtttgtgcttttaacaacaaagaaacaggccaggcccaggaaacccaggtgaaagctcttttaacaaaggtcaatgatctgagaaaagaaagtgggtggtccgggtatccccatacacaggagaacgtcagcaaactaattaaaaatgtccaggaaatgtcccaagccgaaaaactccttaaaaatttaataggtattttacaataggtagccgaagtgcctggggtctcttcaattagagacaccctcaggttggggggaggggcggggcatggtacaacctgtgggaagggaagcgggttcatggctttgagggcctgagaggcaaatgcatcccgccttgtgatgtatcagctatttgtagataaataaattgcaggtgggggcgaatagtagggtattataaaggagaaagaagatacaaggtggggaaatctggaaaaagatttcagacattaggctgataataagtggtagaatcaagtcacaagaatcacctcacttgtgtaggtaggttggaatcaggatagacactgtgatcaaggctgaggccacctgggatgagaatatagatagtcgtacaacaacccaggggatccagatacatgagaccagggcagcgttcagcacactcctgggcatggcggaagcaggaagcagactccagagggcctccctgttgtccagggccgttggctccctgagctctcctgtctcctttgggatgcgacttagggctagagtgttcttttcttcacacgttagccattccttacggctcttcacgttccacgcctagatgtgaagtgggacatagtcttccattgctggctgtccctgaggaaacagacatgagtcttggaggttctgaatgattttattgctaattatcacagtgacatagactagaacagaaattagaagcatagtaagattgccaaaatcagagaatcttgcaaagttctgtaattctaagtgttgttctagatttcctctagagaaggttattagaatctccattgcgtttctctttctccttctctttcccttgaggttaggaaacaggttaaaactcagagaactccaataataatggtttaaaaacatcaggggcttcctgtatctcctgtcaggaagccgaggaataagcaggctggggctggtgggcgtcaacatcccagttttgttctatctttctgtcccacctgcactgggatgtggcttctacactcgaatttgcttcttggtttcaagacagtggtgttctttccatagctgagcagattattttgagaggtgggtgatatgtgagagagaaatctggaaccttcttctgggtagatacaggataagatagatacagggtaaaatgttgagcactttgtacatgctttgagagcataatctttgtcatctgtttttttcccctagacaatatcaggttaccgtcaacattaatccatttaaaaggacatggactgttgccattaatacttttggattccatataacccttaacacaataacttctagaaaatgtgtgtgccgtagacacaaagaagggaacaatagacaccagggtatacttgagggtggagggtggcaggagggtgaagattgaaaagctgcctattgcgtgttatgctggtttcctgggtgacaaaattacctgtacaccacacccctgtgacacacaacttactcatgtaacaaacctgtgcatgtaccccttgaacctgaaataaaaattggaaagtaaaaaaaagtgtgtaaatatatttagttgaatcaaataataaagatgaatcattatgaattc

SEQ ID NO: 269998 - DNA, 1998 bp, Artificial Sequence
  derived and/or modified sequence
atgtctgagcagagctgccagatgtctgagctgcggctgctgctgctgggcaagtgccgcagcggcaagagcgccactggaaatgccatcctgggcaagcacgtgttcaagagcaagttcagtgaccagaccgtcatcaagatgtgccagcgggagagctgggtgctgcgggagaggaaggtggtggtgattgacaccccagacctcttcagcagcatcgcctgtgccgaggacaagcagaggaacatccagcactgcctggagctgagcgcccccagcctgcacgccctgctgctggtgattgccatcggccacttcaccagagaagatgaggagacagccaagggcatccagcaggtgtttggagctgaggcccggcggcacatcatcatcgtgttcaccaggaaggatgacctgggagatgacctgctgcaggacttcatcgagaagaacaagcccctgaagcagctggtgcaggactatgagggccgctactgcatcttcaacaacaagaccaacagcaaggatgagcagatcacccaggtgctggagctgctgaggaaggtggagagcctggtgaacaccaacggcggcccctaccacgtgaacttcaagacagagggcagccgcttccaggactgtgtgaatgaggccgccagccaggagggggacaagccccagggcccccgggagcggcagctgcagagcactggacctgagcagaaccctggcaccagcgagctgactgtgctgctggtgggcaagagaggagctgggaagtctgctgctggcaacagcatcctgggccggcaggccttccagacaggcttcagcgagcagagcgtgacccagagcttcctgtctgagagccgctcctggaggaagaagaaggtgtccatcattgatgccccagacatcagcagcctgaagaacatcgacagcgaggtgaggaagcacatctgcaccggcccccacgccttcctgctggtgacccccctgggcttctacaccaagaatgatgaggccgtgctgagcaccatccagaacaactttggagagaagttctttgagtacatgatcatcctgctgaccaggaaagaagacctgggggaccaggacctggacaccttcctgaggaacagcaacaaggccctgtatggcctcatccagaagtgcaagaaccgctacagcgccttcaactaccgggccaccggggaggaggagcagaggcaggctgatgagctgctggagaagattgaatccatggtgcaccagaatggaaacaagcactgtgtgttccgggagaaggagaccctgaacatcgtgctggtgggccgctctggaacaggcaagagcgccaccggcaacagcatcctgggcagcctggtgttcaccagccggctgcgggcccagcctgtgaccaagaccagccagagcggccgccgcacctgggatggccaggaggtggtggtggtggacacccccagcttcaaccagatgctggatgtggagaaggaccccagccggctggaggaggaggtgaagcgctgcctgagctgctgtgagaagggggacaccttctttgtgctggtgttccagctgggccgcttcacagaggaggacaagacagctgtggccaagctggaggccatctttggagctgacttcaccaagtatgccatcatgctgttcaccaggaaggaggacctgggcgccggcaacctggaggacttcatgaagaacagcgacaacaaggccctgcggcgcatcttcaagaagtgtggccggcgggtgtgtgccttcaacaacaaggagaccggccaggcccaggagacccaggtgaaggccctgctgaccaaggtgaatgacctgaggaaggagagcggctggagcggctacccccacacccaggagaatgtgtccaagctgatcaagaatgtgcaggagatgagccaggccgagaagctgctgaagaacctgattggcatcctgcagtag

SEQ ID NO: 269999 - DNA, 1998 bp, Artificial Sequence
  derived and/or modified sequence
atgagcgagcagagctgccagatgagcgagctgcggctgctgctgcttgggaagtgcaggagtggaaagtccgccacagggaatgcaatattaggaaaacatgtgtttaagagtaaattttccgaccaaaccgtcatcaaaatgtgtcaaagagaatcttgggtgctgcgggaacgcaaagtggtggtgatcgacacaccagaccttttctcctcaattgcttgcgccgaggataagcagcgaaacatccagcactgcctggagctgagtgctccatcactccacgcgttgctgctggttatagccattggtcattttactcgtgaagatgaggaaactgcaaaggggatccagcaggtgttcggggcagaagctcgacgccatatcatcatcgtgttcacgaggaaagacgacctcggggatgacttacttcaggattttattgagaagaacaaacccttaaagcagcttgtgcaggactacgagggccgttattgcattttcaacaataaaaccaatagtaaggatgagcagatcactcaggtccttgagttgctgagaaaagtggagtctctggttaatacaaatgggggcccctaccacgtgaacttcaagaccgaagggagtcgcttccaggattgtgtaaatgaagctgccagtcaagagggagacaaaccgcagggaccacgcgagcggcagttgcaatcaaccgggccagagcagaatcctgggacttctgagttgacagtgttgctggtgggcaagcgcggcgcagggaaatccgcagctgggaatagcatcctggggcgacaggcctttcagaccggcttcagcgaacagagtgtcacacagtccttcctcagcgaatcacggagctggcgaaagaaaaaagtgtctattatcgatgcacccgacatctcatctttaaaaaacatcgatagcgaggtccgcaagcacatctgcacaggccctcacgcttttctgctagtaacaccactggggttctacaccaagaatgacgaggctgtcctgtctacaatccaaaacaatttcggcgagaagttttttgaatacatgattattctactgaccaggaaggaggacttgggcgaccaggatctggacaccttcctgcgtaattcaaataaggccctgtacgggttaattcagaagtgcaagaaccgttactcagctttcaactatagagcaactggagaagaggagcaaagacaggcggatgagctcctggagaaaatcgagagcatggttcaccagaatgggaacaaacactgcgttttccgcgagaaggagacgctgaacattgtgttagtggggagatccgggacaggtaagtccgctacagggaacagtatcctcggatccctcgtgtttacatcccgcctgagggcccagcccgtcactaagaccagtcagtctggccgccgaacttgggatgggcaggaagtggtggtcgtcgacactcctagctttaatcaaatgctcgacgtcgaaaaggacccatcccgactcgaagaggaagtaaagcgctgtctctcctgttgcgagaagggcgatactttctttgtcctcgtttttcagctggggcggttcaccgaagaagacaagactgccgttgccaaactagaggctattttcggggccgacttcacgaaatatgctataatgctgttcacccgaaaggaggacctgggtgccggaaacctagaagattttatgaagaactcagacaataaggcccttaggaggatcttcaaaaagtgtgggagaagagtgtgcgcctttaacaataaggagacaggccaggctcaggagacccaggttaaagccctgctaactaaggtgaacgatctgaggaaggagagtggttggtcaggctatcctcatacccaggaaaatgtcagcaaactgataaagaatgttcaagagatgtcgcaagctgaaaagctgttgaagaacctgatcggcattctccagtag

SEQ ID NO: 270000 - DNA, 1998 bp, Artificial Sequence
  derived and/or modified sequence
atgagtgaacagtcgtgccagatgagcgaactgcgtctcttactgctgggtaagtgtcggtctgggaagagcgctactggcaatgcaattctgggaaaacatgtgtttaagtccaagttctctgatcagacagtcatcaaaatgtgccagcgggaaagttgggtgctgcgcgagaggaaggtggtggtgattgatactccagacctcttctcaagcatcgcatgcgccgaagacaagcagcgtaacatccagcactgtctcgaattatctgcaccctcactacacgctttactcctcgtcatcgcaatcggccacttcacccgggaagacgaggaaacagccaagggcattcaacaggtatttggcgctgaggccagaagacatattataatcgtatttactcgtaaggatgatctaggggacgatcttttgcaggactttatcgagaagaacaaaccactaaaacagctggtccaggactacgaaggtcgttattgcatttttaataataagactaattcaaaagacgagcaaattacccaggtactcgagctccttcggaaggtagagtctttagttaacaccaacgggggtccgtatcacgttaatttcaaaacagaggggagccgatttcaggactgtgttaacgaggcagcttcacaggagggagataagcctcagggaccgcgagagcgccagctgcagtcaactggcccagaacaaaatccgggaacaagcgagctcactgtgttactagtgggcaagagaggggctggcaagtccgcggctggcaattccattttgggcaggcaggccttccagacagggtttagcgagcaatcagtgactcagagcttccttagtgagagccgctcttggaggaagaagaaggtgagcatcatcgacgcgccagatatcagctccttaaagaatattgactcggaggtgcgtaaacacatttgtaccgggcctcacgctttcctgttggtaacacccctagggttctatactaagaacgatgaagctgtgttatctacaatacagaataacttcggggaaaagtttttcgagtatatgatcatcttgctgactcgaaaagaagacctgggtgaccaggatctggatacatttctgagaaacagtaataaagctctgtatggcctgatccagaaatgtaagaaccgctactcagcttttaactaccgggcaacaggcgaggaggagcaaagacaggccgatgaactgctggaaaaaatcgagagcatggtgcaccagaacggcaataaacattgcgtctttcgggaaaaggagacactcaatattgtgctggtcggacggtctggaacagggaagtccgctaccggaaatagcatcctgggcagtttggtcttcacaagccggctgcgggctcaaccggtgactaagaccagccagtctggacgacggacgtgggacggccaagaagtggtggtggtggataccccgtccttcaatcagatgcttgatgtggagaaagacccaagtcggttggaggaagaagtgaaacgatgtctttcttgctgtgagaaaggtgacaccttcttcgttttggtcttccagttgggtcgttttacagaagaggataagaccgcagttgctaagctggaggctatttttggagctgactttacaaagtatgccattatgttattcacaaggaaggaggatctgggagcagggaatctcgaagactttatgaagaattccgataataaggctctgcgccgaatcttcaagaaatgcgggcgacgcgtgtgcgccttcaataacaaagagacagggcaggctcaagagacacaggtgaaagccctccttaccaaagtcaatgacctgaggaaggagtcgggttggagcggctatccacatacccaggagaatgtgtccaaacttataaagaatgtccaggagatgagccaggccgagaagttattaaaaaatcttattgggatattgcagtag

SEQ ID NO: 270001 - protein, 746 aa, Artificial Sequence
  derived and/or modified sequence
MGQTGKKSEKGPVCWRKRVKSEYMRLRQLKRFRRADEVKSMFSSNRQKILERTEILNQEWKQRRIQPVHILTSVSSLRGTRECSVTSDLDFPTQVIPLKTLNAVASVPIMYSWSPLQQNFMVEDETVLHNIPYMGDEVLDQDGTFIEELIKNYDGKVHGDRECGFINDEIFVELVNALGQYNDDDDDDDGDDPEEREEKQKDLEDHRDDKESRPPRKFPSDKIFEAISSMFPDKGTAEELKEKYKELTEQQLPGALPPECTPNIDGPNAKSVQREQSLHSFHTLFCRRCFKYDCFLHPFHATPNTYKRKNTETALDNKPCGPQCYQHLEGAKEFAAALTAERIKTPPKRPGGRRRGRLPNNSSRPSTPTINVLESKDTDSDREAGTETGGENNDKEEEEKKDETSSSSEANSRCQTPIKMKPNIEPPENVEWSGAEASMFRVLIGTYYDNFCAIARLIGTKTCRQVYEFRVKESSIIAPAPAEDVDTPPRKKKRKHRLWAAHCRKIQLKKDGSSNHVYNYQPCDHPRQPCDSSCPCVIAQNFCEKFCQCSSECQNRFPGCRCKAQCNTKQCPCYLAVRECDPDLCLTCGAADHWDSKNVSCKNCSIQRGSKKHLLLAPSDVAGWGIFIKDPVQKNEFISEYCGEIISQDEADRRGKVYDKYMCSFLFNLNNDFVVDATRKGNKIRFANHSVNPNCYAKVMMVNGDHRIGIFAKRAIQTGEELFFDYRYSQADALKYVGIEREMEIP

SEQ ID NO: 270002 - DNA, 2241 bp, Artificial Sequence
  derived and/or modified sequence
atgggtcagaccggcaaaaaatccgagaagggtcctgtttgttggagaaagcgggtgaagtccgagtacatgaggctcagacagctcaagcgtttcaggcgcgccgacgaggtgaagtcaatgttttcgagcaataggcagaagattctcgagaggactgagatcctgaaccaggaatggaagcaaagaagaatccaacccgtccacattctgacatcggtttcaagcctaagaggaacccgggaatgttctgttacgagtgatctggatttccccactcaggtgatccccctcaaaacccttaacgccgtggcctcagtgcctataatgtattcatggtcacctctacagcagaatttcatggttgaggacgaaacggttctgcacaacatcccttacatgggagacgaagttttggaccaggatgggactttcattgaggaactgattaaaaattatgatgggaaagtgcatggtgatcgggagtgcgggttcatcaatgacgagattttcgttgaactggtgaatgccctgggtcagtacaatgacgatgacgatgacgacgacggcgacgatccagaagaacgggaggaaaaacagaaggatctggaggaccaccgagacgacaaggagtctagacctccacgcaaattcccatctgataaaattttcgaggcaatttctagcatgttcccggataagggcacagcagaagagctgaaggaaaagtacaaggaactgactgagcagcagttgcccggggcgctgccccccgaatgtacgccaaatatcgacggaccaaatgccaaatctgtgcaacgggagcaatctctgcactcattccacaccctgttttgtcgacgctgctttaagtacgactgctttctgcaccctttccacgccactcctaatacatacaagcgcaaaaataccgagaccgcactggacaacaaaccctgcggaccccagtgttaccagcacctcgagggagcaaaagaatttgcagctgccctaacagccgagcgaataaagacacctcctaaaagacccggcggtcgcagaaggggacgcctccctaacaactctagccgcccttcaactcccacaataaacgtgctggaatccaaggatactgattcagatcgcgaagccggaactgagaccggcggggagaacaatgataaggaggaggaggaaaaaaaagacgagaccagcagtagttccgaagctaactcaagatgtcagacccccatcaaaatgaaacccaacatcgagccgcccgagaatgtagagtggagtggtgccgaggcttccatgtttagggtgctgattggcacgtactacgacaatttttgcgccattgccagacttattgggaccaaaacgtgtcggcaggtgtatgaattccgggtgaaggagtctagcatcatcgctcccgcgccggcagaggatgttgacacccccccgaggaagaaaaagcggaagcaccggctgtgggccgcgcattgtaggaagatccaactcaagaaagatgggagttctaatcacgtgtataactaccagccgtgcgatcatccccgccagccttgcgatagttcttgtccatgtgtgattgcacaaaacttttgtgaaaagttttgccagtgcagctctgagtgtcagaatagatttcctggatgtcgatgcaaggctcagtgcaacacaaaacagtgcccatgttacctcgccgtcagagaatgcgatccagatctttgtctgacctgcggagcggccgaccattgggattcgaagaatgtatcatgtaagaactgctcaatccaaagaggaagtaaaaagcacctgcttttggccccaagtgatgtggccggatgggggatctttattaaggacccagtgcagaagaacgagttcatcagtgagtattgtggggaaataatatcacaggacgaggcagatcgacgcggaaaggtctacgacaaatacatgtgttcctttcttttcaatcttaacaacgacttcgtggtggacgctaccaggaaaggtaataaaatcagatttgcgaaccatagcgtcaatccgaactgttacgctaaagtaatgatggtcaatggtgaccacaggattggtatatttgcgaaacgagccattcagactggagaagagttgttcttcgattatcgctatagtcaggccgatgctcttaagtatgtggggatagagcgagagatggaaatcccatag

SEQ ID NO: 270003 - DNA, 2241 bp, Artificial Sequence
  derived and/or modified sequence
atgggccagacaggcaagaagtctgagaagggccctgtgtgctggaggaagagggtgaagtctgagtacatgaggctgcggcagctgaagcgcttcagaagagcagatgaggtgaagtccatgttcagcagcaaccggcagaagatcctggagaggacagagatcctgaaccaggagtggaagcagaggcgcatccagcctgtgcacatcctgacctctgtgagcagcctgcggggcacccgggagtgcagcgtgaccagtgacctggacttccccacccaggtgatccccctgaagaccctgaatgctgtggcctctgtgcccatcatgtacagctggagccccctgcagcagaacttcatggtggaggatgagaccgtgctgcacaacatcccctacatgggagatgaggtgctggaccaggacggcaccttcatcgaggagctgatcaagaactatgatggcaaggtgcacggggaccgggagtgtggcttcatcaatgatgagatctttgtggagctggtgaatgccctgggccagtacaatgatgatgatgatgatgatgatggagatgatcctgaggagcgggaggagaagcagaaggacctggaggaccacagagatgacaaggagagccggccccccaggaagttccccagcgacaagatctttgaggccatcagctccatgtttcctgacaagggcacagctgaggagctgaaggagaagtacaaggagctgacagagcagcagctgcccggggccctgcccccagaatgtacccccaacattgatggccccaatgccaagtctgtgcagcgggagcagagcctgcacagcttccacaccctcttctgccgccgctgcttcaagtatgactgcttcctgcaccccttccacgccacccccaacacctacaagaggaagaacacagaaacagccctggacaacaagccctgtggcccccagtgctaccagcacctggagggcgccaaggagtttgctgctgccctgacagctgagcgcatcaagaccccacccaagaggcctgggggcagaagaagaggccgcctgcccaacaacagcagccggcccagcacccccaccatcaacgtgctggagagcaaggacacagacagcgaccgggaggccggcacagaaacaggaggagaaaataatgacaaggaggaggaggagaagaaggatgagaccagcagcagcagcgaggccaacagccgctgccagacccccatcaagatgaagcccaacatcgagcccccagaaaatgtggagtggagcggggctgaggcctccatgttccgggtgctgattggcacctactatgacaacttctgtgccatcgcccggctcatcggcaccaagacctgccggcaggtgtatgagttccgggtgaaggagagcagcatcatcgccccagccccagcagaagatgtggacaccccacccaggaagaagaagaggaagcaccggctgtgggccgcccactgcaggaagatccagctgaagaaggatggcagcagcaaccacgtgtacaactaccagccctgtgaccacccccggcagccctgtgacagcagctgcccctgcgtcatcgcccagaacttctgtgagaagttctgccagtgcagcagcgagtgccagaaccgcttccctggctgccgctgcaaggcccagtgcaacaccaagcagtgcccctgctacctggccgtgagagaatgtgaccctgacctgtgcctgacctgtggggctgctgaccactgggacagcaagaatgtgtcctgcaagaactgcagcatccagaggggcagcaagaagcacctgctgctggcccccagtgatgtggccggctggggcatcttcatcaaggaccctgtgcagaagaatgagttcatcagcgagtactgtggggagatcatcagccaggatgaagctgacagaagaggcaaggtgtatgacaagtacatgtgcagcttcctgttcaacctgaacaatgactttgtggtggatgccaccaggaagggcaacaagatccgctttgccaaccacagcgtgaaccccaactgctacgccaaggtgatgatggtgaatggagaccaccgcatcggcatctttgccaagagggccatccagacaggagaggagctgttctttgactaccgctacagccaggctgatgccctgaagtatgtgggcatcgagcgggagatggagatcccctag

SEQ ID NO: 270004 - DNA, 2241 bp, Artificial Sequence
  derived and/or modified sequence
atgggccagaccggcaagaagagcgagaagggccccgtgtgctggagaaaaagagtgaagagcgagtatatgcggttgcgccagctgaaaagatttcggagagctgatgaagtgaagtctatgttcagcagtaaccggcagaaaatcctggaacgcactgaaattcttaaccaggagtggaagcaaagaaggatccagcccgttcacatcctgacgtccgtatccagcttgcgcggcacacgcgagtgtagtgtgacaagcgacctggacttcccaacacaagtcattcccctcaaaaccttaaatgcggtggcaagcgtgcccatcatgtacagctggagcccattgcagcagaatttcatggttgaggacgaaactgttctccacaatatcccctacatgggcgacgaggtcctggatcaagacggaacctttatagaggagttgattaaaaattatgacgggaaagtgcacggagatagggagtgcggatttattaatgacgagatctttgttgagctggtcaatgccctaggacagtacaacgatgatgatgacgacgacgacggagacgacccggaagagagggaagaaaagcagaaagatctggaggatcacagggatgataaggaatcccgacctccacgcaaatttccctctgacaagatttttgaagccatctcgagcatgtttccggataagggcaccgctgaggagctcaaagagaagtacaaggagcttacggagcagcagctgcctggcgctttacctccagaatgcactcctaacattgatggaccaaatgccaaatctgtacagcgggagcaaagcctgcacagcttccacacactcttttgcaggaggtgcttcaaatatgactgtttcctacatcctttccatgcgacacctaacacgtataagcggaagaataccgaaactgccctagacaataagccctgcgggccccagtgctaccaacacctcgagggcgcaaaagagttcgcagcagcattaaccgcggagagaatcaaaacaccaccaaagaggcccggaggacgcaggcgagggcggcttcctaacaactcatcaagaccctccaccccaacgatcaacgtgctggagtctaaagacaccgactcagacagggaggcaggtacggaaactggaggagagaataatgataaggaggaagaagagaaaaaggacgagacctctagcagctccgaagcaaatagtaggtgccagacaccaatcaagatgaagcctaacattgagcctcccgagaacgtcgagtggagtggagccgaggcatccatgtttcgtgtgcttatagggacctactatgacaatttttgcgctatcgccaggctgatcggcaccaaaacatgtagacaggtttatgaattcagagtgaaggagtccagtatcattgcgccagctccggccgaagatgtggacacgcccccgcggaaaaaaaaaaggaaacacaggctgtgggccgcccactgtaggaagatccagcttaaaaaggatggatccagcaaccacgtgtacaactaccaaccctgcgatcacccccggcagccatgcgattcctcatgcccctgcgttattgcccagaatttctgcgaaaagttctgtcagtgtagttcagagtgccaaaatcgcttcccaggatgccgatgcaaagcacagtgcaacactaagcagtgcccatgctaccttgcagtccgggaatgcgacccagacttgtgcctaacctgtggcgctgcagaccactgggactctaaaaacgtcagctgcaaaaattgttccatccaacggggctccaagaagcacctattgctcgccccttcagacgtcgccggctgggggatcttcattaaagatccagttcagaagaatgaattcatttcagagtactgtggagaaatcattagccaggatgaggccgaccggcgaggcaaggtatatgataagtatatgtgttcgtttctgtttaacctgaacaacgattttgtggtcgatgcgactagaaagggtaataaaattagattcgccaatcactccgtgaaccctaattgttacgccaaggtgatgatggttaatggggatcacaggattggaatctttgccaaaagggcaatacaaactggcgaggaactgttttttgattatagatactctcaggccgacgcccttaaatacgtgggcatcgaacgagagatggagataccatag

SEQ ID NO: 270005 - DNA, 2241 bp, Artificial Sequence
  derived and/or modified sequence
atgggccagacaggaaagaagtccgagaaggggccagtgtgttggcgaaagcgcgttaagtctgagtatatgagactcaggcagttgaagcgctttcgccgtgcagacgaagttaagagcatgttttccagcaatcggcagaagatactggagagaactgaaatcttaaatcaggagtggaagcagcgaaggatccagccggtccacattctcacaagcgtgtcaagcctcagagggaccagagaatgctccgtgacctcagacctggactttcctacacaagtcatcccactcaagacactgaacgcggttgccagcgttccgatcatgtacagctggagccccctgcaacagaacttcatggtggaggacgagacagtgctgcataatatcccatatatgggtgatgaggtgctggaccaagatgggactttcattgaggagttaattaaaaattacgatggcaaggtgcacggcgatagagagtgtggattcatcaacgatgaaatcttcgtcgagctggtgaacgcactggggcagtacaatgatgacgacgacgacgacgatggggacgatcctgaagaaagagaggagaaacagaaagatctcgaagaccacagggacgacaaagaaagtaggccccctaggaaatttccatctgacaaaatttttgaagcaatcagcagcatgtttcctgataagggcacagccgaagaactgaaggagaagtataaggagctgaccgagcagcagctgccaggtgccctaccgcctgagtgcacgccaaacatcgacggtccaaacgccaagagcgtgcagagagaacagagtctccattcatttcacacactgttttgtcgccgttgtttcaaatacgattgctttctgcacccattccacgccacccccaatacgtacaagcgaaaaaacaccgagacggcattagacaacaagccctgtggaccccagtgttaccagcatcttgagggtgcaaaggagtttgccgctgccttaactgccgagaggatcaagacgccacccaaacgccctgggggacgacggagagggaggcttccaaacaactccagcagacctagtacacccactattaacgtgctggaaagtaaggataccgatagtgatcgtgaggccggaactgagactggaggagagaacaatgataaggaggaggaggagaagaaggacgaaactagctcaagctcagaagcaaatagccgctgccaaacaccgatcaaaatgaaacctaacatcgagcctccagagaacgttgaatggtccggcgcagaggcttctatgttcagggtgctgattggaacctactacgataacttttgcgccattgccagattaattgggacgaagacgtgcagacaggtgtacgaatttcgtgtcaaggaatcgtctatcatcgcaccagcccctgcagaagatgttgacacacctccaagaaagaaaaagaggaaacatcgtctgtgggctgctcactgtcgaaagatccaactcaagaaagacggaagttccaaccatgtctacaactatcagccatgcgaccatcccaggcagccctgcgactcttcatgtccatgcgtcattgctcagaatttctgcgagaaattctgccagtgttcatctgagtgccagaaccggtttcctgggtgccggtgcaaagcgcagtgcaatacgaagcaatgtccatgttaccttgccgttcgcgaatgcgaccctgacctttgtcttacctgtggagctgccgaccactgggattccaagaatgtgtcctgcaagaattgttcaatccagcgcggatcaaagaagcacctcctacttgccccttccgatgtggcaggctggggaatctttatcaaagaccctgtccagaaaaacgagtttatttctgagtactgcggagagatcattagtcaggacgaggccgataggagggggaaggtgtatgacaagtacatgtgtagcttcttgttcaacctgaacaacgattttgtcgtggacgcaacacgcaagggcaataagattcgctttgcaaaccatagcgttaacccaaactgttacgctaaggtgatgatggtcaacggcgatcatcgcattgggatctttgccaagcgggctatacagacaggcgaggaattattcttcgactaccgctacagccaagcagacgctctgaagtatgtgggcatcgaacgcgagatggagatcccgtag

SEQ ID NO: 270006 - DNA, 2241 bp, Artificial Sequence
  derived and/or modified sequence
atgggccagaccggcaagaagagcgagaagggccccgtgtgctggagaaagagagtgaagagcgagtacatgagactgagacagctgaagagattcagaagagccgacgaggtgaagagcatgttcagcagcaacagacagaagatcctggagagaaccgagatcctgaaccaggagtggaagcagagaagaatccagcccgtgcacatcctgaccagcgtgagcagcctgagaggcaccagagagtgcagcgtgaccagcgacctggacttccccacccaggtgatccccctgaagaccctgaacgccgtggccagcgtgcccatcatgtacagctggagccccctgcagcagaacttcatggtggaggacgagaccgtgctgcacaacatcccctacatgggcgacgaggtgctggaccaggacggcaccttcatcgaggagctgatcaagaactacgacggcaaggtgcacggcgacagagagtgcggcttcatcaacgacgagatcttcgtggagctggtgaacgccctgggccagtacaacgacgacgacgacgacgacgacggcgacgaccccgaggagagagaggagaagcagaaggacctggaggaccacagagacgacaaggagagcagaccccccagaaagttccccagcgacaagatcttcgaggccatcagcagcatgttccccgacaagggcaccgccgaggagctgaaggagaagtacaaggagctgaccgagcagcagctgcccggcgccctgccccccgagtgcacccccaacatcgacggccccaacgccaagagcgtgcagagagagcagagcctgcacagcttccacaccctgttctgcagaagatgcttcaagtacgactgcttcctgcaccccttccacgccacccccaacacctacaagagaaagaacaccgagaccgccctggacaacaagccctgcggcccccagtgctaccagcacctggagggcgccaaggagttcgccgccgccctgaccgccgagagaatcaagaccccccccaagagacccggcggcagaagaagaggcagactgcccaacaacagcagcagacccagcacccccaccatcaacgtgctggagagcaaggacaccgacagcgacagagaggccggcaccgagaccggcggcgagaacaacgacaaggaggaggaggagaagaaggacgagaccagcagcagcagcgaggccaacagcagatgccagacccccatcaagatgaagcccaacatcgagccccccgagaacgtggagtggagcggcgccgaggccagcatgttcagagtgctgatcggcacctactacgacaacttctgcgccatcgccagactgatcggcaccaagacctgcagacaggtgtacgagttcagagtgaaggagagcagcatcatcgcccccgcccccgccgaggacgtggacaccccccccagaaagaagaagagaaagcacagactgtgggccgcccactgcagaaagatccagctgaagaaggacggcagcagcaaccacgtgtacaactaccagccctgcgaccaccccagacagccctgcgacagcagctgcccctgcgtgatcgcccagaacttctgcgagaagttctgccagtgcagcagcgagtgccagaacagattccccggctgcagatgcaaggcccagtgcaacaccaagcagtgcccctgctacctggccgtgagagagtgcgaccccgacctgtgcctgacctgcggcgccgccgaccactgggacagcaagaacgtgagctgcaagaactgcagcatccagagaggcagcaagaagcacctgctgctggcccccagcgacgtggccggctggggcatcttcatcaaggaccccgtgcagaagaacgagttcatcagcgagtactgcggcgagatcatcagccaggacgaggccgacagaagaggcaaggtgtacgacaagtacatgtgcagcttcctgttcaacctgaacaacgacttcgtggtggacgccaccagaaagggcaacaagatcagattcgccaaccacagcgtgaaccccaactgctacgccaaggtgatgatggtgaacggcgaccacagaatcggcatcttcgccaagagagccatccagaccggcgaggagctgttcttcgactacagatacagccaggccgacgccctgaagtacgtgggcatcgagagagagatggagatcccctag

SEQ ID NO: 270007 - DNA, 2591 bp, Artificial Sequence
  derived and/or modified sequence
aggcagtggagccccggcggcggcggcggcggcgcgcgggggcgacgcgcgggaacaacgcgagtcggcgcgcgggacgaagaataatcatgggccagactgggaagaaatctgagaagggaccagtttgttggcggaagcgtgtaaaatcagagtacatgcgactgagacagctcaagaggttcagacgagctgatgaagtaaagagtatgtttagttccaatcgtcagaaaattttggaaagaacggaaatcttaaaccaagaatggaaacagcgaaggatacagcctgtgcacatcctgacttctgtgagctcattgcgcgggactagggagtgttcggtgaccagtgacttggattttccaacacaagtcatcccattaaagactctgaatgcagttgcttcagtacccataatgtattcttggtctcccctacagcagaattttatggtggaagatgaaactgttttacataacattccttatatgggagatgaagttttagatcaggatggtactttcattgaagaactaataaaaaattatgatgggaaagtacacggggatagagaatgtgggtttataaatgatgaaatttttgtggagttggtgaatgcccttggtcaatataatgatgatgacgatgatgatgatggagacgatcctgaagaaagagaagaaaagcagaaagatctggaggatcaccgagatgataaagaaagccgcccacctcggaaatttccttctgataaaatttttgaagccatttcctcaatgtttccagataagggcacagcagaagaactaaaggaaaaatataaagaactcaccgaacagcagctcccaggcgcacttcctcctgaatgtacccccaacatagatggaccaaatgctaaatctgttcagagagagcaaagcttacactcctttcatacgcttttctgtaggcgatgttttaaatatgactgcttcctacatccttttcatgcaacacccaacacttataagcggaagaacacagaaacagctctagacaacaaaccttgtggaccacagtgttaccagcatttggagggagcaaaggagtttgctgctgctctcaccgctgagcggataaagaccccaccaaaacgtccaggaggccgcagaagaggacggcttcccaataacagtagcaggcccagcacccccaccattaatgtgctggaatcaaaggatacagacagtgatagggaagcagggactgaaacggggggagagaacaatgataaagaagaagaagagaagaaagatgaaacttcgagctcctctgaagcaaattctcggtgtcaaacaccaataaagatgaagccaaatattgaacctcctgagaatgtggagtggagtggtgctgaagcctcaatgtttagagtcctcattggcacttactatgacaatttctgtgccattgctaggttaattgggaccaaaacatgtagacaggtgtatgagtttagagtcaaagaatctagcatcatagctccagctcccgctgaggatgtggatactcctccaaggaaaaagaagaggaaacaccggttgtgggctgcacactgcagaaagatacagctgaaaaaggacggctcctctaaccatgtttacaactatcaaccctgtgatcatccacggcagccttgtgacagttcgtgcccttgtgtgatagcacaaaatttttgtgaaaagttttgtcaatgtagttcagagtgtcaaaaccgctttccgggatgccgctgcaaagcacagtgcaacaccaagcagtgcccgtgctacctggctgtccgagagtgtgaccctgacctctgtcttacttgtggagccgctgaccattgggacagtaaaaatgtgtcctgcaagaactgcagtattcagcggggctccaaaaagcatctattgctggcaccatctgacgtggcaggctgggggatttttatcaaagatcctgtgcagaaaaatgaattcatctcagaatactgtggagagattatttctcaagatgaagctgacagaagagggaaagtgtatgataaatacatgtgcagctttctgttcaacttgaacaatgattttgtggtggatgcaacccgcaagggtaacaaaattcgttttgcaaatcattcggtaaatccaaactgctatgcaaaagttatgatggttaacggtgatcacaggataggtatttttgccaagagagccatccagactggcgaagagctgttttttgattacagatacagccaggctgatgccctgaagtatgtcggcatcgaaagagaaatggaaatcccttgacatctgctacctcctcccccctcctctgaaacagctgccttagcttcaggaacctcgagtactgtgggcaatttagaaaaagaacatgcagtttgaaattctgaatttgcaaagtactgtaagaataatttatagtaatgagtttaaaaatcaactttttattgccttctcaccagctgcaaagtgttttgtaccagtgaatttttgcaataatgcagtatggtacatttttcaactttgaataaagaatacttgaacttg

SEQ ID NO: 270008 - protein, 737 aa, Artificial Sequence
  derived and/or modified sequence
MGQTGKKSEKGPVCWRKRVKSEYMRLRQLKRFRRADEVKSMFSSNRQKILERTEILNQEWKQRRIQPVHILTSCSVTSDLDFPTQVIPLKTLNAVASVPIMYSWSPLQQNFMVEDETVLHNIPYMGDEVLDQDGTFIEELIKNYDGKVHGDRECGFINDEIFVELVNALGQYNDDDDDDDGDDPEEREEKQKDLEDHRDDKESRPPRKFPSDKIFEAISSMFPDKGTAEELKEKYKELTEQQLPGALPPECTPNIDGPNAKSVQREQSLHSFHTLFCRRCFKYDCFLHPFHATPNTYKRKNTETALDNKPCGPQCYQHLEGAKEFAAALTAERIKTPPKRPGGRRRGRLPNNSSRPSTPTINVLESKDTDSDREAGTETGGENNDKEEEEKKDETSSSSEANSRCQTPIKMKPNIEPPENVEWSGAEASMFRVLIGTYYDNFCAIARLIGTKTCRQVYEFRVKESSIIAPAPAEDVDTPPRKKKRKHRLWAAHCRKIQLKKDGSSNHVYNYQPCDHPRQPCDSSCPCVIAQNFCEKFCQCSSECQNRFPGCRCKAQCNTKQCPCYLAVRECDPDLCLTCGAADHWDSKNVSCKNCSIQRGSKKHLLLAPSDVAGWGIFIKDPVQKNEFISEYCGEIISQDEADRRGKVYDKYMCSFLFNLNNDFVVDATRKGNKIRFANHSVNPNCYAKVMMVNGDHRIGIFAKRAIQTGEELFFDYRYSQADALKYVGIEREMEIP

SEQ ID NO: 270009 - DNA, 2214 bp, Artificial Sequence
  derived and/or modified sequence
atggggcagaccggaaagaagagcgaaaagggcccggtgtgttggagaaagagagtcaaatcagagtacatgaggctacggcaattgaagcggttccgaagagcagacgaggttaagagcatgttttcctcgaatcgacagaagatcctcgagcggacagagatcttgaatcaagaatggaagcagagaaggattcagcctgttcatatcttgacgtcatgtagtgttacgagtgatctggacttccccactcaagtcattccattgaagacacttaatgcagtggccagcgtcccgataatgtacagttggtcacccttgcagcagaactttatggtggaggacgagacagtactgcacaatatcccctatatgggcgacgaagtgttagatcaggacggcacattcattgaggaattgatcaagaattacgacggaaaagtgcatggggatcgcgagtgcgggttcataaacgacgaaattttcgtggaactagtaaatgctctcggacaatataatgacgatgacgatgacgacgatggagatgacccagaagaaagagaagagaagcaaaaagacctcgaggaccatagggacgacaaggagtctcgccctcccagaaaatttccgtctgataaaatattcgaggcaatctcctcaatgtttcccgacaaaggtactgctgaggaactaaaggagaaatataaagagctgaccgaacagcagctccctggggcactcccacccgaatgtaccccgaacattgatggcccaaacgcgaagtcagtccagcgagaacagagccttcattcattccacaccctcttctgtaggagatgttttaaatacgattgtttcttgcacccctttcatgccacacctaacacatacaagcgtaaaaacactgagacagccctggataataaaccttgtggaccacaatgttaccaacatttagagggagccaaggaattcgctgcggcgctgacagcggaacgcatcaagactcctcctaagcgtcccggagggaggcggagaggtcgcctcccaaacaattcctctcgtccttccacccccactataaacgtgttagagtccaaggacacagatagcgacagggaagcaggaacagagacaggaggggagaacaacgataaggaggaggaagagaaaaaggatgaaaccagctcctcgagcgaggccaattcaaggtgccagacacctataaagatgaaacctaacatagagcctcccgagaacgtggaatggtcaggagcagaggctagtatgtttagagtcctaattggaacttactacgataatttctgcgcaattgcccgcttgattggcaccaagacttgtcgccaggtgtacgaattccgggtcaaggaaagctcaatcatcgcacctgctcctgccgaagatgtggacacccctccgagaaagaaaaaaagaaagcaccggctgtgggcggctcactgccggaagatccagctgaaaaaggatggcagctctaatcacgtgtataactaccagccatgcgaccaccctcggcagccatgtgattcctcttgcccttgtgttattgcccaaaacttttgcgaaaagttttgtcagtgctcatccgaatgtcagaaccgattccctgggtgccggtgcaaggcacaatgcaacactaaacaatgcccatgttacctggctgtgagggaatgcgatcctgacctttgcctgacatgcggtgcggccgatcactgggattctaaaaatgtgagttgtaagaattgcagtattcagcgcggctccaagaagcacctgttactcgccccaagcgacgtagcagggtggggtattttcatcaaagaccccgtgcagaagaacgagtttatcagcgaatactgtggagaaatcatctctcaagatgaagccgatcggagaggaaaagtttacgataagtacatgtgctcatttctcttcaacctgaacaatgatttcgttgtggatgccacaaggaaagggaataagattcggttcgcgaatcactctgtgaatcctaactgttatgcaaaggttatgatggttaatggcgaccatcgtattggcatctttgccaagcgcgcgattcaaaccggcgaggagctctttttcgactatcgctattcccaagcagacgcacttaagtacgtcggcatcgagcgtgaaatggagattccttag

SEQ ID NO: 270010 - DNA, 2214 bp, Artificial Sequence
  derived and/or modified sequence
atgggccagacaggcaagaagtctgagaagggccctgtgtgctggaggaagagggtgaagtctgagtacatgaggctgcggcagctgaagcgcttcagaagagcagatgaggtgaagtccatgttcagcagcaaccggcagaagatcctggagaggacagagatcctgaaccaggagtggaagcagaggcgcatccagcctgtgcacatcctgaccagctgcagcgtgaccagtgacctggacttccccacccaggtgatccccctgaagaccctgaatgctgtggcctctgtgcccatcatgtacagctggagccccctgcagcagaacttcatggtggaggatgaaacagtgctgcacaacatcccctacatgggagatgaggtgctggaccaggacggcaccttcatcgaggagctgatcaagaactatgatggcaaggtgcatggagacagagaatgtggcttcatcaatgatgagatctttgtggagctggtgaatgccctgggccagtacaatgatgatgatgatgatgatgatggagatgatcctgaggagcgggaggagaagcagaaggacctggaggaccacagagatgacaaggagagcaggcctcccaggaagttccccagcgacaagatctttgaggccatcagctccatgtttcctgacaagggcacagctgaggagctgaaggagaagtacaaggagctgacagagcagcagctgcccggggccctgcccccagagtgcacccccaacattgatggccccaatgccaagtctgtgcagcgggagcagagcctgcacagcttccacaccctcttctgccgccgctgcttcaagtatgactgcttcctgcaccccttccacgccacccccaacacctacaagaggaagaacacagaaacagccctggacaacaagccctgtggcccccagtgctaccagcacctggagggcgccaaggagtttgctgctgccctgacagctgagcgcatcaagaccccacccaagaggcctgggggcagaagaagaggccgcctgcccaacaacagcagccggcccagcacccccaccatcaacgtgctggagagcaaggacacagacagcgaccgggaggccggcacagaaacaggaggagagaacaatgacaaggaggaggaggagaagaaggatgagaccagcagcagcagcgaggccaacagccgctgccagacccccatcaagatgaagcccaacatcgagcccccagaaaatgtggagtggagcggggctgaggcctccatgttccgggtgctgattggcacctactatgacaacttctgtgccatcgcccggctgattggcaccaagacctgccggcaggtgtatgagttccgggtgaaggagagcagcatcatcgccccagccccagcagaagatgtggacaccccacccaggaagaagaagaggaagcaccggctgtgggccgcccactgcaggaagatccagctgaagaaggatggcagcagcaaccacgtgtacaactaccagccctgtgaccacccccggcagccctgtgacagcagctgcccctgtgtgattgcccagaacttctgtgagaagttctgccagtgcagcagcgagtgccagaaccgcttccctggctgccgctgcaaggcccagtgcaacaccaagcagtgcccctgctacctggccgtgcgggagtgtgaccctgacctgtgcctgacctgtggggctgctgaccactgggacagcaagaatgtgtcctgcaagaactgcagcatccagaggggcagcaagaagcacctgctgctggcccccagtgatgtggccggctggggcatcttcatcaaggaccctgtgcagaagaatgagttcatcagcgagtactgtggggagatcatcagccaggatgaggccgaccggcggggcaaggtgtatgacaagtacatgtgcagcttcctgttcaacctgaacaatgactttgtggtggatgccaccaggaaaggaaacaagatccgctttgccaaccacagcgtgaaccccaactgctacgccaaggtgatgatggtgaatggagaccacagaattggcatctttgccaagagggccatccagacaggagaggagctgttctttgactaccgctacagccaggctgatgccctgaagtatgtgggcatcgagcgggagatggagatcccctag

SEQ ID NO: 270011 - DNA, 2214 bp, Artificial Sequence
  derived and/or modified sequence
atgggccagaccggcaagaagagcgagaagggccccgtgtgctggcgcaaacgagtcaagtcggagtatatgcgccttcgtcagttaaaaagatttcggagggccgatgaggtcaaaagcatgttttccagcaatagacagaagattctcgagcgcacagaaatcctcaatcaagaatggaagcagcgacggatccagcccgtgcacattcttacctcctgttcagtaacatccgatctcgactttcccactcaggtcatcccacttaagacactaaacgcagtcgcctcggtgcccattatgtacagctggagtcccctgcaacaaaacttcatggtggaggacgagactgtccttcataatataccctacatgggcgatgaagtccttgatcaagatggaaccttcattgaggaattgatcaagaactatgacggcaaggtacatggagaccgggaatgtggcttcatcaatgatgagatctttgttgaactcgttaatgcactgggacagtataatgacgacgacgacgacgatgacggggacgacccggaggaacgggaggagaagcagaaggatttagaggatcatcgcgacgacaaggaatctcgcccaccacggaagtttccatctgacaaaatcttcgaagctatctcctccatgttcccagataagggaaccgctgaagaattgaaagagaaatacaaggagctgacagagcaacaactgcccggggccctgcctcccgagtgtacgccaaacatcgatgggccgaacgctaaatccgtgcagagagaacagagcctgcattccttccataccctgttctgcagacgatgctttaaatatgactgcttcctgcacccctttcatgctacccccaacacgtacaagaggaagaacacagaaacagcactggacaacaagccgtgtgggccccaatgctatcagcatctcgaaggtgcgaaggagtttgctgccgctttgacagccgagcggataaagacaccacctaaacggcctggtggacggcgtagaggacgactgcccaacaactcaagccgcccctctactccaactatcaacgtgctagagtctaaggacaccgattcagatagggaggccggaaccgagacagggggcgagaataacgataaagaagaggaagaaaagaaagatgaaacaagttcgagcagcgaggcaaactctagatgtcaaacccccattaagatgaaaccaaacatcgaacctcccgagaacgtggagtggtcaggcgccgaggcctctatgttccgggttctaattgggacttactacgacaacttctgcgcaattgccagattgattggcactaagacctgtcgtcaggtttatgagttcagagtgaaagagtcctccataatcgctcctgcgcctgcggaagatgtggatactccacctcgtaaaaaaaagagaaagcatcgcctttgggcagcccattgcaggaaaattcaactgaagaaagacggcagcagcaatcacgtctacaattatcaaccatgtgaccaccctagacagccatgcgactccagctgcccctgtgtcattgctcagaatttctgcgagaagttttgccagtgcagttctgaatgccagaatcgtttcccaggatgtaggtgcaaagctcagtgtaacactaagcagtgtccatgttacctggcagttagggagtgcgacccagatctctgtctcacatgcggggctgcggatcattgggactccaagaacgttagctgtaagaactgctccattcagcgggggtcaaaaaagcatcttttactggccccatctgacgtggctggatggggtatctttatcaaggatcccgtgcagaaaaatgaatttatctctgagtactgtggcgagataatttcacaagatgaagcagaccggaggggtaaagtttacgataagtacatgtgcagctttttatttaatctcaacaacgatttcgtggttgatgctacccgaaaaggaaacaagattcgtttcgcaaaccattctgtgaaccccaactgctatgctaaagtgatgatggtgaacggggaccatcgcataggaatatttgcaaaacgcgctattcagacaggtgaagaactgtttttcgattatagatacagtcaagcagacgctctcaaatatgtaggcattgaaagagagatggagatcccctag

SEQ ID NO: 270012 - DNA, 2214 bp, Artificial Sequence
  derived and/or modified sequence
atgggccagactgggaaaaagtctgagaaaggtcccgtctgttggcgtaaaagggttaagtccgagtacatgaggctcagacagctgaaaaggttccgcagggctgatgaggtgaagagcatgttctcctccaataggcaaaagatcctcgagaggactgaaatcttaaatcaggaatggaaacagcgcagaattcagccagtgcacattctcacctcatgcagcgtgacatccgatcttgatttccccacccaggtcataccccttaaaaccctgaatgcggtcgcatccgtgcctatcatgtatagttggagccccctgcagcagaacttcatggtggaagatgagaccgttctgcacaatatcccctacatgggcgacgaagttctcgatcaagatggcaccttcattgaggagctgatcaaaaactatgacgggaaggtgcacggagatcgtgagtgcggattcatcaatgatgaaattttcgtggagctggtgaatgccctaggtcaatacaatgacgatgatgacgatgatgacggagacgatccagaagagagagaggaaaagcagaaagacttagaagaccacagagatgataaggaatcccgacctccccgtaagttccccagcgacaagatttttgaggctatcagctctatgtttccagacaaaggcacagctgaagaactcaaagaaaagtacaaagagctgacagagcaacaactgccaggcgctctcccacctgaatgtaccccaaatattgatgggccaaatgccaagtccgtgcagcgagagcaaagcctacacagcttccacacacttttctgccgccgttgttttaagtacgattgttttctgcatccctttcatgcgaccccaaatacctacaaaagaaagaatacagaaacagctcttgataacaagccttgcggcccacaatgctatcagcacctggagggcgctaaagagtttgccgcagcactcaccgccgaaaggatcaagaccccccctaaacgcccaggcggacggagacgagggcgactacctaataactccagcagacccagcaccccaacaataaatgtccttgagtctaaggacacggatagcgacagggaggctgggactgaaaccggcggagagaataacgacaaagaagaggaagagaaaaaagacgaaacctctagctcgagtgaagctaattcaagatgtcaaacccccattaagatgaaacccaatattgaacctccagagaatgtggaatggagtggagctgaggcgagcatgttccgtgtgttgatcgggacatactacgataatttctgcgcaatcgctagactgatcggcactaagacctgcaggcaagtgtacgagttcagggttaaggaatccagcatcattgccccagcccctgccgaggacgtcgacactcctcctcgtaagaagaaaaggaaacaccgcctgtgggctgcgcactgtaggaaaattcagctgaagaaggatggatcctctaaccatgtgtataactaccagccatgcgatcacccaaggcagccttgtgattcttcatgtccttgtgtcattgcacagaatttttgtgagaagttttgtcagtgcagctccgagtgccagaatcgttttcccggatgtcgctgtaaagcccagtgcaataccaagcagtgtccctgttatctcgctgtgcgggagtgcgatccagacctctgtctgacctgtggggctgcagatcattgggattcaaaaaatgtgtcttgcaagaattgcagtattcagcggggttcgaagaagcacctcttgcttgctccctctgatgtagccggttggggtatcttcattaaggacccagttcagaaaaacgaattcatttcggaatactgtggggagatcatctcacaggacgaggccgatcgacgtggaaaagtctatgataaatacatgtgctcctttctgttcaacctcaacaatgacttcgtggtagatgcgaccagaaaaggcaataagattaggttcgctaaccactccgttaacccaaactgttatgctaaagtgatgatggtcaacggcgatcatcgaatcggcatttttgctaagcgggcaatccaaaccggcgaagagctgttttttgattacagatattctcaggccgacgccctgaagtacgtcgggatcgagcgagagatggagattccctag

SEQ ID NO: 270013 - DNA, 2214 bp, Artificial Sequence
  derived and/or modified sequence
atgggccagaccggcaagaagagcgagaagggccccgtgtgctggagaaagagagtgaagagcgagtacatgagactgagacagctgaagagattcagaagagccgacgaggtgaagagcatgttcagcagcaacagacagaagatcctggagagaaccgagatcctgaaccaggagtggaagcagagaagaatccagcccgtgcacatcctgaccagctgcagcgtgaccagcgacctggacttccccacccaggtgatccccctgaagaccctgaacgccgtggccagcgtgcccatcatgtacagctggagccccctgcagcagaacttcatggtggaggacgagaccgtgctgcacaacatcccctacatgggcgacgaggtgctggaccaggacggcaccttcatcgaggagctgatcaagaactacgacggcaaggtgcacggcgacagagagtgcggcttcatcaacgacgagatcttcgtggagctggtgaacgccctgggccagtacaacgacgacgacgacgacgacgacggcgacgaccccgaggagagagaggagaagcagaaggacctggaggaccacagagacgacaaggagagcagaccccccagaaagttccccagcgacaagatcttcgaggccatcagcagcatgttccccgacaagggcaccgccgaggagctgaaggagaagtacaaggagctgaccgagcagcagctgcccggcgccctgccccccgagtgcacccccaacatcgacggccccaacgccaagagcgtgcagagagagcagagcctgcacagcttccacaccctgttctgcagaagatgcttcaagtacgactgcttcctgcaccccttccacgccacccccaacacctacaagagaaagaacaccgagaccgccctggacaacaagccctgcggcccccagtgctaccagcacctggagggcgccaaggagttcgccgccgccctgaccgccgagagaatcaagaccccccccaagagacccggcggcagaagaagaggcagactgcccaacaacagcagcagacccagcacccccaccatcaacgtgctggagagcaaggacaccgacagcgacagagaggccggcaccgagaccggcggcgagaacaacgacaaggaggaggaggagaagaaggacgagaccagcagcagcagcgaggccaacagcagatgccagacccccatcaagatgaagcccaacatcgagccccccgagaacgtggagtggagcggcgccgaggccagcatgttcagagtgctgatcggcacctactacgacaacttctgcgccatcgccagactgatcggcaccaagacctgcagacaggtgtacgagttcagagtgaaggagagcagcatcatcgcccccgcccccgccgaggacgtggacaccccccccagaaagaagaagagaaagcacagactgtgggccgcccactgcagaaagatccagctgaagaaggacggcagcagcaaccacgtgtacaactaccagccctgcgaccaccccagacagccctgcgacagcagctgcccctgcgtgatcgcccagaacttctgcgagaagttctgccagtgcagcagcgagtgccagaacagattccccggctgcagatgcaaggcccagtgcaacaccaagcagtgcccctgctacctggccgtgagagagtgcgaccccgacctgtgcctgacctgcggcgccgccgaccactgggacagcaagaacgtgagctgcaagaactgcagcatccagagaggcagcaagaagcacctgctgctggcccccagcgacgtggccggctggggcatcttcatcaaggaccccgtgcagaagaacgagttcatcagcgagtactgcggcgagatcatcagccaggacgaggccgacagaagaggcaaggtgtacgacaagtacatgtgcagcttcctgttcaacctgaacaacgacttcgtggtggacgccaccagaaagggcaacaagatcagattcgccaaccacagcgtgaaccccaactgctacgccaaggtgatgatggtgaacggcgaccacagaatcggcatcttcgccaagagagccatccagaccggcgaggagctgttcttcgactacagatacagccaggccgacgccctgaagtacgtgggcatcgagagagagatggagatcccctag

SEQ ID NO: 270014 - DNA, 2466 bp, Artificial Sequence
  derived and/or modified sequence
ggcgctcggtccggtcgcgtccgacacccggtgggactcagaaggcagtggagccccggcggcggcggcggcggcgcgcgggggcgacgcgcgggaacaacgcgagtcggcgcgcgggacgaagaataatcatgggccagactgggaagaaatctgagaagggaccagtttgttggcggaagcgtgtaaaatcagagtacatgcgactgagacagctcaagaggttcagacgagctgatgaagtaaagagtatgtttagttccaatcgtcagaaaattttggaaagaacggaaatcttaaaccaagaatggaaacagcgaaggatacagcctgtgcacatcctgacttcttgttcggtgaccagtgacttggattttccaacacaagtcatcccattaaagactctgaatgcagttgcttcagtacccataatgtattcttggtctcccctacagcagaattttatggtggaagatgaaactgttttacataacattccttatatgggagatgaagttttagatcaggatggtactttcattgaagaactaataaaaaattatgatgggaaagtacacggggatagagaatgtgggtttataaatgatgaaatttttgtggagttggtgaatgcccttggtcaatataatgatgatgacgatgatgatgatggagacgatcctgaagaaagagaagaaaagcagaaagatctggaggatcaccgagatgataaagaaagccgcccacctcggaaatttccttctgataaaatttttgaagccatttcctcaatgtttccagataagggcacagcagaagaactaaaggaaaaatataaagaactcaccgaacagcagctcccaggcgcacttcctcctgaatgtacccccaacatagatggaccaaatgctaaatctgttcagagagagcaaagcttacactcctttcatacgcttttctgtaggcgatgttttaaatatgactgcttcctacatccttttcatgcaacacccaacacttataagcggaagaacacagaaacagctctagacaacaaaccttgtggaccacagtgttaccagcatttggagggagcaaaggagtttgctgctgctctcaccgctgagcggataaagaccccaccaaaacgtccaggaggccgcagaagaggacggcttcccaataacagtagcaggcccagcacccccaccattaatgtgctggaatcaaaggatacagacagtgatagggaagcagggactgaaacggggggagagaacaatgataaagaagaagaagagaagaaagatgaaacttcgagctcctctgaagcaaattctcggtgtcaaacaccaataaagatgaagccaaatattgaacctcctgagaatgtggagtggagtggtgctgaagcctcaatgtttagagtcctcattggcacttactatgacaatttctgtgccattgctaggttaattgggaccaaaacatgtagacaggtgtatgagtttagagtcaaagaatctagcatcatagctccagctcccgctgaggatgtggatactcctccaaggaaaaagaagaggaaacaccggttgtgggctgcacactgcagaaagatacagctgaaaaaggacggctcctctaaccatgtttacaactatcaaccctgtgatcatccacggcagccttgtgacagttcgtgcccttgtgtgatagcacaaaatttttgtgaaaagttttgtcaatgtagttcagagtgtcaaaaccgctttccgggatgccgctgcaaagcacagtgcaacaccaagcagtgcccgtgctacctggctgtccgagagtgtgaccctgacctctgtcttacttgtggagccgctgaccattgggacagtaaaaatgtgtcctgcaagaactgcagtattcagcggggctccaaaaagcatctattgctggcaccatctgacgtggcaggctgggggatttttatcaaagatcctgtgcagaaaaatgaattcatctcagaatactgtggagagattatttctcaagatgaagctgacagaagagggaaagtgtatgataaatacatgtgcagctttctgttcaacttgaacaatgattttgtggtggatgcaacccgcaagggtaacaaaattcgttttgcaaatcattcggtaaatccaaactgctatgcaaaagttatgatggttaacggtgatcacaggataggtatttttgccaagagagccatccagactggcgaagagctgttttttgattacagatacagccaggctgatgccctgaagtatgtcggcatcgaaagagaaatggaaatcccttgacatctgctacctcctcccccctcctctgaaacagctgccttagcttcaggaacctcgagtactgtgggcaatttagaaaaagaacatgcagtttgaaattctgaatttgcaaagtactgta

SEQ ID NO: 270015 - protein, 225 aa, Artificial Sequence
  derived and/or modified sequence
MYSWSPLQQNFMVEDETVLHNIPYMGDEVLDQDGTFIEELIKNYDGKVHGDRECGFINDEIFVELVNALGQYNDDDDDDDGDDPEEREEKQKDLEDHRDDKESRPPRKFPSDKIFEAISSMFPDKGTAEELKEKYKELTEQQLPGALPPECTPNIDGPNAKSVQREQSLHSFHTLFCRRCFKYDCFLHPFHATPNTYKRKNTETALDNKPCGPQCYQHLPLLPRN

SEQ ID NO: 270016 - protein, 695 aa, Artificial Sequence
  derived and/or modified sequence
MGQTGKKSEKGPVCWRKRVKSEYMRLRQLKRFRRADEVKSMFSSNRQKILERTEILNQEWKQRRIQPVHILTSCSVTSDLDFPTQVIPLKTLNAVASVPIMYSWSPLQQNFMVEDETVLHNIPYMGDEVLDQDGTFIEELIKNYDGKVHGDRECGFINDEIFVELVNALGQYNDDDDDDDGDDPEEREEKQKDLEDHRDDKESRPPRKFPSDKIFEAISSMFPDKGTAEELKEKYKELTEQQLPGALPPECTPNIDGPNAKSVQREQSLHSFHTLFCRRCFKYDCFLHPFHATPNTYKRKNTETALDNKPCGPQCYQHLEGAKEFAAALTAERIKTPPKRPGGRRRGRLPNNSSRPSTPTINVLESKDTDSDREAGTETGGENNDKEEEEKKDETSSSSEANSRCQTPIKMKPNIEPPENVEWSGAEASMFRVLIGTYYDNFCAIARLIGTKTCRQVYEFRVKESSIIAPAPAEDVDTPPRKKKRKHRLWAAHCRKIQLKKGQNRFPGCRCKAQCNTKQCPCYLAVRECDPDLCLTCGAADHWDSKNVSCKNCSIQRGSKKHLLLAPSDVAGWGIFIKDPVQKNEFISEYCGEIISQDEADRRGKVYDKYMCSFLFNLNNDFVVDATRKGNKIRFANHSVNPNCYAKVMMVNGDHRIGIFAKRAIQTGEELFFDYRYSQADALKYVGIEREMEIP

SEQ ID NO: 270017 - DNA, 2088 bp, Artificial Sequence
  derived and/or modified sequence
atgggccaaacaggcaaaaagtccgagaaggggccagtgtgttggaggaaacgagtgaaatctgagtacatgcgcttaagacagctgaagaggtttcgtcgggcagacgaagtaaaaagcatgttttccagcaataggcaaaagatcttggagcgcacggagatcctcaaccaggagtggaaacaacgacggatccagcccgtgcacatcctgaccagctgctctgtaactagtgacctggatttcccaacccaagtgattcctttaaagacacttaacgccgtggccagtgtgcctatcatgtactcctggagcccactccaacagaacttcatggtggaggatgagacagttctacataacataccatacatgggggacgaggtcctggaccaggacggtaccttcattgaggagctgatcaagaactacgatggtaaggtccacggggaccgggagtgtggtttcattaacgacgaaatattcgtggagttggtgaatgcgctggggcagtataacgacgacgatgacgacgacgatggagatgatcctgaagaacgtgaagaaaaacagaaagacttggaggaccacagagacgacaaggagagccgcccacccaggaagttcccttccgacaaaatctttgaagccatatcctcaatgtttcccgacaaggggactgcagaggagctgaaggaaaaatacaaggagttgaccgagcagcagctgcctggcgcactgccacccgaatgcacacctaacattgacgggcctaatgcaaaaagcgttcagcgcgagcagtcccttcacagctttcacacgctcttctgtcgtcggtgttttaagtatgactgcttcctgcacccattccatgcaacaccaaacacgtataaaaggaagaacactgagacagctctggataataagccatgtggacctcagtgttatcagcatttagagggggcgaaagaattcgctgcagccctgaccgctgagcgaatcaagactccccctaagcggcccggtggtagacggcgtgggcgtctgccgaataatagctcccgtccatccactcctacaatcaacgttctagaatcaaaggacacggactcagaccgggaggccggcaccgagactggaggcgaaaacaatgacaaagaggaagaggaaaaaaaagatgagacctccagtagcagtgaagcaaactcacgatgccagacccccattaagatgaaaccgaacattgaacccccggagaatgtggagtggagcggggcagaggcgagcatgtttcgggtgcttatcgggacttactacgacaacttctgcgctattgcgcggctgattggcacaaagacatgccggcaggtgtacgagttcagggttaaggagtcaagtattattgcgcctgccccagcagaagatgtggacactccccccagaaagaaaaagagaaagcataggctgtgggccgcccattgtaggaagattcagttaaagaagggacagaaccggttcccagggtgtcggtgtaaggcccaatgcaataccaagcaatgcccttgttatctggccgtgcgcgaatgcgatccagatctgtgcctgacctgtggagcagccgatcattgggactctaagaacgtcagctgcaagaactgtagcatacagcgaggtagtaagaagcacctgctactggctccgtcggacgtcgcaggttgggggattttcatcaaagatcctgtgcaaaagaatgaatttataagcgaatattgcggtgagatcatctcacaggacgaggccgaccggcgggggaaggtgtacgacaagtacatgtgctcgttccttttcaacttgaacaatgacttcgtcgttgatgctactaggaaaggaaacaaaattagatttgccaatcactcggtgaatcccaactgctacgccaaggtgatgatggtgaacggagatcatcgtatcggcatctttgcaaaaagggccattcagaccggtgaagagcttttcttcgactacaggtatagccaggccgatgcgctcaagtacgtgggtattgaaagggagatggagatcccctag

SEQ ID NO: 270018 - DNA, 2088 bp, Artificial Sequence
  derived and/or modified sequence
atgggtcaaacaggcaagaagtccgagaaaggccccgtgtgctggaggaaaagggtgaagtcggagtatatgagactgagacagttaaaacggtttcgcagggccgatgaggtaaagagcatgttcagtagcaacagacagaagattctcgaaaggaccgaaatacttaatcaggagtggaagcagaggagaatccagccagtacacattttgacaagctgttcagtgacgtctgaccttgattttccaactcaggtcattcccctgaaaaccctgaatgctgtggcttccgtaccaatcatgtacagctggtcccctctacagcagaattttatggtggaggacgagaccgtcttgcacaacataccatatatgggggacgaagtgcttgatcaggatgggaccttcattgaggagctgatcaagaattatgatggaaaagtgcacggtgaccgggagtgcgggttcattaatgacgagattttcgttgagttggtgaatgccctgggacagtataatgacgatgacgatgacgacgacggggatgaccctgaggagcgggaagaaaaacagaaggacctagaagaccatagggacgacaaggagtccaggcctccacgtaagttcccttccgataagatctttgaggctatctctagtatgttcccagataagggaactgccgaggaactcaaggaaaagtacaaggagctgacagagcagcagctcccgggagcgcttccacctgagtgtaccccaaacattgatggccctaacgcaaaatccgttcagagagaacagtcactgcattcattccacaccctcttctgtagaagatgctttaaatatgattgcttccttcatccctttcacgccacacctaatacctataaacgaaaaaacaccgagacggcactggataacaagccgtgtgggcctcagtgttaccagcacctcgagggggctaaagaattcgcagccgcactaactgctgaacggatcaaaactccccctaagcgccctggcgggcggcggagaggacgattgcccaataacagctcccgccctagtaccccaaccattaatgtgctagagagtaaagacactgattcggaccgagaggcaggcacagagaccgggggcgaaaataacgataaggaggaggaagagaagaaggacgagactagctcctccagcgaagcgaattcacgatgccagacacctatcaagatgaagcccaacatcgagccccctgagaacgtggagtggagcggcgcggaagccagcatgttccgtgtcttgatcgggacctattacgataatttttgtgccatcgctcgtctcattggcaccaaaacttgtcgccaggtgtacgagttcagagttaaggaaagtagtataatcgcccctgctcctgctgaggacgtggacacacccccgcgaaaaaagaagaggaagcacagattgtgggcggcacactgcaggaagatccaattaaagaaggggcagaacagattccctgggtgcagatgtaaagcccagtgcaacacaaagcaatgcccctgttatctagctgtcagagagtgtgatcccgacctgtgccttacctgcggcgccgccgaccactgggattcaaagaacgttagttgcaaaaactgttccattcagcgagggtccaagaaacatctcttgttggctccatctgacgtggccgggtggggaatatttataaaagaccccgtccaaaagaacgagttcattagcgaatattgtggagaaatcatttctcaggacgaggccgacaggagggggaaggtatatgataaatatatgtgttccttcttattcaatttgaataacgatttcgtcgttgacgccacacggaagggtaacaagatacgatttgcaaatcactcggtgaatcctaactgctacgctaaggtaatgatggtgaacggcgaccaccgaattggtatcttcgcaaaaagagcgatccagaccggtgaggaactgttttttgactatcggtacagtcaggccgacgccctcaagtatgtcggcatcgaaagagagatggagatcccttag

SEQ ID NO: 270019 - DNA, 2088 bp, Artificial Sequence
  derived and/or modified sequence
atgggccagacaggcaagaagtctgagaagggccctgtgtgctggaggaagagggtgaagtctgagtacatgaggctgcggcagctgaagcgcttcagaagagcagatgaggtgaagtccatgttcagcagcaaccggcagaagatcctggagaggacagagatcctgaaccaggagtggaagcagaggcgcatccagcctgtgcacatcctgaccagctgcagcgtgaccagtgacctggacttccccacccaggtgatccccctgaagaccctgaatgctgtggcctctgtgcccatcatgtacagctggagccccctgcagcagaacttcatggtggaggatgaaacagtgctgcacaacatcccctacatgggagatgaggtgctggaccaggacggcaccttcatcgaggagctgatcaagaactatgatggcaaggtgcatggagacagagaatgtggcttcatcaatgatgagatctttgtggagctggtgaatgccctgggccagtacaatgatgatgatgatgatgatgatggagatgatcctgaggagcgggaggagaagcagaaggacctggaggaccacagagatgacaaggagagcaggcctcccaggaagttccccagcgacaagatctttgaggccatcagctccatgtttcctgacaagggcacagctgaggagctgaaggagaagtacaaggagctgacagagcagcagctgcccggggccctgcccccagagtgcacccccaacattgatggccccaatgccaagtctgtgcagcgggagcagagcctgcacagcttccacaccctcttctgccgccgctgcttcaagtatgactgcttcctgcaccccttccacgccacccccaacacctacaagaggaagaacacagaaacagccctggacaacaagccctgtggcccccagtgctaccagcacctggagggcgccaaggagtttgctgctgccctgacagctgagcgcatcaagaccccacccaagaggcctgggggcagaagaagaggccgcctgcccaacaacagcagccggcccagcacccccaccatcaacgtgctggagagcaaggacacagacagcgaccgggaggccggcacagaaacaggaggagagaacaatgacaaggaggaggaggagaagaaggatgagaccagcagcagcagcgaggccaacagccgctgccagacccccatcaagatgaagcccaacatcgagcccccagaaaatgtggagtggagcggggctgaggcctccatgttccgggtgctgattggcacctactatgacaacttctgtgccatcgcccggctgattggcaccaagacctgccggcaggtgtatgagttccgggtgaaggagagcagcatcatcgccccagccccagcagaagatgtggacaccccacccaggaagaagaagaggaagcaccggctgtgggccgcccactgcaggaagatccagctgaagaagggccagaaccgcttccctggctgccgctgcaaggcccagtgcaacaccaagcagtgcccctgctacctggccgtgcgggagtgtgaccctgacctgtgcctgacctgtggggctgctgaccactgggacagcaagaatgtgtcctgcaagaactgcagcatccagaggggcagcaagaagcacctgctgctggcccccagtgatgtggccggctggggcatcttcatcaaggaccctgtgcagaagaatgagttcatcagcgagtactgtggggagatcatcagccaggatgaggccgaccggcggggcaaggtgtatgacaagtacatgtgcagcttcctgttcaacctgaacaatgactttgtggtggatgccaccaggaaaggaaacaagatccgctttgccaaccacagcgtgaaccccaactgctacgccaaggtgatgatggtgaatggagaccacagaattggcatctttgccaagagggccatccagacaggagaggagctgttctttgactaccgctacagccaggctgatgccctgaagtatgtgggcatcgagcgggagatggagatcccctag

SEQ ID NO: 270020 - DNA, 2088 bp, Artificial Sequence
  derived and/or modified sequence
atgggccagaccggcaagaagagcgagaagggccccgtgtgctggcgaaaaagggtgaagagtgaatacatgagacttaggcaactgaaaaggtttcgcagagcggatgaggttaagtcgatgttttcgtctaatagacagaaaatcttggagagaaccgagatcctcaaccaggaatggaaacagaggcgtatccagccagtacacatcctgacatcgtgtagcgtgacctcagacctcgattttcctacccaggtgatccccttaaagacccttaacgccgtggctagtgttcctattatgtactcctggagccctcttcagcaaaattttatggtggaggatgagaccgtgctgcacaatatcccgtacatgggcgacgaggtgctggaccaggacggaaccttcatagaagaactgatcaagaactacgacgggaaggtgcacggtgaccgcgaatgtggatttatcaacgacgaaatctttgtggagctcgtgaatgccctgggacaatacaatgatgatgatgacgacgatgacggcgacgatccagaggagcgggaggaaaaacagaaagatcttgaagatcatcgcgacgataaggagtctcgccctcccaggaagttccccagcgataaaattttcgaggcaattagctcaatgttccccgataagggcacagctgaggagcttaaagagaagtacaaggagctcacagaacagcagctgccaggcgcactgccccctgagtgtacacccaatattgatggaccgaatgccaagtctgtgcagcgggagcaatctttacatagctttcacaccctcttctgccggcgctgcttcaaatatgattgcttccttcacccatttcatgccacacccaacacatacaagcgtaagaacaccgaaactgccttagacaacaagccctgtggccctcagtgctatcagcacctggagggtgcaaaggagttcgcagcggcactgaccgctgagagaatcaagaccccacctaagcgcccaggcggaagacggcgcggtagactgccaaacaacagctccagaccaagcacaccgacaatcaacgttctggaaagtaaggacaccgatagtgatcgagaagccgggacggagaccggaggggagaacaatgataaagaggaagaggagaaaaaggatgaaaccagctctagtagtgaagctaacagccggtgccagacccccataaagatgaagccaaacatcgaacctcccgaaaacgtcgagtggagcggcgccgaagctagcatgtttagggtgctgattggcacctactacgataatttctgcgcaatagcacggctcattggcaccaaaacctgcagacaggtgtatgagttcagagtgaaagagtcgtccatcatcgcccctgcaccagctgaggatgttgacaccccgccgagaaagaagaaacgaaagcatcggctttgggccgcccattgccgaaagatccagctgaagaagggtcaaaacagatttcccggatgtcgctgtaaagcacagtgtaacactaaacagtgtccctgttatttggctgtgagagagtgcgatcccgatctttgtctgacttgcggagcagctgatcactgggattcaaagaacgtctcttgtaaaaactgcagcatccagcgcggttcaaaaaaacatctcttgttggctccaagtgatgtcgcgggctgggggattttcattaaagatccggtgcagaagaatgagttcatctcggaatattgtggagaaattatctctcaggatgaagccgacagacgcgggaaggtatacgataaatacatgtgctccttcctgtttaacctaaataacgacttcgtggtcgacgccacccgtaagggcaataaaatccgattcgctaaccactcagtcaaccctaattgttatgcaaaagtgatgatggttaacggagaccaccggatcggcatcttcgctaagcgcgctatacagacaggggaggaacttttttttgattacaggtacagtcaagccgatgcactgaagtacgtgggaatagagcgcgaaatggaaatcccgtag

SEQ ID NO: 270021 - DNA, 2088 bp, Artificial Sequence
  derived and/or modified sequence
atgggccagaccggcaagaagagcgagaagggccccgtgtgctggcgcaaaagagtgaaaagcgagtatatgagacttcggcagcttaagaggttcaggcgcgcggacgaggttaagtcaatgttctcttccaatcgtcaaaagattttggagagaaccgaaattctgaaccaagagtggaaacagcgcagaatccagccagttcatatcctgactagctgcagcgtcacatccgacttggacttcccgacccaggttattcccctgaaaaccctaaacgctgtggcttccgtaccaataatgtactcatggtcccctcttcagcaaaattttatggtggaagatgagactgtgctgcacaacatcccttacatgggggatgaagttttagaccaagatggaaccttcatcgaggagctgatcaaaaattatgatggaaaagtgcatggggaccgagaatgcgggtttattaacgatgaaatctttgtcgaactggtgaatgcattaggccagtacaacgatgacgatgacgacgacgacggggacgatcctgaagaaagggaagaaaagcaaaaggatctcgaagatcatcgtgacgataaagaatcacggccgcctcgtaagttcccctctgacaagatttttgaagcgatctcatcaatgttcccagacaaaggaacagccgaggaactgaaagaaaagtacaaggagctgactgagcagcaactgcccggtgccctgccgcccgaatgtacaccaaacattgatggcccaaacgcgaaatctgtccaacgcgagcaatccctgcactcatttcatacattgttctgtcgacggtgctttaagtatgattgcttcctgcatccatttcacgcgactcctaacacctacaagcgaaagaacaccgaaactgctctagacaataaaccctgcgggccccagtgctatcagcatttggaaggcgctaaagagtttgccgctgcactaacagcggagagaataaaaaccccgccaaagagaccaggaggtcgtcggcggggacggctgcctaacaactcgtcccggccatccacacctactatcaatgtcctcgagtccaaagatactgacagcgatcgggaggccgggactgagaccggtggcgaaaacaacgacaaagaggaggaggaaaagaaagacgaaacctcgtcatcttccgaagctaattcgcggtgccaaacccccataaagatgaaaccaaatatcgaaccccctgaaaatgtcgagtggtccggggcggaggccagtatgttccgcgtcctgatcggtacatattacgataatttttgcgccatcgcccgtctgatcggaaccaaaacatgtaggcaagtgtatgaattccgcgtgaaggagtcctcaattatcgccccagcaccagctgaggatgtagacactccccccaggaaaaaaaaaaggaaacatagactgtgggcggcccactgccgcaaaattcagctcaagaagggacagaacagatttcccggctgtcgctgcaaggcgcagtgcaatacaaaacagtgtccttgttatctggccgttcgggagtgcgaccccgatctttgcttgacatgtggtgccgcagatcactgggattcaaagaacgttagctgcaaaaactgctctatacaaagaggttcaaagaagcatcttttgcttgcccccagtgacgtggctgggtggggtatctttatcaaggatccagtacagaaaaacgagttcatttcggaatattgtggtgaaataatctcccaagacgaagctgacaggcgcggaaaggtctatgacaagtatatgtgctcttttctttttaatttgaataatgacttcgtggtggacgctacacgcaaaggcaacaagattaggttcgctaatcactctgtcaatcccaattgttacgccaaggtgatgatggtgaacggggatcacagaatcggcattttcgccaagcgtgcaatacagacaggagaagagctgtttttcgactaccggtacagccaggcagacgctcttaaatacgtcgggatcgagcgcgaaatggaaatcccctag

SEQ ID NO: 270022 - DNA, 2088 bp, Artificial Sequence
  derived and/or modified sequence
atgggtcagaccggcaagaaatccgagaagggtccagtgtgttggagaaagcgtgtgaaatctgagtacatgcggttgcgccagctgaagaggtttagaagagctgatgaagtaaaatccatgttctcaagtaacagacaaaagattctggagagaacagagatactcaatcaagaatggaaacagcgcaggattcagccggtgcacatcctcacctcttgctccgtgacctctgatctggactttccaacccaggttatccccctcaaaacacttaacgcggttgcctcagtaccaatcatgtattcttggagtccattgcaacagaacttcatggtcgaagatgagactgtactccacaatatcccctatatgggggatgaggttctcgatcaggacgggaccttcatagaggaacttatcaaaaattatgacggcaaggttcatggcgaccgcgagtgcgggttcatcaacgacgaaatctttgttgaactggtcaacgcactgggccagtacaacgatgacgacgatgatgacgatggagatgaccctgaggagcgcgaggaaaagcagaaagatctagaagaccaccgggacgacaaagagtctcgcccaccaaggaagttccctagcgataagatcttcgaagccatttcatctatgttccccgacaaaggcacagctgaggagcttaaggaaaaatacaaggagctgaccgagcaacagctgccgggtgccttacccccagaatgcacacccaacatcgatggcccaaacgccaagagcgtccaaagagagcagagcttgcactctttccacacactattctgtcgtcggtgttttaaatatgattgcttcctccatccgtttcacgcaacacccaatacctacaagagaaagaatactgagactgcgctggacaacaagccttgtggccctcaatgctaccaacatctggagggggctaaggaatttgctgccgcactgacagctgagagaataaaaactcctcctaaaaggccaggagggaggagacggggaaggctgccaaacaattcctctagaccaagcacgccgactataaatgtactggaatcaaaagacactgactcagacagggaagcgggaaccgagactggaggggagaataacgacaaagaagaggaagaaaaaaaggacgagacatccagctcttctgaggccaactcaaggtgtcagacgcctattaaaatgaagcctaatattgaacctcccgagaatgtcgagtggtcaggagccgaagcctccatgttccgagtgctaattgggacatactacgacaacttttgtgccatcgcccgactcatcggcactaagacatgcagacaggtatacgaattccgggtaaaggagtcaagtataatagcacctgctccggctgaagatgtggacacacctcccaggaaaaaaaagaggaagcatcgcctttgggctgctcattgtcgcaagattcagcttaagaaggggcagaatcgcttccctggctgcaggtgcaaagctcagtgcaacacgaagcagtgcccttgctacttggcagttcgtgaatgcgatcccgatctgtgtctgacctgcggagctgccgaccattgggactcgaagaatgtcagttgcaaaaattgctccattcagaggggtagcaaaaagcatttattgctggccccaagcgacgttgccggttggggcatttttatcaaagatcctgtgcagaagaatgagttcatctccgagtactgtggggaaatcatcagtcaggatgaagcagaccgccgtggcaaagtgtatgataagtatatgtgtagcttccttttcaaccttaacaatgactttgtcgtcgatgctacacgcaagggcaacaagattcgttttgcaaatcactccgtaaatcccaactgttatgctaaggtgatgatggtgaacggggaccacagaatcggcatctttgccaagcgtgccatccaaacaggcgaggaacttttcttcgattaccggtattcccaagccgacgcgctgaagtatgttggaatagagcgggaaatggagataccttag

SEQ ID NO: 270023 - DNA, 2088 bp, Artificial Sequence
  derived and/or modified sequence
atggggcaaacgggtaaaaaatccgaaaaaggaccagtgtgctggaggaaacgcgtaaaatcagagtatatgcgtttgcgacagcttaagcgctttcggagggcagatgaggtaaaaagtatgttttcgagtaaccgacagaaaatcctggaaaggactgaaattctaaaccaggaatggaaacagcgtcgcatccagccagtgcacatcctcacctcatgcagcgtgacctctgaccttgattttcccactcaggtcattccactcaaaaccctgaacgctgttgccagcgtgccaataatgtattcttggtctccccttcagcaaaacttcatggtcgaggacgagaccgtacttcacaatataccatacatgggagatgaagtgcttgatcaggacggcaccttcattgaggagttaatcaaaaactatgatgggaaagttcacggagaccgcgaatgtggattcattaatgatgaaattttcgtcgagcttgtgaatgcgctggggcagtacaatgacgacgatgacgatgacgacggtgatgacccagaagagagagaagagaagcaaaaggatctggaagatcaccgcgacgacaaagagtcccgccctccgaggaagttcccctctgataagatttttgaagcaatttcttccatgtttcccgataaaggaaccgcagaggagctgaaggaaaaatacaaagagctaaccgaacagcaactacccggtgccctgcccccagaatgcaccccaaatatcgatggcccaaatgccaaatccgtgcagcgcgagcagtctctgcactctttccacacactcttctgccggaggtgtttcaagtacgattgtttccttcacccttttcacgcgaccccgaacacgtataaacgcaaaaacactgaaacagctctggataataagccttgcggcccacagtgctaccaacaccttgaaggagcaaaagagttcgccgctgcactcactgctgaacggataaagacccctcctaagagaccgggaggcagaaggcgcggaagactgcccaacaatagttctaggcccagcacacctactataaatgtcttggagagcaaggatactgattcggaccgcgaggcaggcacggaaacagggggagaaaataatgataaggaggaagaggaaaagaaggatgagacatcatcgtcatcagaggccaatagccgctgccagaccccaatcaagatgaaacctaacatagagccacccgagaacgtcgagtggtccggagccgaggcatccatgtttagagtattgatcggaacctattacgataacttttgcgccatcgccaggcttatcggtaccaaaacgtgtcggcaagtgtacgagttccgagtgaaggagtctagtatcattgccccagctcccgcagaggacgtggacaccccgcctaggaagaagaaacggaaacacagattatgggccgcacattgccgaaaaatccaattaaaaaagggacagaacagattcccaggctgtcggtgcaaagcacagtgtaacaccaaacaatgcccctgttacctggctgttcgcgaatgtgatcctgatctgtgtctcacctgcggcgctgccgatcattgggattctaagaatgtttcatgtaaaaattgcagtatccagagaggctctaaaaaacatcttctcctggcgccttccgacgttgctggttggggtatctttattaaggatccggtccagaagaacgagtttatcagcgagtactgtggcgagatcatctctcaggacgaggccgacaggcgtggcaaagtttatgataaatacatgtgctcattcctgttcaacctgaataatgactttgtggtagacgccactcgaaaagggaacaagatacgctttgccaaccactctgttaaccctaactgctacgctaaagtgatgatggttaatggggaccatagaattggtatcttcgctaaacgcgctatccagaccggggaggagctcttcttcgactaccggtattcccaggctgatgctctgaagtacgtgggaattgagcgggaaatggagattccgtag

SEQ ID NO: 270024 - DNA, 2088 bp, Artificial Sequence
  derived and/or modified sequence
atgggccagaccggcaagaagagcgagaagggccccgtgtgctggagaaagagagtgaagagcgagtacatgagactgagacagctgaagagattcagaagagccgacgaggtgaagagcatgttcagcagcaacagacagaagatcctggagagaaccgagatcctgaaccaggagtggaagcagagaagaatccagcccgtgcacatcctgaccagctgcagcgtgaccagcgacctggacttccccacccaggtgatccccctgaagaccctgaacgccgtggccagcgtgcccatcatgtacagctggagccccctgcagcagaacttcatggtggaggacgagaccgtgctgcacaacatcccctacatgggcgacgaggtgctggaccaggacggcaccttcatcgaggagctgatcaagaactacgacggcaaggtgcacggcgacagagagtgcggcttcatcaacgacgagatcttcgtggagctggtgaacgccctgggccagtacaacgacgacgacgacgacgacgacggcgacgaccccgaggagagagaggagaagcagaaggacctggaggaccacagagacgacaaggagagcagaccccccagaaagttccccagcgacaagatcttcgaggccatcagcagcatgttccccgacaagggcaccgccgaggagctgaaggagaagtacaaggagctgaccgagcagcagctgcccggcgccctgccccccgagtgcacccccaacatcgacggccccaacgccaagagcgtgcagagagagcagagcctgcacagcttccacaccctgttctgcagaagatgcttcaagtacgactgcttcctgcaccccttccacgccacccccaacacctacaagagaaagaacaccgagaccgccctggacaacaagccctgcggcccccagtgctaccagcacctggagggcgccaaggagttcgccgccgccctgaccgccgagagaatcaagaccccccccaagagacccggcggcagaagaagaggcagactgcccaacaacagcagcagacccagcacccccaccatcaacgtgctggagagcaaggacaccgacagcgacagagaggccggcaccgagaccggcggcgagaacaacgacaaggaggaggaggagaagaaggacgagaccagcagcagcagcgaggccaacagcagatgccagacccccatcaagatgaagcccaacatcgagccccccgagaacgtggagtggagcggcgccgaggccagcatgttcagagtgctgatcggcacctactacgacaacttctgcgccatcgccagactgatcggcaccaagacctgcagacaggtgtacgagttcagagtgaaggagagcagcatcatcgcccccgcccccgccgaggacgtggacaccccccccagaaagaagaagagaaagcacagactgtgggccgcccactgcagaaagatccagctgaagaagggccagaacagattccccggctgcagatgcaaggcccagtgcaacaccaagcagtgcccctgctacctggccgtgagagagtgcgaccccgacctgtgcctgacctgcggcgccgccgaccactgggacagcaagaacgtgagctgcaagaactgcagcatccagagaggcagcaagaagcacctgctgctggcccccagcgacgtggccggctggggcatcttcatcaaggaccccgtgcagaagaacgagttcatcagcgagtactgcggcgagatcatcagccaggacgaggccgacagaagaggcaaggtgtacgacaagtacatgtgcagcttcctgttcaacctgaacaacgacttcgtggtggacgccaccagaaagggcaacaagatcagattcgccaaccacagcgtgaaccccaactgctacgccaaggtgatgatggtgaacggcgaccacagaatcggcatcttcgccaagagagccatccagaccggcgaggagctgttcttcgactacagatacagccaggccgacgccctgaagtacgtgggcatcgagagagagatggagatcccctag

SEQ ID NO: 270025 - DNA, 2471 bp, Artificial Sequence
  derived and/or modified sequence
tccggtcgcgtccgacacccggtgggactcagaaggcagtggagccccggcggcggcggcggcggcgcgcgggggcgacgcgcgggaacaacgcgagtcggcgcgcgggacgaagaataatcatgggccagactgggaagaaatctgagaagggaccagtttgttggcggaagcgtgtaaaatcagagtacatgcgactgagacagctcaagaggttcagacgagctgatgaagtaaagagtatgtttagttccaatcgtcagaaaattttggaaagaacggaaatcttaaaccaagaatggaaacagcgaaggatacagcctgtgcacatcctgacttcttgttcggtgaccagtgacttggattttccaacacaagtcatcccattaaagactctgaatgcagttgcttcagtacccataatgtattcttggtctcccctacagcagaattttatggtggaagatgaaactgttttacataacattccttatatgggagatgaagttttagatcaggatggtactttcattgaagaactaataaaaaattatgatgggaaagtacacggggatagagaatgtgggtttataaatgatgaaatttttgtggagttggtgaatgcccttggtcaatataatgatgatgacgatgatgatgatggagacgatcctgaagaaagagaagaaaagcagaaagatctggaggatcaccgagatgataaagaaagccgcccacctcggaaatttccttctgataaaatttttgaagccatttcctcaatgtttccagataagggcacagcagaagaactaaaggaaaaatataaagaactcaccgaacagcagctcccaggcgcacttcctcctgaatgtacccccaacatagatggaccaaatgctaaatctgttcagagagagcaaagcttacactcctttcatacgcttttctgtaggcgatgttttaaatatgactgcttcctacatccttttcatgcaacacccaacacttataagcggaagaacacagaaacagctctagacaacaaaccttgtggaccacagtgttaccagcatttggagggagcaaaggagtttgctgctgctctcaccgctgagcggataaagaccccaccaaaacgtccaggaggccgcagaagaggacggcttcccaataacagtagcaggcccagcacccccaccattaatgtgctggaatcaaaggatacagacagtgatagggaagcagggactgaaacggggggagagaacaatgataaagaagaagaagagaagaaagatgaaacttcgagctcctctgaagcaaattctcggtgtcaaacaccaataaagatgaagccaaatattgaacctcctgagaatgtggagtggagtggtgctgaagcctcaatgtttagagtcctcattggcacttactatgacaatttctgtgccattgctaggttaattgggaccaaaacatgtagacaggtgtatgagtttagagtcaaagaatctagcatcatagctccagctcccgctgaggatgtggatactcctccaaggaaaaagaagaggaaacaccggttgtgggctgcacactgcagaaagatacagctgaaaaagggtcaaaaccgctttccgggatgccgctgcaaagcacagtgcaacaccaagcagtgcccgtgctacctggctgtccgagagtgtgaccctgacctctgtcttacttgtggagccgctgaccattgggacagtaaaaatgtgtcctgcaagaactgcagtattcagcggggctccaaaaagcatctattgctggcaccatctgacgtggcaggctgggggatttttatcaaagatcctgtgcagaaaaatgaattcatctcagaatactgtggagagattatttctcaagatgaagctgacagaagagggaaagtgtatgataaatacatgtgcagctttctgttcaacttgaacaatgattttgtggtggatgcaacccgcaagggtaacaaaattcgttttgcaaatcattcggtaaatccaaactgctatgcaaaagttatgatggttaacggtgatcacaggataggtatttttgccaagagagccatccagactggcgaagagctgttttttgattacagatacagccaggctgatgccctgaagtatgtcggcatcgaaagagaaatggaaatcccttgacatctgctacctcctcccccctcctctgaaacagctgccttagcttcaggaacctcgagtactgtgggcaatttagaaaaagaacatgcagtttgaaattctgaatttgcaaagtactgtaagaataatttatagtaatgagtttaaaaatcaactttttattgccttctcaccagctgcaaagtgttttgtaccagtgaatttttgcaataatgcagtatggtacatttttcaactttgaataaagaatacttgaacttg

SEQ ID NO: 270026 - DNA, 2572 bp, Artificial Sequence
  derived and/or modified sequence
gacgacgttcgcggcggggaactcggagtagcttcgcctctgacgtttccccacgacgcaccccgaaatccccctgagctccggcggtcgcgggctgccctcgccgcctggtctggctttatgctaagtttgagggaagagtcgagctgctctgctctctattgattgtgtttctggagggcgtcctgttgaattcccacttcattgtgtacatccccttccgttccccccaaaaatctgtgccacagggttactttttgaaagcgggaggaatcgagaagcacgatcttttggaaaacttggtgaacgcctaaataatcatgggccagactgggaagaaatctgagaagggaccagtttgttggcggaagcgtgtaaaatcagagtacatgcgactgagacagctcaagaggttcagacgagctgatgaagtaaagagtatgtttagttccaatcgtcagaaaattttggaaagaacggaaatcttaaaccaagaatggaaacagcgaaggatacagcctgtgcacatcctgacttcttgttcggtgaccagtgacttggattttccaacacaagtcatcccattaaagactctgaatgcagttgcttcagtacccataatgtattcttggtctcccctacagcagaattttatggtggaagatgaaactgttttacataacattccttatatgggagatgaagttttagatcaggatggtactttcattgaagaactaataaaaaattatgatgggaaagtacacggggatagagaatgtgggtttataaatgatgaaatttttgtggagttggtgaatgcccttggtcaatataatgatgatgacgatgatgatgatggagacgatcctgaagaaagagaagaaaagcagaaagatctggaggatcaccgagatgataaagaaagccgcccacctcggaaatttccttctgataaaatttttgaagccatttcctcaatgtttccagataagggcacagcagaagaactaaaggaaaaatataaagaactcaccgaacagcagctcccaggcgcacttcctcctgaatgtacccccaacatagatggaccaaatgctaaatctgttcagagagagcaaagcttacactcctttcatacgcttttctgtaggcgatgttttaaatatgactgcttcctacatccttttcatgcaacacccaacacttataagcggaagaacacagaaacagctctagacaacaaaccttgtggaccacagtgttaccagcatttggagggagcaaaggagtttgctgctgctctcaccgctgagcggataaagaccccaccaaaacgtccaggaggccgcagaagaggacggcttcccaataacagtagcaggcccagcacccccaccattaatgtgctggaatcaaaggatacagacagtgatagggaagcagggactgaaacggggggagagaacaatgataaagaagaagaagagaagaaagatgaaacttcgagctcctctgaagcaaattctcggtgtcaaacaccaataaagatgaagccaaatattgaacctcctgagaatgtggagtggagtggtgctgaagcctcaatgtttagagtcctcattggcacttactatgacaatttctgtgccattgctaggttaattgggaccaaaacatgtagacaggtgtatgagtttagagtcaaagaatctagcatcatagctccagctcccgctgaggatgtggatactcctccaaggaaaaagaagaggaaacaccggttgtgggctgcacactgcagaaagatacagctgaaaaagggtcaaaaccgctttccgggatgccgctgcaaagcacagtgcaacaccaagcagtgcccgtgctacctggctgtccgagagtgtgaccctgacctctgtcttacttgtggagccgctgaccattgggacagtaaaaatgtgtcctgcaagaactgcagtattcagcggggctccaaaaagcatctattgctggcaccatctgacgtggcaggctgggggatttttatcaaagatcctgtgcagaaaaatgaattcatctcagaatactgtggagagattatttctcaagatgaagctgacagaagagggaaagtgtatgataaatacatgtgcagctttctgttcaacttgaacaatgattttgtggtggatgcaacccgcaagggtaacaaaattcgttttgcaaatcattcggtaaatccaaactgctatgcaaaagttatgatggttaacggtgatcacaggataggtatttttgccaagagagccatccagactggcgaagagctgttttttgattacagatacagccaggctgatgccctgaagtatgtcggcatcgaaagagaaatggaaatcccttgacatctgctacctcctcccccctcctctgaaacagctgccttagcttcaggaacctcgagtactgtgggcaatttagaaaaagaacatgcagtttgaaattctgaatttgcaaagtactgtaagaataatttatagtaatgagtttaaaaatcaactttttattg

SEQ ID NO: 270027 - protein, 243 aa, Artificial Sequence [sequence omitted]

SEQ ID NO: 270028 - protein, 167 aa, Artificial Sequence
  derived and/or modified sequence
MEHAFTPLEPLLSTGNLKYCLVILNQPLDNYFRHLWNKALLRACADGGANRLYDITEGERESFLPEFINGDFDSIRPEVREYYATKGCELISTPDQDHTDFTKCLKMLQKKIEEKDLKVDVIVTLGGLAGRFDQIMASVNTLFQATHITPFPIIIIQEESLIYLLQP

SEQ ID NO: 270029 - DNA, 732 bp, Artificial Sequence
  derived and/or modified sequence
atggagcacgccttcacccccctggagcccctgctgagcaccggcaacctgaagtactgcctggtgatcctgaaccagcccctggacaactacttcagacacctgtggaacaaggccctgctgagagcctgcgccgacggcggcgccaacagactgtacgacatcaccgagggcgagagagagagcttcctgcccgagttcatcaacggcgacttcgacagcatcagacccgaggtgagagagtactacgccaccaagggctgcgagctgatcagcacccccgaccaggaccacaccgacttcaccaagtgcctgaagatgctgcagaagaagatcgaggagaaggacctgaaggtggacgtgatcgtgaccctgggcggcctggccggcagattcgaccagatcatggccagcgtgaacaccctgttccaggccacccacatcacccccttccccatcatcatcatccaggaggagagcctgatctacctgctgcagcccggcaagcacagactgcacgtggacaccggcatggagggcgactggtgcggcctgatccccgtgggccagccctgcatgcaggtgaccaccaccggcctgaagtggaacctgaccaacgacgtgctggccttcggcaccctggtgagcaccagcaacacctacgacggcagcggcgtggtgaccgtggagaccgaccaccccctgctgtggaccatggccatcaagagctag

SEQ ID NO: 270030 - DNA, 504 bp, Artificial Sequence
  derived and/or modified sequence
atggagcacgccttcacccccctggagcccctgctgagcaccggcaacctgaagtactgcctggtgatcctgaaccagcccctggacaactacttcagacacctgtggaacaaggccctgctgagagcctgcgccgacggcggcgccaacagactgtacgacatcaccgagggcgagagagagagcttcctgcccgagttcatcaacggcgacttcgacagcatcagacccgaggtgagagagtactacgccaccaagggctgcgagctgatcagcacccccgaccaggaccacaccgacttcaccaagtgcctgaagatgctgcagaagaagatcgaggagaaggacctgaaggtggacgtgatcgtgaccctgggcggcctggccggcagattcgaccagatcatggccagcgtgaacaccctgttccaggccacccacatcacccccttccccatcatcatcatccaggaggagagcctgatctacctgctgcagccctag

SEQ ID NO: 270031 - DNA, 732 bp, Artificial Sequence
  derived and/or modified sequence
atggaacatgcctttactcccctggagcccctgctgtccaccggcaacctcaagtactgcttagtcatccttaaccagccactcgacaactattttcggcacctctggaataaggctctcttgagagcttgcgccgatggtggagctaataggctctatgatatcacagagggtgagcgcgagagctttctccctgagttcatcaatggcgacttcgactccatccggcctgaagtgcgggagtattatgctaccaagggatgcgaactgatctctacacctgatcaggatcacaccgattttacgaaatgcctcaagatgctgcaaaagaaaatcgaagagaaggatctgaaggtggacgtgatcgtaactctcggagggctagctggcaggttcgatcagatcatggccagtgtcaatactctgttccaagctacacacattactccatttccaatcataattatacaggaagagtcactgatatacctgctacagcccggcaagcaccggctacatgtcgacacaggaatggagggggattggtgcggcctaatccccgtgggccaaccttgcatgcaggtgacgacaacaggactgaaatggaatctgacgaacgacgtgctggcattcggcacactggtcagtacaagcaatacatatgatgggagcggtgtggtaaccgtcgaaacagatcatccactgttatggacaatggccattaagtcatag

SEQ ID NO: 270032 - DNA, 504 bp, Artificial Sequence
  derived and/or modified sequence
atggaacacgccttcacccccttagagccgttactatctacgggcaaccttaagtattgcttagttattctaaaccaacccctggataattatttccgccatctctggaacaaggcgttactaagagcttgcgccgatggaggcgccaaccggctctatgatatcactgaaggcgagagagaatcatttctgcccgaattcattaatggggacttcgacagcatccgccctgaggtgagggagtactacgcgaccaaaggctgcgaacttatcagtacccccgaccaagatcataccgacttcacgaagtgtctgaagatgctccagaaaaagatcgaagaaaaagatttgaaggtggatgtgatcgtgaccctaggcggactggctggccggtttgatcaaattatggccagcgtgaacaccctgttccaagctactcacattacaccctttcctattattataatacaggaggagtcgcttatataccttctgcagccttag

SEQ ID NO: 270033 - DNA, 732 bp, Artificial Sequence
  derived and/or modified sequence
atggagcacgccttcacccccctggagcccctgctgagcacaggcaacctgaagtactgcctggtgatcctgaaccagcccctggacaactacttccgccacctgtggaacaaggccctgctgcgggcctgtgctgatggaggagccaaccggctgtatgacatcacagaaggagagcgggagagcttcctgcctgagttcatcaatggagactttgacagcatccggcctgaggtgcgggagtactatgccaccaagggctgtgagctgatcagcaccccagaccaggaccacacagacttcaccaagtgcctgaagatgctgcagaagaagattgaggagaaggacctgaaggtggatgtgattgtgaccctgggcggcctggccggccgctttgaccagatcatggcctctgtgaacaccctcttccaggccacccacatcacccccttccccatcatcatcatccaggaggagagcctcatctacctgctgcagcccgggaagcaccggctgcacgtggacaccggcatggagggggactggtgtggcctcatccctgtgggccagccctgcatgcaggtgaccaccaccggcctgaagtggaacctgaccaatgatgtgctggccttcggcaccctggtgtccaccagcaacacctatgatggcagcggcgtggtgacagtggagacagaccaccccctgctgtggaccatggccatcaagagctag

SEQ ID NO: 270034 - DNA, 504 bp, Artificial Sequence
  derived and/or modified sequence
atggagcacgccttcacccccctggagcccctgctgagcacaggcaacctgaagtactgcctggtgatcctgaaccagcccctggacaactacttccgccacctgtggaacaaggccctgctgcgggcctgtgctgatggaggagccaaccggctgtatgacatcacagaaggagagcgggagagcttcctgcctgagttcatcaatggagactttgacagcatccggcctgaggtgcgggagtactatgccaccaagggctgtgagctgatcagcaccccagaccaggaccacacagacttcaccaagtgcctgaagatgctgcagaagaagattgaggagaaggacctgaaggtggatgtgattgtgaccctgggcggcctggccggccgctttgaccagatcatggcctctgtgaacaccctcttccaggccacccacatcacccccttccccatcatcatcatccaggaggagagcctcatctacctgctgcagccctag

SEQ ID NO: 270035 - DNA, 732 bp, Artificial Sequence
  derived and/or modified sequence
atggagcacgccttcacccccctggagcccctgctgagcaccggcaacctgaaatactgcttggtgatcctgaatcagcccttggacaactatttcaggcacctttggaacaaagctctcctgcgagcatgcgcagacggaggcgcaaaccggctgtatgatattacagaaggagagcgggaaagcttcttgcccgagttcatcaacggggacttcgatagcattcgaccagaggttcgagaatattatgctaccaaggggtgcgagctgataagcactcccgatcaggaccacaccgacttcactaagtgtttaaagatgttacagaagaaaatagaggaaaaagatctgaaggtcgatgtcatagtgactctaggggggctggctggtagattcgatcaaattatggcgtcagtcaatactctgtttcaggctactcacattacaccattcccaatcattattatacaagaagaaagcttgatttacttactgcagccgggaaagcaccggctccacgtggacacgggtatggaaggcgactggtgtgggctgattccggtcggtcagccctgcatgcaagtcaccacaacaggcctcaagtggaatcttacaaatgacgtcttggcttttgggacacttgtgtcaacttccaacacatacgacggcagcggcgtcgttactgtagagaccgaccatcctctcttgtggacaatggccattaagtcatag

SEQ ID NO: 270036 - DNA, 504 bp, Artificial Sequence
  derived and/or modified sequence
atggagcacgccttcacccccctggagcccctgctgagcaccggcaatctaaaatactgtctggttatcctcaaccagccactggataattactttaggcacctgtggaataaggcgctgctgagagcttgtgcagacgggggtgcaaaccgcttatacgatattacggagggggagagggaatccttcctcccagagtttattaatggcgattttgacagcatccgtcccgaagtgagggagtattatgccacaaagggttgtgagctgattagcaccccagaccaggatcacaccgattttacgaagtgtttaaaaatgttacagaagaagatagaggagaaggatctgaaggttgatgttatcgtaactttaggtggcttggccggaaggttcgaccaaattatggcctccgtgaatacactctttcaggccacccacatcactccgttccctattatcattatacaggaagagagtctgatatacttgcttcaaccatag

SEQ ID NO: 270037 - DNA, 732 bp, Artificial Sequence
  derived and/or modified sequence
atggagcatgcttttacaccactcgaacccctcctcagtacagggaatttgaaatactgcttagtgattctgaaccagccactcgacaattactttaggcacctttggaataaggctctgttacgcgcttgtgctgatggaggggcaaatcgtttatacgatattactgaaggcgagagagagtcgtttctccctgaattcatcaatggcgattttgactctattcgcccagaagtgagagaatattacgcaacgaaaggatgtgaactgatctctactccagatcaggaccacaccgacttcaccaagtgtctgaaaatgctgcagaaaaaaattgaggagaaggaccttaaggtggacgttattgtgacactggggggtcttgccggacgcttcgaccagatcatggcgagtgttaatacactgttccaggccacccacataacccctttcccaattattataatccaagaagagtccctcatctatctcctccagcctgggaagcatagactgcacgtcgacaccgggatggagggcgattggtgcggtctcattcctgtgggacagccttgtatgcaggtaaccactaccggattgaagtggaatcttaccaacgacgtcttagccttcggaaccctagtttcaacctccaatacgtacgatggctccggcgtcgtcacagtggagactgaccaccccctgctctggaccatggccattaagagttag

SEQ ID NO: 270038 - DNA, 504 bp, Artificial Sequence
  derived and/or modified sequence
atggaacacgccttcacccctcttgaacccctactttccacaggcaatttaaagtattgtctggtaattctgaaccagcctctggacaattacttccgccacctgtggaacaaagccctcctcagggcttgtgcagacggaggggctaaccgactgtatgatattacggaaggagagcgagaatcattcctgcccgagttcattaacggtgatttcgactctatccggcctgaagtcagggagtactatgctacgaagggttgcgagctgatcagtacacccgaccaggaccatacggattttaccaagtgtctcaagatgctccagaagaagatcgaagagaaagacttaaaagttgatgtcatcgtgacgcttggtggattggccggacgatttgaccagatcatggcgtccgtgaacaccctttttcaggctacacacataaccccattcccaattatcatcatacaagaggagtccttgatctacttgcttcagccctag

SEQ ID NO: 270039 - DNA, 2439 bp, Artificial Sequence
  derived and/or modified sequence
aaggctcctcagccgagcgccgagcggtcgatcgccgtagctcccgcagcctgcgatctccagtctgtggctcctaccagccattgtaggccaataatccgttatggagcatgcctttaccccgttggagcccctgctttccactgggaatttgaagtactgccttgtaattcttaatcagcctttggacaactattttcgtcatctttggaacaaagctcttttaagagcctgtgccgatggaggtgccaaccgcttatatgatatcaccgaaggagagagagaaagctttttgcctgaattcatcaatggagactttgattctattaggcctgaagtcagagaatactatgctactaagggatgtgagctcatttcaactcctgatcaagaccacactgactttactaagtgccttaaaatgctccaaaagaagatagaagaaaaagacttaaaggttgatgtgatcgtgacactgggaggccttgctgggcgttttgaccagattatggcatctgtgaataccttgttccaagcgactcacatcactccttttccaattataataatccaagaggaatcgctgatctacctgctccaaccaggaaagcacaggttgcatgtagacactggaatggagggtgattggtgtggccttattcctgttggacagccttgtatgcaggttacaaccacaggcctcaagtggaacctcacaaatgatgtgcttgcttttggaacattggtcagtacttccaatacctacgacgggtctggtgttgtgactgtggaaactgaccacccactcctctggaccatggccatcaaaagctaacctgttgactggcatccataagtgtgcctctgccttatctcatttctcaacagttcattgctcaacaagaacgattcacctgggtttgcaagaatctaaacctctctaggggaagcccactgggtttaaagatgttagtgtttagataatacaggtaacattataaatgacagatctcaattttatagtagtgggaaagatacatgctaagaaagcaaataagctctattatattcggttggaacctaatgggaatcattccactatacaattcagtactgattattcttcttacattattaatcattccatttatcctagaaaattgtttttaatttgaatcagagaaaactgttgaggttcctcttggagtctagaacatccttaaatgtctaacaacaagggctacctctgagtaccttttagtattagttttctgtatatgatatatattatcttatactgaaaaaaaattcctttcagattggggtgttagaagtgcaccaggtcactctgaccttattactgtctttggtattgtcttaaataaatcaagaatcattgacctaattgttaaatttaaaaataggtagttagcaataggtggaaagagaaatgatgtgaaagataaatgatgattcgtggagccctactcacacattaacccccaaattcaaaagtaagaatgcaaaagtctagagggggtaacagtctgcatcatcatcacaacctaaatggagaaagctgtgcagaggaaacttaagcataaaaattgaattcgtttctgacataccttagactgaaaaactgttggttcatccagaagtgtattcatattaccagaaaatgagtttgtctatggggatacatgaacttcatatactaaggagcctaactccaaagcctgcgttctcatcccagtctgatattcacctaagtttccggacccttttccttagctgtaaaatggaagcggttggactgatggtgtctgaggttctttcccacactgaaattctaaatattgacacttagcagtcatagggctgataatacacacagttactgacttagcctaaacaacctggtgcatcgaaatgtattcacctttcttttgtaaagagaccatcttctatcttctttccacctttctctgttttatgaaaccaactgttgacatacaaaccatgattgaaggagaacctgtccaacatgttttatgtacacaaatccctatgttgctataagaaaagtgaaagtaactgttttcttcttggtgctatgacagtgtgagactcaggttgtctgtagagaatgaaaggagcagtggcccgcgtgattgtggcatttaaggagcagtggcccatgtgactgtggcattttcggcacttttcattactttctgcttgaccggaagttgaggcttagctatgtttccatcttcagtttctgaagactagttatatattccttactagaaatatattcataatatataaaagaaatatatctgtgattttaaaattttgctaccaaagaatgcatgttctgtgtgccctgaaaatgttaccagtgttaataaatggatacttatcaaaaaagaa

SEQ ID NO: 270040 - DNA, 581 bp, Artificial Sequence
  derived and/or modified sequence
aaagcttttaacccgacggctcagggaggacaccggtagcaggactagaagcagcacagtggaaaaggccaataatccgttatggagcatgcctttaccccgttggagcccctgctttccactgggaatttgaagtactgccttgtaattcttaatcagcctttggacaactattttcgtcatctttggaacaaagctcttttaagagcctgtgccgatggaggtgccaaccgcttatatgatatcaccgaaggagagagagaaagctttttgcctgaattcatcaatggagactttgattctattaggcctgaagtcagagaatactatgctactaagggatgtgagctcatttcaactcctgatcaagaccacactgactttactaagtgccttaaaatgctccaaaagaagatagaagaaaaagacttaaaggttgatgtgatcgtgacactgggaggccttgctgggcgttttgaccagattatggcatctgtgaataccttgttccaagcgactcacatcactccttttccaattataataatccaagaggaatcgctgatctacctgctccaacc

SEQ ID NO: 270041 - DNA, 240 bp, Artificial Sequence
  derived and/or modified sequence
atggacatgttcagcctggacatgatcatcagcgaccccgccgccgaggccagcagagccggcaagaagcagctgagaggcgtgcagaacccctgccccagcgccagagccagacccagacacaagagcctgaacatcaaggacaagatcagcgagtgggagggcaagaaggaggtgcccacccccgcccccagcagaagagccgacggccaggaggactacctgcccagcagcacctag

SEQ ID NO: 270042 - DNA, 273 bp, Artificial Sequence
  derived and/or modified sequence
atggacatgttcagcctggacatgatcatcagcgaccccgccgccgaggccagcagagccggcaagaagcagctgagaggcgtgcagaacccctgccccagcgccagagccagacccagacacaagagcctgaacatcaaggacaagatcagcgagtgggagggcaagaaggaggtgcccacccccgcccccagcagaagagccgacggccaggaggactacctgcccagcagcaccgtggagagaagaagcagcgacggcgtgagaacctag

SEQ ID NO: 270043 - DNA, 477 bp, Artificial Sequence
  derived and/or modified sequence
atggacatgttcagcctggacatgatcatcagcgaccccgccgccgaggccagcagagccggcaagaagcagctgagaggcgtgcagaacccctgccccagcgccagagccagacccagacacaagagcctgaacatcaaggacaagatcagcgagtgggagggcaagaaggaggtgcccacccccgcccccagcagaagagccgacggccaggaggactacctgcccagcagcaccgtggagagaagaagcagcgacggcgtgagaacccaggtgaccgaggccaagaacggcatgagacccggcaccgagagcaccgagaaggagagaaacaagggcgccgtgaacgtgggcggccaggaccccgagcccggccaggacctgagccagcccgagagagaggtggaccccagctggggcagaggcagagagcccagactgggcaagctgagattccagaacgaccccctgagctag

SEQ ID NO: 270044 - DNA, 240 bp, Artificial Sequence
  derived and/or modified sequence
atggacatgttctcactcgatatgataatctcagatccagctgctgaggcttcaagagcaggtaaaaaacaattaagaggggtgcaaaacccttgtccttcagcccgagcgagacccaggcataaatctctgaacattaaggacaagatcagtgaatgggaaggcaaaaaggaggtcccaacacccgcccccagcaggcgggccgatggtcaagaggactacctgccttcatccacttag

SEQ ID NO: 270045 - DNA, 273 bp, Artificial Sequence
  derived and/or modified sequence
atggatatgtttagccttgacatgatcatttccgaccctgcagccgaagcatccagggctggaaaaaaacagctgagaggcgttcagaacccctgcccatctgccagggctcggcccaggcataagagtcttaatattaaagataagataagcgagtgggagggcaaaaaggaagttcccacaccggctcccagtcgtcgggcggacggccaggaggattacttgccaagttccactgtggaacggcgcagtagcgatggggtgagaacttag

SEQ ID NO: 270046 - DNA, 477 bp, Artificial Sequence
  derived and/or modified sequence
atggatatgttttccctagacatgattattagcgacccagcggcagaagcttcacgcgccggaaagaagcaattgcgcggcgttcagaacccttgcccatcagccagagctcgccccagacacaagtccctgaacattaaagacaaaatatccgagtgggagggcaagaaagaggttcccacgcctgcaccttcacggagagcagacgggcaagaagattacctccctagctcaactgtggaacgaagaagcagcgatggagtgaggacacaggtgactgaggcgaagaatgggatgagaccaggtaccgaaagcaccgagaaagaacggaacaagggcgcagtaaacgtgggtggccaggaccctgagcccggccaggatctgagccaacccgagagagaggtggacccttcatgggggcgggggcgcgaaccacggctgggtaaactcagatttcagaacgaccctctgtcctag

SEQ ID NO: 270047 - DNA, 542 bp, Artificial Sequence
  derived and/or modified sequence
actcccaggactgagcccggacgccgccgtctcgcgcctcggggacctgcagaaagccggtgacctggaactcccctcggtactgacatgatgacagtgtgcaggccggccaagggcagccacagccagactgaaaacctgagctacaaattggctgacaaggtcaaggtggaaggtccaaggactgagaaagaccctcgaaggcatccactttagtcctccattccattcctagagactgatcaggagtcaggcttcagaaggagtcccctggaaggcctccacaacctcacgctagagtcaagaatggatatgttcagcttggatatgatcatcagtgacccagctgcagaagccagcagggctgggaagaagcagctcagaggtgttcagaacccttgcccatctgccagagccagaccccggcacaagtccctcaacataaaggacaagatatcagaatgggaagggaagaaagaggtgcccactcctgcacccagcaggagagcagacggacaggaggattatctgccgtcctctac

SEQ ID NO: 270048 - DNA, 537 bp, Artificial Sequence
  derived and/or modified sequence
agtgttggcgtatgctttgtacacctgggccacgcagcctgagcccacaggttcccggttctcaaaagagaggatgctcccccagtcatccccaaaagcctgccgaaggaagcgctcagtggtcaaggtggaaggtccaaggactgagaaagaccctcgaaggcatccactttagtcctccattccattcctagagactgatcaggagtcaggcttcagaaggagtcccctggaaggcctccacaacctcacgctagagtcaagaatggatatgttcagcttggatatgatcatcagtgacccagctgcagaagccagcagggctgggaagaagcagctcagaggtgttcagaacccttgcccatctgccagagccagaccccggcacaagtccctcaacataaaggacaagatatcagaatgggaagggaagaaagaggtgcccactcctgcacccagcaggagagcagacggacaggaggattatctgccgtcctctacggtggagaggaggagtagtgatggggtgagaactca

SEQ ID NO: 270049 - DNA, 800 bp, Artificial Sequence
  derived and/or modified sequence
cagacccgccttccccgcagcccacggcatttccctgcggacttctgctgtgcagcctgtgttccttgacggtgtcctgcgtgacctggaactcccctcggtactgacatgatgacagtgtgcaggccggccaagggcagccacagccagactgaaaacctgagctacaaattggctgacaaggtcaaggtggaaggtccaaggactgagaaagaccctcgaaggcatccactttagtcctccattccattcctagagactgatcaggagtcaggcttcagaaggagtcccctggaaggcctccacaacctcacgctagagtcaagaatggatatgttcagcttggatatgatcatcagtgacccagctgcagaagccagcagggctgggaagaagcagctcagaggtgttcagaacccttgcccatctgccagagccagaccccggcacaagtccctcaacataaaggacaagatatcagaatgggaagggaagaaagaggtgcccactcctgcacccagcaggagagcagacggacaggaggattatctgccgtcctctacggtggagaggaggagtagtgatggggtgagaactcaggtcacagaggctaagaatggaatgaggccaggaacagagagcacagagaaggagaggaataaaggagcagtgaacgtcgggggacaggacccagagccggggcaagacctaagccagccagaacgggaagtggatcctagctggggccgaggccgagagccaagacttggcaagctacgctttcagaacgatcccctctc

SEQ ID NO: 270050 - DNA, 240 bp, Artificial Sequence
  derived and/or modified sequence
atggacatgttcagcctggacatgatcatcagtgaccctgctgctgaggccagccgggccggcaagaagcagctgcggggcgtgcagaacccctgccccagcgcccgggcccggcccaggcacaagagcctgaacatcaaggacaagatcagcgagtgggagggcaagaaggaggtgcccaccccagcccccagccggcgggcagatggccaggaggactacctgcccagcagcacctag

SEQ ID NO: 270051 - DNA, 273 bp, Artificial Sequence
  derived and/or modified sequence
atggacatgttcagcctggacatgatcatcagtgaccctgctgctgaggccagccgggccggcaagaagcagctgcggggcgtgcagaacccctgccccagcgcccgggcccggcccaggcacaagagcctgaacatcaaggacaagatcagcgagtgggagggcaagaaggaggtgcccaccccagcccccagccggcgggcagatggccaggaggactacctgcccagcagcacagtggagcggcgcagcagtgatggagtgaggacatag

SEQ ID NO: 270052 - DNA, 477 bp, Artificial Sequence
  derived and/or modified sequence
atggacatgttcagcctggacatgatcatcagtgaccctgctgctgaggccagccgggccggcaagaagcagctgcggggcgtgcagaacccctgccccagcgcccgggcccggcccaggcacaagagcctgaacatcaaggacaagatcagcgagtgggagggcaagaaggaggtgcccaccccagcccccagccggcgggcagatggccaggaggactacctgcccagcagcacagtggagcggcgcagcagtgatggagtgaggacccaggtgacagaggccaagaatggcatgaggcctggaacagagagcacagagaaggagaggaacaagggagctgtgaatgtgggcggccaggaccctgagcccggccaggacctgagccagcctgagcgggaggtggaccccagctggggccggggccgggagccccggctgggcaagctgcgcttccagaatgaccccctgtcctag

SEQ ID NO: 270053 - DNA, 240 bp, Artificial Sequence
  derived and/or modified sequence
atggacatgttcagcctggacatgatcatcagcgaccccgccgccgaggcctcaagagccggaaaaaaacaactacggggagtacagaacccttgtccatcagctcgcgcccgtccacgacacaagagccttaatatcaaggataagattagcgaatgggaaggcaagaaggaagtgccaacccccgccccttcaagacgcgcggacggccaggaggactatctgccatcttctacttag

SEQ ID NO: 270054 - DNA, 273 bp, Artificial Sequence
  derived and/or modified sequence
atggacatgttcagcctggacatgatcatcagcgaccccgccgccgaggccagccgagcagggaaaaaacaactcagaggcgttcagaacccctgtcctagcgctagagccaggccaaggcacaaatcactgaacataaaggataagatatctgaatgggagggcaaaaaagaggtgcccacccccgcaccttctaggagagccgatgggcaagaagattatctgccttcgagcaccgtggagagaaggagttctgatggagttcgtacctag

SEQ ID NO: 270055 - DNA, 477 bp, Artificial Sequence
  derived and/or modified sequence
atggacatgttcagcctggacatgatcatcagcgaccccgccgccgaagcatcccgcgcggggaagaagcagctgcggggagtgcagaacccttgcccgtctgcgagagcacgcccacgacacaaatccctgaacattaaagataaaatcagcgaatgggaaggaaagaaagaggtccctactccggccccatcccggcgcgccgatggacaggaggattacctgccctcgagtaccgtggagagacgcagcagtgatggcgtccggacacaggtgacggaagccaagaatggcatgcgacccggcacagagtctaccgaaaaagaaagaaataaaggcgctgtgaacgtgggtggccaggatccagaaccagggcaggacctcagccagcccgaacgggaggtcgacccatcctggggccgcgggcgtgagccaaggttaggcaagctccgttttcagaacgaccccctttcatag

SEQ ID NO: 270056 - DNA, 240 bp, Artificial Sequence
  derived and/or modified sequence
atggatatgttcagtttggacatgatcattagcgaccctgccgctgaggccagcagagccggtaaaaaacaactgcgaggcgtccagaacccatgtccatctgcaagagctcggcctcgccacaagagtctgaacattaaggacaagatatcagaatgggaaggaaaaaaagaagttcccacaccagcgccttcccgtagagccgacggccaagaagattatctgcctagcagcacctag

SEQ ID NO: 270057 - DNA, 273 bp, Artificial Sequence
  derived and/or modified sequence
atggacatgttctccctcgacatgattatctctgaccccgctgccgaagcttccagggctggcaaaaaacagttgcgaggcgttcaaaatccttgcccttcagccagggccagaccccgacacaaaagtttgaacatcaaggataaaatctctgaatgggaaggaaaaaaagaggttccaacacccgctcccagcagaagggcagacggccaagaagattatttaccatcttcgaccgtagagagacgcagctccgacggcgtaagaacatag

SEQ ID NO: 270058 - DNA, 477 bp, Artificial Sequence
  derived and/or modified sequence
atggatatgttctctcttgacatgatcatctccgatccggctgccgaggcctcccgtgccggtaaaaagcagctccggggagtgcagaatccttgcccttcagccagggccaggcccagacacaagtctcttaacatcaaagataagatcagcgaatgggagggcaaaaaagaggtgccgacccctgccccttcaaggcgcgctgatggccaggaggactacttgcctagctcaaccgtcgaaaggagatcctctgacggggtccgcactcaggtgaccgaggcaaagaatggtatgcgccctggtaccgagtctacagagaaagagaggaataaaggcgctgtcaacgttggcggacaagaccccgagccaggccaggacctgtctcagccagaaagggaggtcgacccgtcctggggtagaggaagagaaccccgactggggaaattgagattccaaaatgaccccctgtcctag

SEQ ID NO: 270059 - protein, 277 aa, Artificial Sequence
  derived and/or modified sequence
MSREFRGHRNCVLTLAYSAPWDLPSTPCAEEAAAGGLLVTGSTDGTAKVWQVASGCCHQTLRGHTGAVLCLVLDTPGHTAFTGSTDATIRAWDILSGEQLRVFREHRGSVICLECSRAAGTLAPGPSTRSLESCGGCSGATHSSSTASRCTARCSTPPRTTAPCASGTCAGSEVPRGPLRPCAASRGSSATRWAAPPRPCSRPDPAGPLQTPAQTPSGSQSAPPCYPRWWRPMAGEGRGARKPGREESPSQASGFSLVARRRWERECSPWGPPPFPF

SEQ ID NO: 270060 - DNA, 1428 bp, Artificial Sequence
  derived and/or modified sequence
ttccccgtccccagcgaagtcggcgccggaactgccctaatggaaaccagccgccgggcgctccgggagggctcaggccgaccccggggtccattagaggcgccccaggccgagggagcccgcggcggctggaaggacatgaaagctatgtgaccttctgccagctggaggatgaggctgccttcacatgcagcgccgactgcaccatcaggaggtgggacgtgctgaccgggcagtgtctgcaggtgtaccgaggacacacgtccatcgtgaacaggatcctggttgccaacaaccagctcttcagcagctcctatgaccggacagctcgggtctggagtgtggacaaggggcagatgtcccgggagttccggggccaccgcaactgcgtgctgaccctagcctactctgccccgtgggacctccccagcactccctgcgcggaggaggccgcggccggggggcttctggtgaccggcagcacagatggcacagccaaggtgtggcaggtggccagcggctgctgccaccagacgctgcggggccacacgggtgcagtgctgtgcctagtgctagacacgcccggccacacggccttcacaggcagcaccgacgccaccatccgtgcctgggacatcctgagtggggagcagctgcgggtgttccgggagcaccggggctccgtcatctgtctggagtgttcacgggcagcggggacgcttgcgcccgggccttcgacgcgcagtctggagagctgcggagggtgttccggggccacacattcatcatcaactgcatccaggtgcacggccaggtgctctacaccgcctcgcacgacggcgccctgcgcctctgggacgtgcgcgggctccgaggtgccccgcggccccctccgcccatgcgcagcctctcgcggctcttcagcaacaaggtgggctgcgccgccgcgcccctgcagccggcctgatcccgcggggcccctgcagacgccagcccagacacccagcggctcccagagcgccccgccctgctacccgcggtggtggcgcccgatggccggcgaggggcgaggagcgaggaagcccgggcgggaggagagcccgtcgcaggcgtctggtttttctttggtggccaggaggcgctgggagcgggagtgctcgccctggggaccgcccccttttcccttttagggtggctcctgtcctccctccccatccctgacctggcgaaaggcctagtcctggggaccctcccacctcaggggctgcaggcggactgccccagctcccccagccccacgaaactgggcctttcctgctgagaggaagtgactttttacagaagccactgaacctggttattttggcaaatcgtccgtctcgagggccttggggggaactgaaatatacagcctgaacgttaaaagtg

SEQ ID NO: 270061 - protein, 615 aa, Artificial Sequence
  derived and/or modified sequence
MAQKKYLQAKLTQFLREDRIQLWKPPYTDENKKVGLALKDLAKQYSDRLECCENEVEKVIEEIRCKAIERGTGNDNYRTTGIATIEVFLPPRLKKDRKNLLETRLHITGRELRSKIAETFGLQENYIKIVINKKQLQLGKTLEEQGVAHNVKAMVLELKQSEEDARKNFQLEEEEQNEAKLKEKQIQRTKRGLEILAKRAAETVVDPEMTPYLDIANQTGRSIRIPPSERKALMLAMGYHEKGRAFLKRKEYGIALPCLLDADKYFCECCRELLDTVDNYAVLQLDIVWCYFRLEQLECLDDAEKKLNLAQKCFKNCYGENHQRLVHIKGNCGKEKVLFLRLYLLQGIRNYHSGNDVEAYEYLNKARQLFKELYIDPSKVDNLLQLGFTAQEARLGLRACDGNVDHAATHITNRREELAQIRKEEKEKKRRRLENIRFLKGMGYSTHAAQQVLHAASGNLDEALKILLSNPQMWWLNDSNPETDNRQESPSQENIDRLVYMGFDALVAEAALRVFRGNVQLAAQTLAHNGGSLPPELPLSPEDSLSPPATSPSDSAGTSSASTDEDMETEAVNEILEDIPEHEEDYLDSTLEDEEIIIAEYLSYVENRKSATKKN

SEQ ID NO: 270062 - protein, 154 aa, Artificial Sequence
  derived and/or modified sequence
MAQKKYLQAKLTQFLREDRIQLWKPPYTDENKKVGLALKDLAKQYSDRLECCENEVEKVIEEIRCKAIERGTGNDNYRTTGIATIEVFLPPRLKKDRKNLLETRLHITGRELRSKIAETFGLQENYIKIVINKKQLQLGKTLEEQGVAHNVKAM

SEQ ID NO: 270063 - protein, 254 aa, Artificial Sequence
  derived and/or modified sequence
MAQKKYLQAKLTQFLREDRIQLWKPPYTDENKKVGLALKDLAKQYSDRLECCENEVEKVIEEIRCKAIERGTGNDNYRTTGIATIEVFLPPRLKKDRKNLLETRLHITGRELRSKIAETFGLQENYIKIVINKKQLQLGKTLEEQGVAHNVKAMVLELKQSEEDARKNFQLEEEEQNEAKLKEKQIQRTKRGLEILAKRAAETVVDPEMTPYLDIANQTGRSIRIPPSERKALMLAMGYHEKGRAFLKRKEYGI

SEQ ID NO: 270064 - protein, 164 aa, Artificial Sequence [sequence omitted]

SEQ ID NO: 270065 - DNA, 1848 bp, Artificial Sequence
  derived and/or modified sequence
atggcccaaaagaaatacttacaggccaaactcacccaattcctgcgggaagataggatccagctgtggaagcctccatacaccgatgaaaacaagaaagtgggtcttgctcttaaggacctggctaaacagtactctgaccgactagaatgttgcgagaatgaagtggagaaggtgattgaggagatcagatgtaaagcgattgagcgcggaaccggcaacgataattaccgcaccaccggtatcgccactatcgaagtgtttttaccgccgaggctgaaaaaggatcgtaaaaacctcttggaaacccgcctgcacattaccggtagagagcttcgatccaagatagctgagacctttggtctgcaagaaaattatatcaagattgtgataaataagaagcagctccaactcgggaaaaccttggaagagcagggagttgctcacaatgtcaaagccatggtgttagaactaaaacagtcggaagaagacgccaggaagaattttcagcttgaggaggaggaacaaaatgaggctaagctgaaggaaaagcagatccagcggacgaagcggggacttgagatcttggccaagagagccgccgagacagtggttgatcccgaaatgaccccttatctggacattgctaatcaaactgggaggtcaatcaggatcccgcctagtgaacgcaaggcactgatgctcgcaatgggctaccatgaaaaaggccgcgccttcttaaaaaggaaagagtacggcattgctctcccttgcctcctggatgccgacaaatatttttgtgagtgttgtagagaacttctcgataccgtggataactatgcagtgcttcagctggatattgtttggtgctattttaggctagagcagctggagtgtcttgacgatgccgagaagaaattaaatttagcacagaagtgctttaagaattgctacggtgagaaccatcagcgtctggtgcacattaagggtaactgcggcaaggagaaggtgctgtttctacggctgtatctgctgcaaggaatacgaaattaccacagtggcaatgacgtggaggcatacgagtatcttaataaggcaaggcaattgttcaaggaactgtatattgatccctccaaggtggataacctgctacaacttggcttcaccgctcaggaagcaagactgggcctccgagcatgtgatggaaacgtggaccacgcggctacacacatcactaatcggagggaagagctggctcagatacgtaaggaggagaaagagaaaaaaaggaggagactggaaaacatcaggtttctcaaagggatggggtattccacacacgcagcccagcaggtcctgcacgccgcttccgggaacctcgacgaggccctgaaaattttgctgagtaacccacagatgtggtggcttaatgatagcaaccctgaaacggacaaccgacaagagtcgccgtcccaggagaacatcgatcgcctggtctacatgggttttgatgcccttgttgccgaggctgccttgcgtgtgttcaggggaaacgttcagctggccgcccagactcttgcacataacggcggatcccttccgccggagctcccactgagccctgaggattctctttccccgcccgccaccagccccagcgacagcgctggaactagctccgctagcacagacgaggacatggagacggaagctgtaaacgaaatcctggaagatatccccgagcatgaggaagactacctcgactctacactggaggatgaggaaattattatcgctgagtatttatcatacgtggagaatcgcaagtctgcgaccaagaaaaactag

SEQ ID NO: 270066 - DNA, 465 bp, Artificial Sequence
  derived and/or modified sequence
atggcacagaagaaatatctacaggcaaagcttactcaatttctgagagaagacagaattcaattatggaagcctccctacaccgatgagaataagaaagtcggcctggccctcaaggatctggcaaaacaatatagcgataggctagagtgctgcgaaaacgaggtggagaaagtgattgaggagatacgctgcaaggcaatcgagcgggggaccggtaatgacaactaccgcacaactgggatcgccacaatcgaggtatttctcccgcccaggctgaagaaggaccgaaagaatctgctcgaaacccggctgcatatcacaggaagagagttacgcagcaaaatcgccgagacattcggactgcaggagaattacatcaaaatcgttatcaacaagaaacagctgcagttaggcaagacattggaagagcagggagtggcccacaacgtaaaggctatgtag

SEQ ID NO: 270067 - DNA, 765 bp, Artificial Sequence
  derived and/or modified sequence
atggcccagaagaagtacctacaggcgaaactgacgcagtttctacgggaggataggatccagctctggaaacctccctatacggacgaaaataagaaggtcggactagctcttaaagatctggcgaagcagtatagtgaccgcttggaatgctgtgagaacgaggtggagaaggttatagaggagatacgctgcaaggcgatcgaaaggggaaccgggaacgacaattatcgcacgaccggtatcgccactatagaggtgttcctgcctcctcgacttaaaaaagatcgcaaaaatttactagagacaaggctgcatataacaggacgggagctgcggtcaaaaatagcagagacattcggcctgcaggaaaactacattaaaatcgtgatcaataagaagcagctgcaattaggcaaaactctggaagagcagggtgtcgcacataacgttaaagcgatggtgctagaactcaagcaatctgaggaggatgcacggaaaaacttccagctcgaggaagaagagcagaacgaggccaaactcaaagagaagcagatccagagaaccaagagggggctagagattctcgccaagagagccgctgagactgtcgttgaccctgagatgaccccctacttagatatagctaaccaaacgggacgatcaatccgcataccaccatctgagagaaaggctctcatgttggcgatgggataccacgagaagggtcgagccttcctgaagcggaaagagtatgggatctag

SEQ ID NO: 270068 - DNA, 495 bp, Artificial Sequence
  derived and/or modified sequence
atggcccagaagaaatacttacaggctaaactcacccagtttcttcgtgaagacaggatacaactctggaagcccccttacaccgacgagaataaaaaggtgggcttagccctaaaggatcttgcgaagcagtattccgacaggctcgaatgctgcgaaaatgaggtagagaaagtcatagaagagatccggtgtaaagcaatcgagcgtggaacggggaatgacaactataggactactggtatagctaccatagaagtctttttgccaccgagactgaagaaagacaggaaaaacttactagaaacccggctgcatatcactggtagggagctgagatctaaggcggtgagaggaggattccgcaaatggcacgctacccacatgcggcgccggatagcagaaacatttggtctgcaggagaactacatcaaaatcgttatcaacaaaaaacagctgcaactcggcccctacgtgtcgtacggaatttcatag

SEQ ID NO: 270069 - DNA, 1848 bp, Artificial Sequence
  derived and/or modified sequence
atggcccagaagaagtacctgcaggccaagctgacccagttcctgagagaagatcgcatccagctgtggaagccaccctacacagatgagaacaagaaggtgggcctggccctgaaggacctggccaagcagtacagcgaccggctggagtgctgtgaaaatgaggtggagaaggtgattgaggagatccgctgcaaggccatcgagcggggcactggaaatgacaactaccgcaccaccggcatcgccaccatcgaggtgttcctgcccccccggctgaagaaggacaggaagaacctgctggagacccggctgcacatcaccggccgggagctgcggagcaagattgctgagaccttcggcctgcaggagaactacatcaagatcgtcatcaacaagaagcagctgcagctgggcaagaccctggaggagcagggcgtggcccacaacgtgaaggccatggtgctggagctgaagcagagtgaagaagatgccaggaagaacttccagctggaggaggaggagcagaatgaggccaagctgaaggagaagcagatccagaggaccaagaggggcctggagatcctggccaagagagctgctgagaccgtggtggaccctgagatgaccccctacctggacatcgccaaccagacaggccgcagcatccgcatcccccccagcgagaggaaggccctgatgctggccatgggctaccacgagaagggccgggccttcctgaagaggaaggagtatggcatcgccctgccctgcctgctggatgctgacaagtacttctgtgagtgctgccgggagctgctggacacagtggacaactatgctgtgctgcagctggacatcgtgtggtgctacttccggctggagcagctggagtgcctggatgatgctgagaagaagctgaacctggcccagaagtgcttcaagaactgctacggggagaaccaccagaggctggtgcacatcaagggcaactgtgggaaggagaaggtgctcttcctgcggctgtacctgctgcagggcatccggaactaccacagcggaaatgatgtggaggcctatgagtacctgaacaaggcccggcagctgttcaaggagctgtacatcgaccccagcaaggtggacaacctgctgcagctgggcttcaccgcccaggaggcccggctgggcctgcgggcctgtgatggaaatgtggaccatgctgccacccacatcaccaacagaagagaggagctggcccagatcaggaaggaggagaaggagaagaagagaagaaggctggagaacatccgcttcctgaagggcatgggctacagcacccacgccgcccagcaggtgctgcatgctgccagcggcaacctggatgaggccctgaagatcctgctgagcaacccccagatgtggtggctgaatgacagcaaccctgagacagacaaccggcaggagagccccagccaggagaacatcgaccggctggtgtacatgggctttgatgccctggtggccgaggccgccctgcgggtcttcagaggaaatgtgcagctggccgcccagaccctggcccacaatggaggcagcctgcccccagagctgcccctgagccctgaggacagcctgagccccccagccaccagccccagcgacagcgctggcaccagcagcgccagcacagatgaggacatggagacagaagctgtgaatgagatcctggaggacatccctgagcacgaggaggactacctggacagcaccctggaggatgaggagatcatcatcgccgagtacctgtcctatgtggagaacaggaagagcgccaccaagaagaactag

SEQ ID NO: 270070 - DNA, 465 bp, Artificial Sequence
  derived and/or modified sequence
atggcccagaagaagtacctgcaggccaagctgacccagttcctgagagaagatcgcatccagctgtggaagccaccctacacagatgagaacaagaaggtgggcctggccctgaaggacctggccaagcagtacagcgaccggctggagtgctgtgaaaatgaggtggagaaggtgattgaggagatccgctgcaaggccatcgagcggggcactggaaatgacaactaccgcaccaccggcatcgccaccatcgaggtgttcctgcccccccggctgaagaaggacaggaagaacctgctggagacccggctgcacatcaccggccgggagctgcggagcaagattgctgagaccttcggcctgcaggagaactacatcaagatcgtcatcaacaagaagcagctgcagctgggcaagaccctggaggagcagggcgtggcccacaacgtgaaggccatgtag

SEQ ID NO: 270071 - DNA, 765 bp, Artificial Sequence
  derived and/or modified sequence
atggcccagaagaagtacctgcaggccaagctgacccagttcctgagagaagatcgcatccagctgtggaagccaccctacacagatgagaacaagaaggtgggcctggccctgaaggacctggccaagcagtacagcgaccggctggagtgctgtgaaaatgaggtggagaaggtgattgaggagatccgctgcaaggccatcgagcggggcactggaaatgacaactaccgcaccaccggcatcgccaccatcgaggtgttcctgcccccccggctgaagaaggacaggaagaacctgctggagacccggctgcacatcaccggccgggagctgcggagcaagattgctgagaccttcggcctgcaggagaactacatcaagatcgtcatcaacaagaagcagctgcagctgggcaagaccctggaggagcagggcgtggcccacaacgtgaaggccatggtgctggagctgaagcagagtgaagaagatgccaggaagaacttccagctggaggaggaggagcagaatgaggccaagctgaaggagaagcagatccagaggaccaagaggggcctggagatcctggccaagagagctgctgagaccgtggtggaccctgagatgaccccctacctggacatcgccaaccagacaggccgcagcatccgcatcccccccagcgagaggaaggccctgatgctggccatgggctaccacgagaagggccgggccttcctgaagaggaaggagtatggcatctag

SEQ ID NO: 270072 - DNA, 495 bp, Artificial Sequence
  derived and/or modified sequence
atggcccagaagaagtacctgcaggccaagctgacccagttcctgagagaagatcgcatccagctgtggaagccaccctacacagatgagaacaagaaggtgggcctggccctgaaggacctggccaagcagtacagcgaccggctggagtgctgtgaaaatgaggtggagaaggtgattgaggagatccgctgcaaggccatcgagcggggcactggaaatgacaactaccgcaccaccggcatcgccaccatcgaggtgttcctgcccccccggctgaagaaggacaggaagaacctgctggagacccggctgcacatcaccggccgggagctgcggagcaaggctgtgcggggcggcttcaggaagtggcacgccacccacatgagaagaagaattgctgagaccttcggcctgcaggagaactacatcaagatcgtcatcaacaagaagcagctgcagctgggcccctacgtgtcctatggcatctcctag

SEQ ID NO: 270073 - DNA, 1848 bp, Artificial Sequence
  derived and/or modified sequence
atggcccagaagaagtacctgcaggccaagctgacccagttcctgagagaggaccgcatccagctctggaagcccccctacacagacgaaaacaagaaagtgggactggcactcaaagatctggccaaacagtactcagatagactggagtgctgtgaaaacgaagtagaaaaggtcattgaggaaattagatgcaaagcaatagagcgggggacagggaacgataactatagaaccaccgggattgctaccatcgaggttttcctgcctccccgtctgaaaaaggatcgcaagaatctgcttgagactcgtcttcacatcacaggacgggagctccgaagcaagatcgctgagacctttgggctgcaagaaaattacattaaaatcgtgatcaataagaaacagctccaactgggaaagaccctggaggaacagggagtggcacacaatgttaaagcgatggttctggagctgaagcagtccgaagaagacgcccggaaaaatttccaattagaggaggaagaacagaacgaggccaaactgaaagagaaacagatacaaaggactaagagaggactggagatcctggccaagcgtgccgcagagactgtcgttgaccctgagatgacaccttatcttgatatagccaaccagaccggaagatccattcgaatcccaccaagtgaaagaaaggccctcatgttggccatgggctaccatgaaaaaggtcgtgcctttctcaagcggaaagagtacggaatcgccttgccatgcctcctcgatgctgataagtacttttgtgagtgttgccgggagctgctggatacagtggacaattacgccgtcctgcagctggatatcgtatggtgttattttcggctagagcaactcgaatgcctcgacgatgcggagaaaaagctgaacctcgcccagaagtgctttaagaactgctatggtgagaaccaccagaggcttgtccatattaagggaaactgcgggaaggagaaggtcttattcctgaggctgtacctgctccaaggcattagaaactaccacagcggcaacgacgtggaggcctatgaatatctcaacaaagcgagacagctcttcaaggagctttatatcgatccttctaaggtggataacctcctccagctgggattcactgcccaggaggcccgtctcgggcttcgtgcctgtgacggaaacgtggatcatgctgcaacccatataactaatcggcgggaggagctagcacagataagaaaggaagagaaggagaaaaaaagaagaaggcttgaaaacatccggtttttaaaaggaatggggtactctactcacgccgcccagcaggtgctgcacgctgccagcgggaacctcgacgaagccctgaaaatcctcctatctaacccccagatgtggtggttgaatgactccaacccggaaacagataaccggcaggagagcccctctcaggagaacattgacaggctggtgtatatgggattcgacgccctcgtcgctgaagcagcccttcgcgtcttccgcggtaatgtacaattggccgcacagaccctcgcccataacggcggatccttgccaccagaactgccgctgagcccagaagactctctaagccccccagcaacgtctccttccgactccgcgggaacttccagtgcctctactgacgaagacatggaaactgaagctgtcaacgaaattctcgaagacatccctgagcacgaggaagattacctggatagtactctggaggacgaggaaattattatcgctgagtatctgtcttatgtagaaaacagaaaatccgccacgaagaagaattag

SEQ ID NO: 270074 - DNA, 465 bp, Artificial Sequence
  derived and/or modified sequence
atggcccagaagaagtacctgcaggccaagctgacccagttcctgcgggaggaccgaatccagctgtggaaaccaccttacaccgacgaaaataagaaggtaggcctcgccctgaaagacctggccaaacagtatagtgatcggcttgaatgttgcgagaacgaggttgagaaagttattgaggagattcgctgtaaagcaattgagaggggcactgggaatgataactacaggactaccggaattgccactatcgaggtttttcttccccccagactgaaaaaagatagaaagaatctgctggaaactcgtctccacatcaccgggcgggagctgcgcagtaagattgctgaaacattcggcctccaagaaaactacattaagattgtcatcaacaaaaaacagttacagctgggcaagactctagaggagcaaggagtagcccacaacgtgaaggctatgtag

SEQ ID NO: 270075 - DNA, 765 bp, Artificial Sequence
  derived and/or modified sequence
atggcccagaagaagtacctgcaggccaagctgacccagttcctgagggaagatagaattcagctttggaaacctccatacaccgacgaaaataagaaagtaggactggctttgaaggatctggccaagcagtatagtgatagactcgagtgctgcgaaaatgaggttgaaaaggtgatagaggagatccgttgcaaggccatagaacgcggcacaggtaatgacaactatcgcaccactggcatagcgacaattgaagtttttctgcctccccgccttaaaaaagacaggaaaaatctgttagagacacgactgcatatcactggcagggagctgcgcagtaaaattgctgaaacctttgggttacaggaaaactacattaagattgttattaataaaaagcagttgcaactgggcaagacactggaggagcaaggtgtcgcccacaacgttaaagctatggttttagagcttaagcagagcgaggaggacgctcgtaagaacttccagctggaggaggaagagcagaacgaagccaagctcaaggaaaaacaaatccagaggacaaagcgaggcttggagatcctcgccaaaagggcagccgaaactgttgtggaccccgaaatgaccccctacctagacatcgccaaccagactgggcgatccattagaattccacccagcgagcgcaaagcccttatgttggccatggggtatcatgaaaagggacgcgccttcttaaaacggaaggagtatgggatatag

SEQ ID NO: 270076 - DNA, 495 bp, Artificial Sequence
  derived and/or modified sequence
atggcccagaagaagtacctgcaggccaagctgacccagttcctgcgcgaagataggattcagttatggaaaccgccatacaccgacgaaaacaagaaggtggggctggctctgaaagacctggccaagcagtactcagatcgccttgaatgctgcgagaacgaagtggagaaggtgatcgaggagatcagatgcaaagctattgaacgggggaccggcaacgataattacaggacaaccggtattgcaaccatcgaagtgttcctccctccgcggcttaagaaggaccggaaaaatctcttggaaacacgcctccacattactggacgcgagctgcgttccaaggcagtgagaggcggtttccggaagtggcatgccacacatatgcggcgacgtattgcggaaacattcggacttcaagaaaactatataaaaattgtgattaacaaaaaacaacttcaactcggaccctatgtttcttatggtatctcctag

SEQ ID NO: 270077 - DNA, 1848 bp, Artificial Sequence
  derived and/or modified sequence
atggcccagaaaaaatatttgcaggccaaacttacacagtttttgagagaagacaggattcagctgtggaaacctccttacaccgatgagaacaaaaaagtggggctcgccctaaaggaccttgccaagcaatattccgataggctcgaatgctgtgaaaatgaggttgagaaagtcatcgaagagatacgatgcaaagccatcgagcggggaaccggcaacgataactacagaaccactggcatcgcaactatcgaagtattccttcctccaaggctgaagaaagaccggaaaaatctgctcgaaactagacttcacatcacgggccgagaattgagatctaagatcgcggagaccttcggactccaggaaaattacatcaagatcgttattaataaaaaacagttgcagctgggcaagactctggaagagcagggcgtggcacacaatgttaaggccatggttcttgaactgaagcaaagcgaggaggatgctcgcaaaaattttcagttagaggaggaggaacaaaacgaagcaaaacttaaggagaagcaaattcaacggaccaagcgtggactggaaatcctcgccaagagggccgctgaaacagtcgtggatcccgaaatgactccatacctggacatcgcaaatcagacaggcagaagcatccggatccctccatccgagcggaaggccctgatgctggcaatgggataccatgaaaagggacgagcattcttaaaaaggaaggagtacggtatcgccttaccatgcctgctcgatgccgataaatacttctgcgaatgttgtcgggagttgctcgacacggtggataactacgcagtgctgcagctagatatcgtatggtgttactttcggctggaacagctggagtgcctggatgacgctgagaagaaactgaacctggcacaaaaatgttttaagaattgctacggtgagaatcatcaacgactggtgcatataaaagggaattgcggtaaggaaaaggtgttgtttctgcgtttatacctcctacagggcatcaggaattaccatagcggaaatgatgtcgaggcctatgaatacctcaataaggctagacaactctttaaggagctgtatatcgacccatccaaagtggataacttgctgcagcttggattcactgctcaggaagccaggctgggtctcagagcctgtgacggcaacgtggatcacgccgctacacacatcaccaatcggagggaagaactcgcccagatacggaaggaggagaaggaaaaaaaacggaggagattggaaaacataagattcttaaaaggaatgggatacagtacccatgccgctcagcaggtgcttcacgctgcctcgggcaacctggacgaagcattgaagatccttctgtcgaacccccaaatgtggtggctgaatgatagtaacccagagaccgacaaccgccaggaaagccctagccaagagaacatcgatcgattggtctatatgggcttcgatgccctcgttgcagaagcagctctgcgggtgtttcgcggaaatgtccagctcgctgctcagacactggctcataacggcggatcccttcctcctgagctgccgctgtcacctgaggactctctgagcccgccagctaccagcccttcggatagcgccggaacatcgagtgcctccacagacgaagacatggagacagaggccgtgaacgaaatcctggaggacatcccggagcacgaagaagactacctggatagtacgttagaagacgaagagattattatcgcagagtacctctcctacgtcgagaatagaaagtccgccaccaagaaaaactag

SEQ ID NO: 270078 - DNA, 465 bp, Artificial Sequence
  derived and/or modified sequence
atggcccagaaaaagtatctgcaagctaagctcacacaattcctgcgagaagaccgcattcagctgtggaaacctccgtacaccgacgagaacaagaaggtcggtttggcgctgaaagatctcgctaaacagtactctgacaggctcgagtgttgtgagaacgaagtagaaaaagtaatcgaagaaatcaggtgtaaggctatagaacggggtaccggcaatgataattaccggaccaccgggatcgcaacaattgaggtgttcttgcctccacgtctaaaaaaggaccgcaagaatctcctagaaacgaggctccatatcacaggaagagaactgcgctccaaaatcgccgagacatttggtctgcaggaaaactatatcaagatcgttatcaataagaagcagctccagttgggcaagacacttgaggaacagggcgtggctcataacgtgaaggccatgtag

SEQ ID NO: 270079 - DNA, 765 bp, Artificial Sequence
  derived and/or modified sequence
atggcccagaagaagtacttgcaagccaagttgacccagtttctcagggaagacaggatccagctatggaaaccaccttacaccgatgaaaacaaaaaggttggacttgctcttaaagatctagccaagcagtactcagatagactggagtgctgtgagaatgaagtggaaaaagtgattgaagagatccggtgtaaggcaatcgaacgcggtacgggtaatgacaattaccgtaccactggcatcgcaactatcgaggtgttcctgccaccaaggctgaagaaagaccgcaagaacttgctggagacaagactgcatatcactggaagagagttacgcagcaagatagcggaaacttttggattacaggagaattacatcaaaatcgtgattaataagaaacagttgcagctgggcaaaacactggaggaacaaggcgtggcacataacgtgaaagctatggtgttagaactaaagcagagcgaggaagacgccagaaagaactttcagctagaagaagaagaacaaaacgaggccaaacttaaagagaaacaaatccagcggactaaacgcggtctggagatcttagccaagagggccgctgagaccgtcgtggaccctgagatgacaccttaccttgatattgctaaccaaaccggtagatcgatccggatccctccttccgaaagaaaagctttgatgttggctatgggataccacgaaaaaggtagggccttcctgaaacggaaggaatatgggatttag

SEQ ID NO: 270080 - DNA, 495 bp, Artificial Sequence
  derived and/or modified sequence
atggcacagaaaaagtatctgcaagctaaactgacccagtttttgagggaggatcgaattcagctgtggaaaccaccgtacaccgatgagaacaaaaaggttggtctcgccctgaaggatttagccaagcagtactcagaccgactagaatgttgcgagaatgaggtcgagaaggttatcgaggagatccgatgcaaagctatcgagaggggcacagggaacgacaactaccgtactacaggtatcgccacaatcgaggttttcttgccaccaagactaaagaaagaccgtaagaatctgcttgagactaggctgcacatcaccggtagagaattacggtccaaagcagtcagaggcggttttcgcaaatggcacgctacccacatgcgcaggagaattgctgaaacgtttggcctccaggaaaattacatcaaaatagttattaataagaaacagctgcagcttggaccgtacgtgtcctatggcatctcatag

SEQ ID NO: 270081 - DNA, 1848 bp, Artificial Sequence
  derived and/or modified sequence
atggcccagaagaagtacctgcaggccaagctgacccagttcctgagagaggacagaatccagctgtggaagcccccctacaccgacgagaacaagaaggtgggcctggccctgaaggacctggccaagcagtacagcgacagactggagtgctgcgagaacgaggtggagaaggtgatcgaggagatcagatgcaaggccatcgagagaggcaccggcaacgacaactacagaaccaccggcatcgccaccatcgaggtgttcctgccccccagactgaagaaggacagaaagaacctgctggagaccagactgcacatcaccggcagagagctgagaagcaagatcgccgagaccttcggcctgcaggagaactacatcaagatcgtgatcaacaagaagcagctgcagctgggcaagaccctggaggagcagggcgtggcccacaacgtgaaggccatggtgctggagctgaagcagagcgaggaggacgccagaaagaacttccagctggaggaggaggagcagaacgaggccaagctgaaggagaagcagatccagagaaccaagagaggcctggagatcctggccaagagagccgccgagaccgtggtggaccccgagatgaccccctacctggacatcgccaaccagaccggcagaagcatcagaatcccccccagcgagagaaaggccctgatgctggccatgggctaccacgagaagggcagagccttcctgaagagaaaggagtacggcatcgccctgccctgcctgctggacgccgacaagtacttctgcgagtgctgcagagagctgctggacaccgtggacaactacgccgtgctgcagctggacatcgtgtggtgctacttcagactggagcagctggagtgcctggacgacgccgagaagaagctgaacctggcccagaagtgcttcaagaactgctacggcgagaaccaccagagactggtgcacatcaagggcaactgcggcaaggagaaggtgctgttcctgagactgtacctgctgcagggcatcagaaactaccacagcggcaacgacgtggaggcctacgagtacctgaacaaggccagacagctgttcaaggagctgtacatcgaccccagcaaggtggacaacctgctgcagctgggcttcaccgcccaggaggccagactgggcctgagagcctgcgacggcaacgtggaccacgccgccacccacatcaccaacagaagagaggagctggcccagatcagaaaggaggagaaggagaagaagagaagaagactggagaacatcagattcctgaagggcatgggctacagcacccacgccgcccagcaggtgctgcacgccgccagcggcaacctggacgaggccctgaagatcctgctgagcaacccccagatgtggtggctgaacgacagcaaccccgagaccgacaacagacaggagagccccagccaggagaacatcgacagactggtgtacatgggcttcgacgccctggtggccgaggccgccctgagagtgttcagaggcaacgtgcagctggccgcccagaccctggcccacaacggcggcagcctgccccccgagctgcccctgagccccgaggacagcctgagcccccccgccaccagccccagcgacagcgccggcaccagcagcgccagcaccgacgaggacatggagaccgaggccgtgaacgagatcctggaggacatccccgagcacgaggaggactacctggacagcaccctggaggacgaggagatcatcatcgccgagtacctgagctacgtggagaacagaaagagcgccaccaagaagaactag

SEQ ID NO: 270082 - DNA, 465 bp, Artificial Sequence
  derived and/or modified sequence
atggcccagaagaagtacctgcaggccaagctgacccagttcctgagagaggacagaatccagctgtggaagcccccctacaccgacgagaacaagaaggtgggcctggccctgaaggacctggccaagcagtacagcgacagactggagtgctgcgagaacgaggtggagaaggtgatcgaggagatcagatgcaaggccatcgagagaggcaccggcaacgacaactacagaaccaccggcatcgccaccatcgaggtgttcctgccccccagactgaagaaggacagaaagaacctgctggagaccagactgcacatcaccggcagagagctgagaagcaagatcgccgagaccttcggcctgcaggagaactacatcaagatcgtgatcaacaagaagcagctgcagctgggcaagaccctggaggagcagggcgtggcccacaacgtgaaggccatgtag

SEQ ID NO: 270083 - DNA, 765 bp, Artificial Sequence
  derived and/or modified sequence
atggcccagaagaagtacctgcaggccaagctgacccagttcctgagagaggacagaatccagctgtggaagcccccctacaccgacgagaacaagaaggtgggcctggccctgaaggacctggccaagcagtacagcgacagactggagtgctgcgagaacgaggtggagaaggtgatcgaggagatcagatgcaaggccatcgagagaggcaccggcaacgacaactacagaaccaccggcatcgccaccatcgaggtgttcctgccccccagactgaagaaggacagaaagaacctgctggagaccagactgcacatcaccggcagagagctgagaagcaagatcgccgagaccttcggcctgcaggagaactacatcaagatcgtgatcaacaagaagcagctgcagctgggcaagaccctggaggagcagggcgtggcccacaacgtgaaggccatggtgctggagctgaagcagagcgaggaggacgccagaaagaacttccagctggaggaggaggagcagaacgaggccaagctgaaggagaagcagatccagagaaccaagagaggcctggagatcctggccaagagagccgccgagaccgtggtggaccccgagatgaccccctacctggacatcgccaaccagaccggcagaagcatcagaatcccccccagcgagagaaaggccctgatgctggccatgggctaccacgagaagggcagagccttcctgaagagaaaggagtacggcatctag

SEQ ID NO: 270084 - DNA, 495 bp, Artificial Sequence
  derived and/or modified sequence
atggcccagaagaagtacctgcaggccaagctgacccagttcctgagagaggacagaatccagctgtggaagcccccctacaccgacgagaacaagaaggtgggcctggccctgaaggacctggccaagcagtacagcgacagactggagtgctgcgagaacgaggtggagaaggtgatcgaggagatcagatgcaaggccatcgagagaggcaccggcaacgacaactacagaaccaccggcatcgccaccatcgaggtgttcctgccccccagactgaagaaggacagaaagaacctgctggagaccagactgcacatcaccggcagagagctgagaagcaaggccgtgagaggcggcttcagaaagtggcacgccacccacatgagaagaagaatcgccgagaccttcggcctgcaggagaactacatcaagatcgtgatcaacaagaagcagctgcagctgggcccctacgtgagctacggcatcagctag

SEQ ID NO: 270085 - DNA, 198 bp, Artificial Sequence
  derived and/or modified sequence
atgaccgtattctttaaaacccttagaaaccactggaaaaagaccacagccggcctttgcctgctgacctggggagggcactggctctacggcaagcactgcgacaatctactgcgccgtgctgcctgtcaggaggctcaacactaccaggacgagtcacggtgggaacccactctgtccagaaccccgggaagctag

SEQ ID NO: 270086 - DNA, 198 bp, Artificial Sequence
  derived and/or modified sequence
atgacagtctttttcaagaccctgcgcaaccactggaagaagacaacagctggcctctgcctgcttacatggggcggccactggctatacggcaagcattgtgataacttgctgcgaagagccgcgtgccaggaggcacagcactaccaagacgagagccgttgggaacccaccttgtctagaactccaggaagttag

SEQ ID NO: 270087 - DNA, 735 bp, Artificial Sequence
  derived and/or modified sequence
atgactgtattttttaagacactacgaaaccactggaaaaagacgacagccggcctttgcctccttacttgggggggtcattggctctatgggaaacactgcgacaatcttctgcgacgagccgcctgccaggaagctcaggtgtttggtaatcagctgatcccaccgaatgcccaggttaagaaagctacagtgtttctgaatcccgcagcttgcaaggggacattgttcgagaagaatgccgcccccattctgcacctttctggcatggatgttacaatagtcaagacggattatgaaggccaggccaaaaagttactggaattgatggagaatacagacgttattattgtggccggaggcgacggaaccctgcaggaggtcgtaacaggcgtactgcgcagaacagacgaggctactttttctaaaatacccataggctttattccattaggagaaacttcatcattgagtcacaccctcttcgctgaatccggcaataaagtgcagcatatcactgacgccactctagccatcgtcaagggcgagaccgtgcccctcgacgttctgcagattaaaggagagaaggaacaacccgtttttgccatgacaggtctcagatggggcagcttcagggacgcgggtgtcaaagtaagcaagtactggtatcttggtcctctaaagatcaaggctgcacactttttctcgactcttaagccctttcctaaaagatag

SEQ ID NO: 270088 - DNA, 198 bp, Artificial Sequence
  derived and/or modified sequence
atgaccgtcttcttcaagaccctgaggaaccactggaagaagaccacagctggcctgtgcctgctgacctggggcggccactggctgtatggcaagcactgtgacaacctgctgcggcgggccgcctgccaggaggcccagcactaccaggatgagagccgctgggagcccaccctgagcaggaccccaggcagctag

SEQ ID NO: 270089 - DNA, 735 bp, Artificial Sequence
  derived and/or modified sequence
atgaccgtcttcttcaagaccctgaggaaccactggaagaagaccacagctggcctgtgcctgctgacctggggcggccactggctgtatggcaagcactgtgacaacctgctgcggcgggccgcctgccaggaggcccaggtgtttggaaaccagctgatccccccaaatgcccaggtgaagaaggccaccgtcttcctgaacccagctgcctgcaagggcaccctgtttgagaagaatgctgcccccatcctgcacctgagcggcatggatgtgaccatcgtgaagacagattatgagggccaggccaagaagctgctggagctgatggagaacacagatgtgatcatcgtggccggaggagatggcaccctgcaggaggtggtgactggagtgctgcggaggacagatgaggccaccttcagcaagatccccatcggcttcatccccctgggggagaccagcagcctgagccacaccctgtttgctgagagcggcaacaaggtgcagcacatcacagatgccaccctggccatcgtgaagggggagaccgtgcccctggatgtgctgcagatcaagggggagaaggagcagcctgtgtttgccatgacaggcctgcgctggggcagcttcagagatgctggggtgaaggtgtccaagtactggtacctgggccccctgaagatcaaggccgcccacttcttcagcaccctgaagcccttccccaagaggtag

SEQ ID NO: 270090 - DNA, 198 bp, Artificial Sequence
  derived and/or modified sequence
atgaccgtgttcttcaagaccctgcggaaccactggaagaagaccaccgcgggcctgtgcctcctcacctggggtgggcattggctttatggcaaacactgtgataatctgcttagaagagctgcctgtcaggaagcacaacattaccaggatgaatctcggtgggagcccactttgagccgaactcccggatcctag

SEQ ID NO: 270091 - DNA, 198 bp, Artificial Sequence
  derived and/or modified sequence
atgaccgtgttcttcaagaccctgcggaaccactggaagaagaccactgctgggctgtgcttattgacctggggagggcattggctgtatgggaaacactgtgataaccttctgaggcgggctgcttgtcaggaggcacagcactaccaggacgagagccgatgggaacccactctctcccggactccaggaagttag

SEQ ID NO: 270092 - DNA, 735 bp, Artificial Sequence
  derived and/or modified sequence
atgaccgtgttcttcaagaccctgcggaaccactggaagaagaccacagccggtctctgcctgctaacctggggtggtcactggctgtacggtaaacattgcgataacctccttcgcagggctgcctgccaggaggcacaggttttcggcaaccaactgatccctcccaacgcccaggtaaaaaaggcaaccgtattcttgaatccagcagcctgtaaaggcacactgttcgaaaagaatgccgcccccatcttgcatttatcagggatggacgtgacaattgttaagaccgactatgagggtcaggccaagaagctgttggagctgatggagaatactgacgttatcatagtcgccggaggagatgggaccctgcaggaagtggtgacaggcgtccttaggagaaccgacgaggcaacgttcagtaagatacccatcggtttcatccccttaggcgaaactagtagcttgagccacacgctgtttgctgagtctggaaacaaagtacaacacataacggatgcaaccctggccatcgttaagggcgagacagtcccactggacgtgctgcagattaagggtgagaaagaacagcctgtttttgcaatgaccgggctgcgatggggcagttttcgagatgccggtgttaaggtttctaagtactggtatctgggcccactgaagatcaaagcggcccacttttttagtacactcaaacccttcccgaaacgctag

SEQ ID NO: 270093 - DNA, 198 bp, Artificial Sequence
  derived and/or modified sequence
atgacggtatttttcaaaacactgagaaatcattggaagaagacgactgctggactgtgcctgctgacctggggaggacactggctgtacggtaagcactgtgataatctgcttagaagggcggcttgtcaagaagcacagcactaccaagacgaaagcagatgggaacccactttgagtcggaccccagggtcatag

SEQ ID NO: 270094 - DNA, 198 bp, Artificial Sequence
  derived and/or modified sequence
atgactgtgttctttaaaactttgcggaatcactggaagaagaccactgctggcctttgcctgctcacctggggcggtcattggttgtacgggaaacattgcgacaacctactgcgcagagccgcatgtcaggaggctcagcactaccaggacgaaagcaggtgggagcccacattgtcccgcactcctggatcttag

SEQ ID NO: 270095 - DNA, 735 bp, Artificial Sequence
  derived and/or modified sequence
atgacagtcttttttaagactctacgcaaccactggaagaagacaacagcgggactatgcctgctgacgtggggaggtcactggctgtatggaaagcactgcgacaatctattacggagagccgcttgccaagaggcccaggtgttcggcaaccagcttatccccccaaacgctcaggtgaagaaggccaccgtattcctgaaccccgctgcctgcaagggcacgctattcgaaaagaacgccgctcctatcctacatctatctggcatggacgtgactatcgtcaaaactgactatgagggccaggctaagaagctgttggaactgatggaaaacacagatgtcatcatcgttgccggaggcgacggaactctgcaggaggtcgtcacgggggtgctccggaggacagacgaagccacatttagcaagatacctatcggatttatcccacttggtgagacctccagtctgagccacaccctgtttgccgagagcggcaacaaggtgcagcacatcaccgatgcgactctcgccatcgttaagggtgagacagtccctctggacgtgctgcaaatcaaaggtgagaaggagcagcccgtcttcgccatgaccggacttcggtgggggagctttcgcgacgccggtgtgaaagtgagcaagtattggtacctgggacccttaaaaattaaggctgcccattttttttctactctgaagccctttcccaagagatag

SEQ ID NO: 270096 - DNA, 198 bp, Artificial Sequence
  derived and/or modified sequence
atgaccgtgttcttcaagaccctgagaaaccactggaagaagaccaccgccggcctgtgcctgctgacctggggcggccactggctgtacggcaagcactgcgacaacctgctgagaagagccgcctgccaggaggcccagcactaccaggacgagagcagatgggagcccaccctgagcagaacccccggcagctag

SEQ ID NO: 270097 - DNA, 735 bp, Artificial Sequence
  derived and/or modified sequence
atgaccgtgttcttcaagaccctgagaaaccactggaagaagaccaccgccggcctgtgcctgctgacctggggcggccactggctgtacggcaagcactgcgacaacctgctgagaagagccgcctgccaggaggcccaggtgttcggcaaccagctgatcccccccaacgcccaggtgaagaaggccaccgtgttcctgaaccccgccgcctgcaagggcaccctgttcgagaagaacgccgcccccatcctgcacctgagcggcatggacgtgaccatcgtgaagaccgactacgagggccaggccaagaagctgctggagctgatggagaacaccgacgtgatcatcgtggccggcggcgacggcaccctgcaggaggtggtgaccggcgtgctgagaagaaccgacgaggccaccttcagcaagatccccatcggcttcatccccctgggcgagaccagcagcctgagccacaccctgttcgccgagagcggcaacaaggtgcagcacatcaccgacgccaccctggccatcgtgaagggcgagaccgtgcccctggacgtgctgcagatcaagggcgagaaggagcagcccgtgttcgccatgaccggcctgagatggggcagcttcagagacgccggcgtgaaggtgagcaagtactggtacctgggccccctgaagatcaaggccgcccacttcttcagcaccctgaagcccttccccaagagatag

SEQ ID NO: 270098 - DNA, 245 bp, Artificial Sequence
  derived and/or modified sequence
ggaaaggcagagccgcgagctggaccagccgtgcaaatctctagaagatgacggtgttctttaaaacgcttcgaaatcactggaagaaaactacagctgggctctgcctgctgacctggggaggccattggctctatggaaaacactgtgataacctcctaaggagagcagcctgtcaagaagctcagcactatcaggatgaatcacgctgggagccaactctgagtagaactccaggaagttaa

SEQ ID NO: 270099 - DNA, 1046 bp, Artificial Sequence
  derived and/or modified sequence
caaatctctagaagatgacggtgttctttaaaacgcttcgaaatcactggaagaaaactacagctgggctctgcctgctgacctggggaggccattggctctatggaaaacactgtgataacctcctaaggagagcagcctgtcaagaagctcagcactatcaggatgaatcacgctgggagccaactctgagtagaactccaggaagttaaccatctggtgaagagcagttctgacgcccacccctatagactgtttgtttctggattggtcccaagaacacagaactggactggtagaagctctgggaatttgtttgtgtctgcagttgtctttgtagatttgtctaacccctgaatcatccctgatctgaataacccccaaggatatcagttcagagcaagtgttacctctaaaagtcaaatcttcttaaaattgttgattcatatttttaaagctcatctccaagttcaactgatccatatcatgtacactgttatattccatgagattttacttaaatattcatttatatggctaattatagctggattataatatttgtcctttcaaatataagacagcatttttgcccccccactgcaaaaatgtgcattataccttgcagatgaaattctgagactgagttgcctttttgttttatatcatttgagcttatgatgtcagaaataccaaaatagaaacatgaaaatcaaaagtggcaaatgtgtgaagcatttagtaataaaaataggtggcagacctcatgtttgtttctgaaatgttttaatggatgacagtgagaatagatactataaattaattcctctctttagcgattgttacaatagatactataaattaattcctctctttagcagttgttacagtatatactataattcctctttttagcgattgttatctagctgttctaaacctgtgttttacgaatttgattacttctttgtttaaatgtattatctttcatatggctctaagttgttttggaaatcaattcaaataaactttaatattaaattaaa

SEQ ID NO: 270100 - DNA, 976 bp, Artificial Sequence
  derived and/or modified sequence
agagccgcgagctggaccagccgtgcaaatctctagaagatgacggtgttctttaaaacgcttcgaaatcactggaagaaaactacagctgggctctgcctgctgacctggggaggccattggctctatggaaaacactgtgataacctcctaaggagagcagcctgtcaagaagctcaggtgtttggcaatcaactcattcctcccaatgcacaagtgaagaaggccactgtttttctcaatcctgcagcttgcaaagggactctatttgaaaaaaatgctgccccgattttacatttatctggcatggatgtgactattgttaagacagattatgagggacaagccaagaaactcctggaactgatggaaaacacggatgtgatcattgttgcaggaggagatgggacactgcaggaggttgttactggtgttcttcgacgaacagatgaggctaccttcagtaagattcccattggatttatcccactgggagagaccagtagtttgagtcataccctctttgccgaaagtggaaacaaagtccaacatattactgatgccacacttgccattgtgaaaggagagacagttccacttgatgtcttgcagatcaagggtgaaaaggaacagcctgtatttgcaatgaccggccttcgatggggatctttcagagatgctggcgtcaaagttagcaagtactggtatcttgggcctctaaaaatcaaagcagcccactttttcagcactcttaagccctttcccaagaggtgagcccggaggtctggaaagatgtgcagctgtccaccattgaactgtccatcacaacacggaataatcagcttgacccgacaagcaaagaagattttctgaatatctgcattgaacctgacaccatcagcaaaggagactttataactataggaagtcgaaaggtgagaaaccccaagctgcacgtggagggcacggagtgtct

SEQ ID NO: 270101 - DNA, 351 bp, Artificial Sequence
  derived and/or modified sequence
atggtcatcgagtatatcggaacaatcattaggaacgaagtagccaatagaaaagagaagctgtacgaatcccagaacaggggagtctacatgttccgaatggataacgatcacgtgattgatgcgaccctaacgggcggtccagccaggtatatcaaccactcttgcgctccaaattgcgtcgcagaagtggttactttcgagcggggccacaagattatcatctccagtagccgacgcattcaaaagggcgaggaactgtgttatgactacaagttcgattttgaagatgatcagcacaaaatcccttgtcattgtggcgccgtgaactgcagaaagtggatgaattag

SEQ ID NO: 270102 - DNA, 351 bp, Artificial Sequence
  derived and/or modified sequence
atggtgattgagtacatcggcaccatcatcagaaatgaggtggccaacaggaaggagaagctgtatgagagccagaacagaggagtgtacatgttcaggatggacaatgaccacgtgattgatgccaccctgactggaggccctgcccgctacatcaaccacagctgtgcccccaactgtgtggccgaggtggtgacctttgagcggggccacaagatcatcatcagcagcagccgccgcatccagaagggggaggagctgtgctatgactacaagtttgattttgaagatgaccagcacaagatcccctgccactgtggggctgtgaactgcaggaagtggatgaactag

SEQ ID NO: 270103 - DNA, 351 bp, Artificial Sequence
  derived and/or modified sequence
atggtgatcgagtacatcggcaccatcatccggaacgaggtggccaacaggaaggagaaactttatgaaagtcagaacaggggagtgtatatgtttagaatggataatgaccatgttattgacgcaacactaaccggaggccccgcccgatacataaaccactcatgtgcacccaattgcgtcgccgaggttgtcacctttgagaggggtcacaagatcatcataagttcctcaagacgcattcaaaagggcgaagagctttgttatgactacaaatttgattttgaagatgaccagcacaaaattccttgtcactgtggcgcggtcaattgccggaagtggatgaattag

SEQ ID NO: 270104 - DNA, 351 bp, Artificial Sequence
  derived and/or modified sequence
atggtcattgaatatatcggaactataatcagaaatgaagtagcgaacaggaaggagaagctgtatgagtctcagaaccgtggggtgtacatgtttagaatggataatgatcacgttattgatgcaactcttacaggcggacccgcaaggtacattaaccattcttgtgctcctaattgcgttgccgaagtggtaacgttcgaacgcggtcataagattattatcagttcatcgcgcagaatccagaagggagaagagctctgttatgattacaagttcgatttcgaggacgatcagcacaagatcccttgccactgcggggctgtgaattgccggaaatggatgaactag

SEQ ID NO: 270105 - DNA, 351 bp, Artificial Sequence
  derived and/or modified sequence
atggtgatcgagtacatcggcaccatcatcagaaacgaggtggccaacagaaaggagaagctgtacgagagccagaacagaggcgtgtacatgttcagaatggacaacgaccacgtgatcgacgccaccctgaccggcggccccgccagatacatcaaccacagctgcgcccccaactgcgtggccgaggtggtgaccttcgagagaggccacaagatcatcatcagcagcagcagaagaatccagaagggcgaggagctgtgctacgactacaagttcgacttcgaggacgaccagcacaagatcccctgccactgcggcgccgtgaactgcagaaagtggatgaactag

SEQ ID NO: 270106 - DNA, 93 bp, Artificial Sequence
  derived and/or modified sequence
atgcgccctcgactgtggctcctgttagccgctcagctgaccggcaggaggcgtcgcgcccgcttgagattcatgaaacaactatataagtag

SEQ ID NO: 270107 - protein, 472 aa, Artificial Sequence
  derived and/or modified sequence
VTHYKQYPPNTSKVYSYFECREKKTENSKLRKVKYEETVFYGLQYILNKYLKGKVVTKEKIQEAKDVYKEHFQDDVVNEKGWNYILEKYDGHLPIEIKAVPEGFVIPRGNVLFTVENTDPECYWLTNWIETILVQSWYPITVATNSREQKKILAKYLLETSGNLDGLEYKLHDFGYRGVSSQETAGIGASAHLVNFKGTDTVAGLALNKKYYGTKDPVPGYSVPAAEHSTITAWGKDHEKDAFEHIVTQFSSVPVSVVSNSYDIYNACEKIWGEDLRHLIVSRSTQAPLIIRPDSGNPLDTVLKVLEILGKKFPVTENSKGYKLLPPYLRVIQGDGVDINTLQEIVEGMKQKMWSIENIAFGSGGGLLQKLTRDLLNCSFKCSYVVTNGLGINVFKDPVADPNKRSKKGRLSLHRTPAGNFVTLEEGKGDLEEYGQDLLHTVFKNGKVTKSYSFDEIRKNAQLNIELEAAHH

SEQ ID NO: 270108 - protein, 120 aa, Artificial Sequence [sequence omitted]

SEQ ID NO: 270109 - protein, 491 aa, Artificial Sequence [sequence omitted]

SEQ ID NO: 270110 - protein, 368 aa, Artificial Sequence
  derived and/or modified sequence
MNPAAEAEFNILLATDSYKVTHYKQYPPNTSKVYSYFECREKKTENSKLRKVKYEETVFYGLQYILNKYLKGKVVTKEKIQEAKDVYKEHFQDDVFNEKGWNYILEKYDGHLPIEIKAVPEGFVIPRGNVLFTVENTDPECYWLTNWIETILVQSWYPITVATNSREQKKILAKYLLETSGNLDGLEYKLHDFGYRGVSSQETAGIGASAHLVNFKGTDTVAGLALIKKYYGTKDPVPGYSVPAAEHSTITAWGKDHEKDAFEHIVTQFSSVPVSVVSDSYDIYNACEKIWGEDLRHLIVSRSTQAPLIIRPDSGNPLDTVLKVLEILGKKFPVTENSKGYKLLPPYLRVIQGDGVDINTLQEVCVLY

SEQ ID NO: 270111 - protein, 60 aa, Artificial Sequence
  derived and/or modified sequence
MNPAAEAEFNILLATDSYKVTHYKQYPPNTSKVYSYFECREKKTENSKLRKVKYEETVFY

SEQ ID NO: 270112 - protein, 88 aa, Artificial Sequence
  derived and/or modified sequence
MNPAAEAEFNILLATDSYKVTHYKQYPPNTSKVYSYFECREKKTENSKLRKVKYEETVFYGLQYILNKYLKGKVVTKEKIQEAKDVYK

SEQ ID NO: 270113 - DNA, 1419 bp, Artificial Sequence
  derived and/or modified sequence
gtgacccactacaagcagtacccccccaacaccagcaaggtgtacagctacttcgagtgcagagagaagaagaccgagaacagcaagctgagaaaggtgaagtacgaggagaccgtgttctacggcctgcagtacatcctgaacaagtacctgaagggcaaggtggtgaccaaggagaagatccaggaggccaaggacgtgtacaaggagcacttccaggacgacgtggtgaacgagaagggctggaactacatcctggagaagtacgacggccacctgcccatcgagatcaaggccgtgcccgagggcttcgtgatccccagaggcaacgtgctgttcaccgtggagaacaccgaccccgagtgctactggctgaccaactggatcgagaccatcctggtgcagagctggtaccccatcaccgtggccaccaacagcagagagcagaagaagatcctggccaagtacctgctggagaccagcggcaacctggacggcctggagtacaagctgcacgacttcggctacagaggcgtgagcagccaggagaccgccggcatcggcgccagcgcccacctggtgaacttcaagggcaccgacaccgtggccggcctggccctgaacaagaagtactacggcaccaaggaccccgtgcccggctacagcgtgcccgccgccgagcacagcaccatcaccgcctggggcaaggaccacgagaaggacgccttcgagcacatcgtgacccagttcagcagcgtgcccgtgagcgtggtgagcaacagctacgacatctacaacgcctgcgagaagatctggggcgaggacctgagacacctgatcgtgagcagaagcacccaggcccccctgatcatcagacccgacagcggcaaccccctggacaccgtgctgaaggtgctggagatcctgggcaagaagttccccgtgaccgagaacagcaagggctacaagctgctgcccccctacctgagagtgatccagggcgacggcgtggacatcaacaccctgcaggagatcgtggagggcatgaagcagaagatgtggagcatcgagaacatcgccttcggcagcggcggcggcctgctgcagaagctgaccagagacctgctgaactgcagcttcaagtgcagctacgtggtgaccaacggcctgggcatcaacgtgttcaaggaccccgtggccgaccccaacaagagaagcaagaagggcagactgagcctgcacagaacccccgccggcaacttcgtgaccctggaggagggcaagggcgacctggaggagtacggccaggacctgctgcacaccgtgttcaagaacggcaaggtgaccaagagctacagcttcgacgagatcagaaagaacgcccagctgaacatcgagctggaggccgcccaccactag

SEQ ID NO: 270114 - DNA, 363 bp, Artificial Sequence
  derived and/or modified sequence
atgtggagcatcgagaacatcgccttcggcagcggcggcggcctgctgcagaagctgaccagagacctgctgaactgcagcttcaagtgcagctacgtggtgaccaacggcctgggcatcaacgtgttcaaggaccccgtggccgaccccaacaagagaagcaagaagggcagactgagcctgcacagaacccccgccggcaacttcgtgaccctggaggagggcaagggcgacctggaggagtacggccaggacctgctgcacaccgtgttcaagaacggcaaggtgaccaagagctacagcttcgacgagatcagaaagaacgcccagctgaacatcgagctggaggccgcccaccactag

SEQ ID NO: 270115 - DNA, 1419 bp, Artificial Sequence
  derived and/or modified sequence
gtgactcattataagcaatatcctcctaatacgagtaaggtgtactcctatttcgagtgtagagagaagaagactgagaacagtaagttacggaaggtgaaatatgaagaaacggtgttttacggcctccagtatattcttaacaaatatctgaagggtaaagttgtgactaaggaaaagatccaggaagctaaagatgtttacaaagaacacttccaggacgatgtggttaatgagaaggggtggaattacatccttgaaaagtatgacggccacctccctattgaaatcaaagctgtgccagagggctttgtcatccctcgaggaaatgtgctgtttacagtggaaaataccgatccagaatgctactggctgaccaattggattgagactatcctggtacaatcgtggtatccgattacagtggccaccaatagtcgcgaacaaaagaaaatcctggccaaatacctgttagagacctccgggaacctcgacggtttagaatacaaactccatgattttggctaccggggagtgagttctcaggagactgcggggatcggggcgtcagcccatctggtgaatttcaaggggacagatacggtggctggactggccttgaataaaaaatactacggtacaaaagatccagtccccggctatagtgtaccagccgccgagcattccacaattactgcctgggggaaggaccacgaaaaggacgcctttgaacacatcgtgacccagtttagctcagtgcctgtctccgtagtgagtaactcctatgacatttacaacgcctgcgagaagatctggggggaggatctgaggcacctgattgtgtctcggtctactcaggcccctctcataatcaggcctgattctgggaacccgcttgatacagtcctcaaggtactggaaatcctgggcaagaaattccccgttactgagaattccaagggttacaagctgctacccccctatttacgggtgattcaaggtgacggtgtggacattaacactttgcaagagattgtggaaggcatgaaacagaagatgtggagcatcgagaatatcgcatttgggagtggggggggcctcctgcagaagttaacccgtgatcttttgaactgctccttcaagtgtagctacgtcgtgacaaatgggctcggtatcaacgtatttaaggatcccgtggccgatcctaacaagcggtcaaagaaaggacggctgtccctccaccgcaccccagctggtaattttgtgacactcgaggagggtaagggtgaccttgaggagtatggccaggatctgctccataccgtcttcaagaatggcaaagtgacgaagtcgtattcctttgacgagatccggaaaaacgcccagttgaatatagagttagaagccgcccaccactag

SEQ ID NO: 270116 - DNA, 363 bp, Artificial Sequence
  derived and/or modified sequence
atgtggagcatagaaaacattgcctttggcagtggcggaggtcttttgcaaaagttgacacgggacctgctcaactgttcttttaaatgttcctatgtggtgacaaatggactcggcattaacgtgtttaaagaccctgtggccgacccaaacaagcgatctaaaaaggggaggctctcattgcatcgcactccggccggcaacttcgtgaccctggaagagggcaaaggggatctggaggagtacgggcaggacctactccacacggtctttaagaacggaaaggtgaccaagagctattcgtttgatgaaatccgaaagaacgctcaactgaacattgagctggaagccgcccatcattag

SEQ ID NO: 270117 - DNA, 1419 bp, Artificial Sequence
  derived and/or modified sequence
gtcacccactacaagcagtacccacccaacaccagcaaggtgtacagctactttgaatgtcgggagaagaagacagagaacagcaagctgaggaaggtgaagtatgaggagaccgtcttctacggcctgcagtacatcctgaacaagtacctgaagggcaaggtggtgaccaaggagaagatccaggaggccaaggatgtgtacaaggagcacttccaggatgatgtggtgaatgagaagggctggaactacatcctggagaagtatgatggccacctgcccatcgagatcaaggctgtgcctgagggcttcgtcatccccagaggaaatgtgctcttcaccgtggagaacacagatcctgagtgctactggctgaccaactggattgagaccatcctggtgcagagctggtaccccatcaccgtggccaccaacagccgggagcagaagaagatcctggccaagtacctgctggagaccagcggcaacctggatggcctggagtacaagctgcatgactttggctaccggggcgtgagcagccaggagacagctggcattggagccagcgcccacctggtgaacttcaagggcacagacacagtggccggcctggccctgaacaagaagtactacggcaccaaggaccctgtgcccggctacagcgtgcctgctgctgagcacagcaccatcacagcctggggcaaggaccacgagaaggatgcctttgagcacatcgtgacccagttcagctctgtgcctgtgtctgtggtgagcaacagctatgacatctacaatgcctgtgagaagatctggggcgaggacctgcggcacctgattgtgagccgcagcacccaggcccccctcatcatccggccagattctggcaaccccctggacacagtgctgaaggtgctggagatcctgggcaagaagtttcctgtgacagagaacagcaagggctacaagctgctgcccccctacctgcgggtcatccagggagatggagtggacatcaacaccctgcaggagatcgtggagggcatgaagcagaagatgtggagcattgaaaatattgcctttggaagtggcggcggcctgctgcagaagctgacccgggacctgctgaactgcagcttcaagtgcagctatgtggtgaccaacggcctgggcatcaacgtgttcaaggaccctgtggccgaccccaacaagaggagcaagaagggccgcctgagcctgcacaggaccccagctggcaactttgtgaccctggaggagggcaagggggacctggaggagtatggccaggacctgctgcacacagtgttcaagaatggcaaggtgaccaagagctacagctttgatgagatcaggaagaatgcccagctgaacatcgagctggaggccgcccaccactag

SEQ ID NO: 270118 - DNA, 363 bp, Artificial Sequence
  derived and/or modified sequence
atgtggagcattgaaaatattgcctttggaagtggcggcggcctgctgcagaagctgacccgggacctgctgaactgcagcttcaagtgcagctatgtggtgaccaacggcctgggcatcaacgtgttcaaggaccctgtggccgaccccaacaagaggagcaagaagggccgcctgagcctgcacaggaccccagctggcaactttgtgaccctggaggagggcaagggggacctggaggagtatggccaggacctgctgcacacagtgttcaagaatggcaaggtgaccaagagctacagctttgatgagatcaggaagaatgcccagctgaacatcgagctggaggccgcccaccactag

SEQ ID NO: 270119 - DNA, 1419 bp, Artificial Sequence
  derived and/or modified sequence
gtgacccactacaagcagtacccccccaacaccagcaaggtgtacagttactttgaatgccgcgaaaagaagaccgaaaactcaaaactgcggaaggtgaagtacgaggaaaccgtcttttatgggctgcaatacattttaaataaatatctgaagggaaaggtggttaccaaggagaagatccaggaagccaaagacgtttataaggagcacttccaggacgatgttgtgaatgagaaaggatggaattacatcctggagaagtacgacggacaccttccaattgagattaaggccgtgcctgaggggttcgtcataccacggggcaatgtgcttttcaccgttgaaaatactgatcctgagtgctactggcttacgaattggattgagacaattctcgtgcagtcctggtatcccattaccgtcgcaactaattcccgtgaacagaagaagattctggccaagtacttgcttgaaaccagcggcaacctggacggtctcgagtataagctgcacgattttggttaccgcggagtgagcagtcaagaaaccgcagggatcggggcttcagcacaccttgttaactttaagggaacagataccgtggccgggttggcactaaacaaaaaatactatgggaccaaagatcccgtcccaggatacagcgtgcccgctgcagagcactccaccataactgcctgggggaaagaccacgagaaagatgcattcgagcacattgttacccagttttcctctgtgcctgtgtccgtcgttagcaattcctacgacatctataacgcttgtgaaaagatctggggggaggatctgagacaccttatcgtgtccaggtccacccaagcccccctcatcattcgccccgattccgggaaccccctggataccgtcctcaaagtgttggagatcctggggaagaagttcccagtgaccgagaatagcaaaggatacaaactgctgcccccttatctacgggtaatccagggcgacggagtcgacattaatactctgcaggaaatcgtggaaggcatgaagcagaagatgtggtctatcgaaaacatagcctttgggtcaggcggcggcttgctacagaagcttacaagggatttactgaattgcagcttcaagtgctcatacgttgtaacaaatgggctggggatcaatgtgttcaaggacccagtcgcggacccaaacaagcggtctaagaagggcaggctctctcttcatcggacccctgcaggtaactttgttactctcgaggaaggtaaaggggatttggaagaatatggccaggatctgctgcatactgtgttcaaaaatggcaaggtgactaagagctattcctttgatgagatccggaagaacgcacagttgaatattgagctcgaggccgctcaccactag

SEQ ID NO: 270120 - DNA, 363 bp, Artificial Sequence
  derived and/or modified sequence
atgtggagcatcgagaacatcgccttcggcagcggcggcggcctgcttcagaaacttacccgcgatctcctgaattgcagttttaaatgttcatacgtcgtgacgaacgggctgggaatcaacgtttttaaagaccccgttgcagacccaaataagaggtcgaagaaggggaggctgagcctccacagaacacccgcgggcaatttcgtcaccctagaggagggtaagggggaccttgaggaatacggacaggatctcctgcacaccgtttttaaaaatggcaaggtgaccaaatcatactccttcgatgagatacgcaagaacgcccaactgaacattgaattggaggccgcccaccattag

SEQ ID NO: 270121 - DNA, 1419 bp, Artificial Sequence
  derived and/or modified sequence
gtgacacactacaaacagtatcctcccaatacatctaaggtgtacagctacttcgaatgcagggaaaagaagaccgagaattcaaagttaagaaaggtgaagtacgaggagaccgtcttctacggccttcagtatatattaaacaaatacctcaaggggaaggtggtcacaaaggaaaaaatccaggaggcaaaagacgtctataaggagcactttcaggatgacgtggttaatgagaaaggctggaactacatcctggaaaaatacgacggacacctccctatcgagatcaaagctgttcccgagggttttgtgattcccagagggaatgttctttttaccgttgagaacacggaccctgaatgctattggctcacgaactggatcgagaccattttagtgcagagctggtacccaatcaccgttgccaccaattctcgcgaacaaaaaaaaatcctggccaagtatctgctggagacttctggcaatctagacggactggagtacaagctgcacgattttggataccggggagtgtcgagccaggaaaccgccggtatcggcgcttcagcccacctggtcaattttaagggtacagacacggtcgctggcctcgctctcaacaagaaatattacggcaccaaggaccctgttcctggatatagcgtgcccgctgcagaacactcaactattactgcgtggggtaaagatcatgaaaaagatgccttcgagcacattgtaactcagttcagcagcgttcccgtctcagtcgtgtcgaattcctacgacatctacaatgcttgtgagaagatatggggagaggacctgcgccatctgatcgtgtcccgaagtacgcaagccccactgattatcaggcccgactccgggaatcccctggacacggtgctcaaggttctagagattctaggtaagaaatttccggtgacagaaaacagcaaaggctataagctacttccaccgtatttgagagtcatacagggcgacggtgtggacattaacacccttcaggagatcgtcgaaggaatgaagcaaaagatgtggtccatcgaaaatattgcattcggctccggtggcggactccttcagaaacttactagagacttgctcaactgcagttttaaatgcagttatgtagtgaccaatgggctgggcattaatgtcttcaaggaccccgtggcggatccaaataaacgcagcaagaagggtaggttgtccctccatcggaccccggctgggaattttgtgactctggaagaaggaaaaggagacctggaagagtatgggcaagatctgttacacaccgtttttaaaaacggtaaagtaactaagagctatagttttgatgagatccgcaagaacgctcagttgaatatcgagctggaggcagcgcaccattag

SEQ ID NO: 270122 - DNA, 363 bp, Artificial Sequence
  derived and/or modified sequence
atgtggagtattgagaatattgcctttggcagcggaggaggcctgctgcagaagctcacaagagacctgctcaattgctcttttaaatgtagctacgtcgtcacaaatggactcgggatcaatgtttttaaggacccagtagctgatcccaacaaaaggtctaaaaaagggaggctctctttgcaccgcactcccgctggtaattttgttacgctggaggagggcaagggcgacctcgaggagtacggacaggatctgcttcatactgtcttcaagaacggaaaagtgacgaaatcgtatagttttgacgagatacggaagaatgcccagttaaacatcgagttagaggccgcacaccactag

SEQ ID NO: 270123 - DNA, 2514 bp, Artificial Sequence
  derived and/or modified sequence
gttactcactataaacaatatccacccaacacaagcaaagtttattcctactttgaatgccgtgaaaagaagacagaaaactccaaattaaggaaggtgaaatatgaggaaacagtattttatgggttgcagtacattcttaataagtacttaaaaggtaaagtagtaaccaaagagaaaatccaggaagccaaagatgtctacaaagaacatttccaagatgatgtcgttaatgaaaaaggatggaactacattcttgagaaatatgatgggcatcttccaatagaaataaaagctgttcctgaaggctttgtcattcccagaggaaatgttctcttcacggtggaaaacacagatccagagtgttactggcttacaaattggattgagactattcttgttcagtcctggtatccaatcacagtggccacaaattctagagagcagaagaaaatattggccaaatatttgttagaaacttctggtaacttagatggtctggaatacaagttacatgattttggctacagaggagtctcttcccaagagactgctggcataggagcatctgctcatttggttaacttcaaaggaacagatacagtagcaggacttgctctaaataaaaaatattatggaacgaaagatcctgttccaggctattctgttccagcagcagaacacagtaccataacagcttgggggaaagaccatgaaaaagatgcttttgaacatattgtaacacagttttcatcagtgcctgtatctgtggtcagcaatagctatgacatttataatgcgtgtgagaaaatatggggtgaagatctaagacatttaatagtatcgagaagtacacaggcaccactaataatcagacctgattctggaaaccctcttgacactgtgttaaaggttttggagattttaggtaagaagtttcctgttactgagaactcaaagggttacaagttgctgccaccttatcttagagttattcaaggggatggagtagatattaataccttacaagagattgtagaaggcatgaaacaaaaaatgtggagtattgaaaatattgccttcggttctggtggaggtttgctacagaagttaacaagagatctcttgaattgttccttcaagtgtagctatgttgtaactaatggccttgggattaacgtcttcaaggacccggttgctgatcccaacaaaaggtccaaaaagggccgattatctttacataggacgccagcagggaattttgttacactggaagaaggaaaaggagaccttgaggaatatggtcaggatcttctccatactgtcttcaagaatggcaaggtgacaaaaagctattcatttgatgaaataagaaaaaatgcacagctgaatattgaactggaagcagcacatcattaggctttatgactgggtgtgtgttgtgtgtgtgtgtgtgcatgcacacacacacacacctttgtgtatgtaatacataatgtttattgtacagatgtgtggggtttgtgttttatgacacattacagccaaattatttgttggtttatggacatactgccctttcattttttttcttttccagtgtttaggtgatctcaaattaggaaatgcatttaactatgtaaaagattagtgctaaagtaagctttttagggccctttgccaataggtagtcattcaatctggtattgatcttttcacaaataacagaactgagaaacttttatatataactgatgatcacataaaacagatttgcataaaattaccatgattgctttatgtttatatttaacttgtatttttgtacaaacaagattgtgtaagatatatttgaagtttcagtgatttaacagtctttccaacttttcatgatttttatgagcacagactttcaagaaaatacttgaaaataaattacattgccttttgtccattaatcagcaaataaaacatggccttaacaaagttgtttgtgttattgcacaatttgaaaattatgtcgggacataccctatagaattactaaccttactgccccttgtagaatatgtattaatcattctacattaaagaaaataatggttcttactggaatgtctaggcactgtacagttattatatgtcttggttgttgtattgtaccagtgaaatgccaaatttgaaaggcctgtactgcaattttatatgtcagagattgcctgtggctctaatatgcacctcaagattttaaggagataatgtttttagagagaatttctgcttccactatagaatatatacataaatgtaaaatacttacaaaagtggaagtagtgtattttaaagtaattacacttctgaatttatttttcatattctatagttggcatgacttaaatgaattactggagtgggtagtgagtgtacttatcttaaatgtttcaattctgttatattttttattaagttttttaaaaattaaattgatattaaattgtaaaaaaaaaaaaaaaa

SEQ ID NO: 270124 - DNA, 643 bp, Artificial Sequence
  derived and/or modified sequence
agtatcgagaagtacacaggcaccactaataatcagacctgattctggaaaccctcttgacactgtgttaaaggttttggagattttaggtaagaagtttcctgttactgagaactcaaagggttacaagttgctgccaccttatcttagagttattcaaggggatggagtagatattaataccttacaagagattgtagaaggcatgaaacaaaaaatgtggagtattgaaaatattgccttcggttctggtggaggtttgctacagaagttaacaagagatctcttgaattgttccttcaagtgtagctatgttgtaactaatggccttgggattaacgtcttcaaggacccggttgctgatcccaacaaaaggtccaaaaagggccgattatctttacataggacgccagcagggaattttgttacactggaagaaggaaaaggagaccttgaggaatatggtcaggatcttctccatactgtcttcaagaatggcaaggtgacaaaaagctattcatttgatgaaataagaaaaaatgcacagctgaatattgaactggaagcagcacatcattaggctttatgactgggtgtgtgttgttgtatgtaatacataatgtttattgtacagatgtgtggg

SEQ ID NO: 270125 - DNA, 1476 bp, Artificial Sequence
  derived and/or modified sequence
atgaaccccgccgccgaggccgagttcaacatcctgctggccaccgacagctacaaggtgacccactacaagcagtacccccccaacaccagcaaggtgtacagctacttcgagtgcagagagaagaagaccgagaacagcaagctgagaaaggtgaagtacgaggagaccgtgttctacggcctgcagtacatcctgaacaagtacctgaagggcaaggtggtgaccaaggagaagatccaggaggccaaggacgtgtacaaggagcacttccaggacgacgtgttcaacgagaagggctggaactacatcctggagaagtacgacggccacctgcccatcgagatcaaggccgtgcccgagggcttcgtgatccccagaggcaacgtgctgttcaccgtggagaacaccgaccccgagtgctactggctgaccaactggatcgagaccatcctggtgcagagctggtaccccatcaccgtggccaccaacagcagagagcagaagaagatcctggccaagtacctgctggagaccagcggcaacctggacggcctggagtacaagctgcacgacttcggctacagaggcgtgagcagccaggagaccgccggcatcggcgccagcgcccacctggtgaacttcaagggcaccgacaccgtggccggcctggccctgatcaagaagtactacggcaccaaggaccccgtgcccggctacagcgtgcccgccgccgagcacagcaccatcaccgcctggggcaaggaccacgagaaggacgccttcgagcacatcgtgacccagttcagcagcgtgcccgtgagcgtggtgagcgacagctacgacatctacaacgcctgcgagaagatctggggcgaggacctgagacacctgatcgtgagcagaagcacccaggcccccctgatcatcagacccgacagcggcaaccccctggacaccgtgctgaaggtgctggagatcctgggcaagaagttccccgtgaccgagaacagcaagggctacaagctgctgcccccctacctgagagtgatccagggcgacggcgtggacatcaacaccctgcaggagatcgtggagggcatgaagcagaagatgtggagcatcgagaacatcgccttcggcagcggcggcggcctgctgcagaagctgaccagagacctgctgaactgcagcttcaagtgcagctacgtggtgaccaacggcctgggcatcaacgtgttcaaggaccccgtggccgaccccaacaagagaagcaagaagggcagactgagcctgcacagaacccccgccggcaacttcgtgaccctggaggagggcaagggcgacctggaggagtacggccaggacctgctgcacaccgtgttcaagaacggcaaggtgaccaagagctacagcttcgacgagatcagaaagaacgcccagctgaacatcgagctggaggccgcccaccactag

SEQ ID NO: 270126 - DNA, 1107 bp, Artificial Sequence
  derived and/or modified sequence
atgaaccccgcagcagaggcagaattcaacatattgctggccaccgactcctacaaagttacacattacaaacagtatccccctaataccagtaaggtttacagctactttgaatgtcgggaaaagaaaaccgagaatagtaagctcaggaaggtgaaatacgaggagaccgttttttatggcctacagtatattcttaataagtatctgaaggggaaggttgttaccaaagaaaaaattcaggaggcaaaggatgtgtacaaggagcactttcaagatgacgtgttcaacgaaaaagggtggaattatattctggaaaagtacgacggccatctccccatcgagattaaggctgtgcctgaggggttcgttattccccgtggtaacgtgttgttcaccgtggagaataccgatcccgagtgttactggcttaccaactggatcgagactatcctcgtccagtcttggtacccaatcacggttgctaccaattcccgtgaacaaaaaaaaatactggcgaaatatctgttagagacctctggcaacttggacggactcgaatataagcttcacgactttggctaccgtggggtgtcctctcaggagactgcaggcattggagcctccgcccatcttgtcaattttaagggcacagataccgttgcaggcttggcactgatcaagaagtactatggcaccaaagatccggtcccagggtactccgtgcctgctgctgaacactctaccatcaccgcctggggtaaggaccacgaaaaggacgccttcgagcacatagtcacgcagttctctagcgtcccagtctctgtggtatctgattcctacgacatttacaacgcatgtgagaaaatttggggggaggatctgcggcacctaatagtgagccggagcacacaagcccccctgatcattcggcctgattcaggcaaccctctggacacagtgctcaaggtactcgaaatcctggggaaaaagttcccggttacggagaactcgaaggggtacaagctgctacccccctacctccgggtgatccagggtgatggcgtggatatcaataccctacaggaagtgtgtgtgctctactag

SEQ ID NO: 270127 - DNA, 1476 bp, Artificial Sequence
  derived and/or modified sequence
atgaaccccgcagctgaggctgaattcaacatcctgctcgccaccgatagctataaggtcactcattacaagcaatatccccccaacacttcgaaagtgtactcttattttgaatgccgggagaaaaaaaccgagaactcaaaattgcgcaaggtgaagtatgaggaaacagttttctacggattgcagtatatcctcaataaatacttgaaggggaaggtggtaactaaagaaaaaatccaagaggcaaaagacgtgtacaaggaacacttccaggatgatgtgtttaacgaaaagggttggaattacatccttgaaaaatacgacggtcatttgccgatcgagatcaaggccgtgcccgagggcttcgtaatcccgagagggaacgtactctttaccgtcgaaaatacagatcccgaatgctactggctgactaattggatcgaaaccatactcgtacagtcatggtaccccattactgtggccacaaattcccgggagcaaaaaaagatcctcgccaaatacctcctggagacgagcggcaacctggacggcttggaatataaactgcatgacttcgggtatcgaggggtctcgagccaggagactgcggggatcggagccagcgcacacctcgtaaacttcaagggcactgacacggtggccggtctggccttaattaaaaaatactatgggactaaggaccccgtgcctggttactcagtacccgccgcagagcatagcaccattaccgcatgggggaaagatcacgaaaaggacgcattcgaacatatcgtgacccagttctcaagcgtccctgtgtctgttgtttcagattcctatgatatatataatgcgtgcgaaaagatttggggggaggatttgcggcatctcatcgtctccagaagcacccaggcccctctcatcatcagacccgactccggcaatcctctcgatactgtgttgaaagttctggagatactcgggaaaaagtttccagttacagagaacagcaagggctataagctcctgccgccgtacctcagagtaatccagggagacggagtcgacatcaacaccctccaggagattgtcgagggtatgaagcagaagatgtggtcaatcgagaatatcgcattcggttcaggtggtggcctcctccaaaaactgacacgcgatcttcttaactgcagtttcaagtgcagttatgttgtgaccaatggacttggcatcaatgtgttcaaggatcccgtggctgacccaaataaacgaagcaaaaaaggaagactgtcgctgcatagaaccccagccggtaacttcgtaacactggaagagggtaagggggacctcgaagagtatggccaggaccttctccacacagtgtttaagaacgggaaagtcaccaaatcctatagtttcgacgaaattaggaaaaacgctcagcttaatattgaacttgaagcagcccatcactag

SEQ ID NO: 270128 - DNA, 1107 bp, Artificial Sequence
  derived and/or modified sequence
atgaacccagctgctgaggccgagttcaacatcctgctggccacagacagctacaaggtgacccactacaagcagtacccacccaacaccagcaaggtgtacagctactttgagtgccgggagaagaagacagagaacagcaagctgaggaaggtgaagtatgaggagaccgtcttctacggcctgcagtacatcctgaacaagtacctgaagggcaaggtggtgaccaaggagaagatccaggaggccaaggatgtgtacaaggagcacttccaggatgatgtgttcaatgagaagggctggaactacatcctggagaagtatgatggccacctgcccatcgagatcaaggctgtgcctgagggctttgtgatccccagaggaaatgtgctcttcaccgtggagaacacagatcctgagtgctactggctgaccaactggattgagaccatcctggtgcagagctggtaccccatcaccgtggccaccaacagccgggagcagaagaagatcctggccaagtacctgctggagaccagcggcaacctggatggcctggagtacaagctgcatgactttggctacagaggagtgagcagccaggagacagctggcatcggggccagcgcccacctggtgaacttcaagggcacagacacagtggccggcctggccctgatcaagaagtactacggcaccaaggaccctgtgcccggctacagcgtgcctgctgctgagcacagcaccatcacagcctggggcaaggaccacgagaaggatgcctttgagcacatcgtgacccagttcagctctgtgcctgtgtctgtggtgtctgacagctatgacatctacaatgcctgtgagaagatctggggcgaggacctgcggcacctgattgtgagccgcagcacccaggcccccctcatcatccggccagacagcggcaaccccctggacacagtgctgaaggtgctggagatcctgggcaagaagtttcctgtgacagagaacagcaagggctacaagctgctgcccccctacctgcgggtcatccagggagatggagtggacatcaacaccctgcaggaggtgtgtgtgctgtactag

SEQ ID NO: 270129 - DNA, 1476 bp, Artificial Sequence
  derived and/or modified sequence
atgaacccagctgctgaggccgagttcaacatcctgctggccacagacagctacaaggtgacccactacaagcagtacccacccaacaccagcaaggtgtacagctactttgagtgccgggagaagaagacagagaacagcaagctgaggaaggtgaagtatgaggagaccgtcttctacggcctgcagtacatcctgaacaagtacctgaagggcaaggtggtgaccaaggagaagatccaggaggccaaggatgtgtacaaggagcacttccaggatgatgtgttcaatgagaagggctggaactacatcctggagaagtatgatggccacctgcccatcgagatcaaggctgtgcctgagggctttgtgatccccagaggaaatgtgctcttcaccgtggagaacacagatcctgagtgctactggctgaccaactggattgagaccatcctggtgcagagctggtaccccatcaccgtggccaccaacagccgggagcagaagaagatcctggccaagtacctgctggagaccagcggcaacctggatggcctggagtacaagctgcatgactttggctacagaggagtgagcagccaggagacagctggcatcggggccagcgcccacctggtgaacttcaagggcacagacacagtggccggcctggccctgatcaagaagtactacggcaccaaggaccctgtgcccggctacagcgtgcctgctgctgagcacagcaccatcacagcctggggcaaggaccacgagaaggatgcctttgagcacatcgtgacccagttcagctctgtgcctgtgtctgtggtgtctgacagctatgacatctacaatgcctgtgagaagatctggggcgaggacctgcggcacctgattgtgagccgcagcacccaggcccccctcatcatccggccagacagcggcaaccccctggacacagtgctgaaggtgctggagatcctgggcaagaagtttcctgtgacagagaacagcaagggctacaagctgctgcccccctacctgcgggtcatccagggagatggagtggacatcaacaccctgcaggagatcgtggagggcatgaagcagaagatgtggagcattgagaacatcgccttcggcagcggcggcggcctgctgcagaagctgacccgggacctgctgaactgcagcttcaagtgcagctatgtggtgaccaacggcctgggcatcaacgtgttcaaggaccctgtggccgaccccaacaagaggagcaagaagggccgcctgagcctgcacaggaccccagctggcaactttgtgaccctggaggagggcaaaggagacctggaggagtatggccaggacctgctgcacacagtgttcaagaatggcaaggtgaccaagagctacagctttgatgagatcaggaagaatgcccagctgaacatcgagctggaggccgcccaccactag

SEQ ID NO: 270130 - DNA, 1107 bp, Artificial Sequence
  derived and/or modified sequence
atgaaccccgccgccgaggccgagttcaacatcctgctggccaccgactcttacaaagtcacccattataagcagtacccccctaataccagcaaggtgtattcttattttgaatgcagagagaaaaaaactgagaatagtaagctgcgaaaagtgaagtacgaagaaaccgttttctatgggctgcaatatatcttaaataaatatttgaagggaaaggtcgtgacgaaagaaaagatccaggaggccaaggacgtgtataaggaacactttcaggacgacgtatttaatgagaaggggtggaactacatcctggagaaatatgatggccatttacctatcgaaatcaaggctgtcccagaggggttcgttatcccccggggaaatgtccttttcaccgtggagaataccgaccccgagtgttactggctgacgaattggatcgaaacaatcttggtccagtcttggtacccaattaccgtggcaacaaactctagagaacagaagaagatcctggccaagtacttgctcgagacatcgggtaacctggacggtttagaatataagctgcatgactttgggtaccggggcgtctcctcccaggagacggccggaattggtgcaagtgcccacctggtgaactttaaaggaaccgacaccgtggccgggctggcattgatcaaaaaatactatgggactaaggatcccgtgcctggctactcagttccagccgccgaacatagtacaattaccgcctggggcaaagaccacgagaaggatgcgttcgagcacatcgtgacccaattcagttcagtgcctgtgtctgtcgtgtccgattcatatgacatatacaatgcttgtgagaagatctggggcgaggacctgaggcatttaatcgtatccaggtccacccaggcgccccttattatacggccagattccggcaaccccctcgacactgtacttaaggtgctggagatactggggaaaaaatttcctgtcaccgagaactcaaagggctataagctcctgcccccttacttgagggtgattcagggggacggagtggacattaatacactacaggaagtgtgcgtgctttactag

SEQ ID NO: 270131 - DNA, 4582 bp, Artificial Sequence
  derived and/or modified sequence
gctgccgcgccccgccctttctcggcccccggagggtgacggggtgaaggcgggggaaccgaggtggggagtccgccagagctcccagactgcgagcacgcgagccgccgcagccgtcacccgcgccgcgtcacggctcccgggcccgccctcctctgacccctcccctctctccgtttccccctctccccctcctccgccgaccgagcagtgacttaagcaacggagcgcggtgaagctcatttttctccttcctcgcagccgcgccagggagctcgcggcgcgcggcccctgtcctccggcccgagatgaatcctgcggcagaagccgagttcaacatcctcctggccaccgactcctacaaggttactcactataaacaatatccacccaacacaagcaaagtttattcctactttgaatgccgtgaaaagaagacagaaaactccaaattaaggaaggtgaaatatgaggaaacagtattttatgggttgcagtacattcttaataagtacttaaaaggtaaagtagtaaccaaagagaaaatccaggaagccaaagatgtctacaaagaacatttccaagatgatgtctttaatgaaaagggatggaactacattcttgagaagtatgatgggcatcttccaatagaaataaaagctgttcctgagggctttgtcattcccagaggaaatgttctcttcacggtggaaaacacagatccagagtgttactggcttacaaattggattgagactattcttgttcagtcctggtatccaatcacagtggccacaaattctagagagcagaagaaaatattggccaaatatttgttagaaacttctggtaacttagatggtctggaatacaagttacatgattttggctacagaggagtctcttcccaagagactgctggcataggagcatctgctcacttggttaacttcaaaggaacagatacagtagcaggacttgctctaattaaaaaatattatggaacgaaagatcctgttccaggctattctgttccagcagcagaacacagtaccataacagcttgggggaaagaccatgaaaaagatgcttttgaacatattgtaacacagttttcatcagtgcctgtatctgtggtcagcgatagctatgacatttataatgcgtgtgagaaaatatggggtgaagatctaagacatttaatagtatcaagaagtacacaggcaccactaataatcagacctgattctggaaaccctcttgacactgtgttaaaggttttggagattttaggtaagaagtttcctgttactgagaactcaaagggttacaagttgctgccaccttatcttagagttattcaaggggatggagtagatattaataccttacaagagattgtagaaggcatgaaacaaaaaatgtggagtattgaaaatattgccttcggttctggtggaggtttgctacagaagttgacaagagatctcttgaattgttccttcaagtgtagctatgttgtaactaatggccttgggattaacgtcttcaaggacccagttgctgatcccaacaaaaggtccaaaaagggccgattatctttacataggacgccagcagggaattttgttacactggaggaaggaaaaggagaccttgaggaatatggtcaggatcttctccatactgtcttcaagaatggcaaggtgacaaaaagctattcatttgatgaaataagaaaaaatgcacagctgaatattgaactggaagcagcacatcattaggctttatgactgggtgtgtgttgtgtgtatgtaatacataatgtttattgtacagatgtgtggggtttgtgttttatgatacattacagccaaattatttgttggtttatggacatactgccctttcattttttttcttttccagtgtttaggtgatctcaaattaggaaatgcatttaaccatgtaaaagatgagtgctaaagtaagctttttagggccctttgccaataggtagtcattcaatctggtattgatcttttcacaaataacagaactgagaaacttttatatataactgatgatcacataaaacagatttgcataaaattaccatgattgctttatgtttatatttaacttgtatttttgtacaaacaagattgtgtaagatatatttgaagtttcagtgatttaacagtctttccaacttttcatgatttttatgagcacagactttcaagaaaatacttgaaaataaattacattgccttttgtccattaatcagcaaataaaacatggccttaacaaagttgtttgtgttattgtacaatttgaaaattatgtcgggacataccctatagaattactaaccttactgccccttgtagaatatgtattaatcattctacattaaagaaaataatggttcttactggaatgtctaggcactgtacagttattatatatcttggttgttgtattgtaccagtgaaatgccaaatttgaaaggcctgtactgcaattttatatgtcagagattgcctgtggctctaatatgcacctcaagattttaaggagataatgtttttagagagaatttctgcttccactatagaatatatacataaatgtaaaatacttacaaaagtggaagtagtgtattttaaagtaattacacttctgaatttatttttcatattctatagttggtatgacttaaatgaattactggagtgggtagtgagtgtacttaaatgtttcaattctgttatattttttattaagtttttaaaaaattaaattggatattaaattgtatggacatcatttattaattttaaactgaatgccctcaataagtaatactgaagcacattcttaaatgaagataaattatctccaatgaaaagcatgacatgtgtttcaatagaagaatcttaagttggctaaattcaaagtgcttgacatcaaaatgttctagagtgattagctactagattctgaatcatacatcacatctgactagagaccagtttctttcgaatgattcttttatgtatgtagatctgttcttctgaggcagcggttggccaactatagcccaaaggccaaatttggacttctttttataaatgcagattgtctatggctgctttcccactactccagcctaaggtaaacagctgcaatagaagccaaatgagaatcgcaaagcccaaaatgtttattaacctgccctttacacaaaattacacaaaaagtttcctgatctctgttctaagaaaaggagtgtgccttgcatttaaaaggaaatgttggtttctagggaagggaggaggctaaataattgatacggaattttcctcttttgtcttcttttttctcacttaagaatccgatactggaagactgatttagaaaagtttttaacatgacattaaatgtgaaattttaaaaattgaaaagccataaatcatctgttttaaatagttacatgagaaaatgatcactagaataacctaattagaagtgttatcttcattaaatgttttttgtaagtggtattagaaagaatatgtttttcagatggttctttaaacatgtagtgagaacaataagcattattcacttttagtaagtcttctgtaatccatgatataaaataattttaaaatgattttttaatgtatttgagtaaagatgagtagtattaagaaaaacacacatttcttcacaaaatgtgctaaggggcgtgtaaagaatcaaaagaaactattaccaataatagttttgataatcacccataattttgtgtttaaacattgaaattatagtacagacagtattctctgtgttctgtgaatttcagcagcttcagaatagagtttaatttagaaatttgcagtgaaaaaagctatctctttgttcacaaccataaatcaggagatggagattaattctattggctcttagtcacttggaactgattaattctgactttctgtcactaagcacttggtatttggccatctccattctgagcaccaaacggttaacacgaatgtccactagaactctgctgtgtgtcacccttaaatcagtctaaatcttccagacaaaagcaaatggcatttatggatttaagtcattagattttcaactgacattaattaatccctcttgattgattatatcatcaagtatttatatcttaaataggaggtaggatttctgtgttaagactcttatttgtaccctataattaaagtaaaatgttttttatgagtatcccttgttttcccttcttaaattgttatcaaacaatttttataatgaaatctatcttggaaaattagaaagaaaaatggcaaggtatttattgttctgtttgccataatttagaactcacacttaagtattttgtagttttacattcctttttaacccattcagtggagaatgtcagcttttctcccaagttgtatgttaagtctattctaatatgtactcaacatcaagttataaacatgtaataaacatggaaataaagtttagctctattagtgaagtgttaaa

SEQ ID NO: 270132 - DNA, 1213 bp, Artificial Sequence
  derived and/or modified sequence
gagctcgcggcgcgcggcccctgtcctccggcccgagatgaatcctgcggcagaagccgagttcaacatcctcctggccaccgactcctacaaggttactcactataaacaatatccacccaacacaagcaaagtttattcctactttgaatgccgtgaaaagaagacagaaaactccaaattaaggaaggtgaaatatgaggaaacagtattttatgggttgcagtacattcttaataagtacttaaaaggtaaagtagtaaccaaagagaaaatccaggaagccaaagatgtctacaaagaacatttccaagatgatgtctttaatgaaaagggatggaactacattcttgagaagtatgatgggcatcttccaatagaaataaaagctgttcctgagggctttgtcattcccagaggaaatgttctcttcacggtggaaaacacagatccagagtgttactggcttacaaattggattgagactattcttgttcagtcctggtatccaatcacagtggccacaaattctagagagcagaagaaaatattggccaaatatttgttagaaacttctggtaacttagatggtctggaatacaagttacatgattttggctacagaggagtctcttcccaagagactgctggcataggagcatctgctcacttggttaacttcaaaggaacagatacagtagcaggacttgctctaattaaaaaatattatggaacgaaagatcctgttccaggctattctgttccagcagcagaacacagtaccataacagcttgggggaaagaccatgaaaaagatgcttttgaacatattgtaacacagttttcatcagtgcctgtatctgtggtcagcgatagctatgacatttataatgcgtgtgagaaaatatggggtgaagatctaagacatttaatagtatcaagaagtacacaggcaccactaataatcagacctgattctggaaaccctcttgacactgtgttaaaggttttggagattttaggtaagaagtttcctgttactgagaactcaaagggttacaagttgctgccaccttatcttagagttattcaaggggatggagtagatattaataccttacaagaggtatgtgttttatattaaaagtttcaataaggcatttcttataattaagtttgtttatgtttgataaagaacacaatataaatacaa

SEQ ID NO: 270133 - DNA, 1476 bp, Artificial Sequence
  derived and/or modified sequence
atgaaccccgccgccgaggccgagttcaacatcctgctggccaccgacagctacaaagtaacacattataagcagtaccccccaaacacttccaaggtgtactcgtactttgagtgccgggaaaagaagaccgagaactcaaagctgcggaaggtgaaatatgaggagactgtgttctatggcctgcaatacattcttaacaagtacttgaaaggcaaggttgttacaaaggaaaagatccaggaggcaaaggacgtgtacaaggaacactttcaggacgatgtcttcaacgagaagggctggaactatattctggaaaaatatgatggacaccttccaattgagatcaaggccgtgccggaaggcttcgtcatccccagaggaaacgtgctcttcacagtggaaaacaccgaccctgaatgttattggctgacaaactggatagagactatccttgtccagtcctggtatccaatcacagttgcgaccaactcacgcgagcagaagaagattttagctaagtatctattggagacatcaggtaatcttgatggcctggagtacaagctgcacgattttgggtacagaggtgtgtccagtcaggaaaccgcaggaattggagcttctgcacacttggtgaattttaaaggcaccgataccgtagctggactcgcccttatcaaaaagtattatggtaccaaggaccccgtacctggatattccgtgccagcagcggagcacagtacgattacggcatgggggaaggaccacgaaaaagacgcatttgagcacatcgtcacccagttttcaagcgtgccagtgagcgttgtgtctgacagttacgacatttataatgcttgtgagaagatatggggcgaagatttaaggcacctgatcgtatccaggtccactcaagcccctctgattattcgccctgattctgggaaccccctcgataccgtgctaaaggtgctcgagattcttgggaagaaattcccggtgactgagaacagcaagggatacaaactgctccccccctatctgcgcgtgatacaaggggatggggtggacattaacacattacaagagatcgttgaaggcatgaagcagaagatgtggtctattgaaaacatcgcctttgggtctggcgggggccttttgcagaagctgacacgcgacctactgaattgttcctttaagtgttcctacgttgtgacaaacggactaggcatcaacgttttcaaagatccagttgccgacccgaacaaacgatctaagaagggtaggctgagtctgcaccgcaccccagcgggaaacttcgttactctcgaggaaggaaaaggagacctggaagaatatggacaggacctccttcacaccgtattcaagaatggcaaagttaccaagtcttacagcttcgatgagatcagaaaaaatgcgcagctgaacatcgagctagaggctgcacatcattag

SEQ ID NO: 270134 - DNA, 1107 bp, Artificial Sequence
  derived and/or modified sequence
atgaatccggcagccgaagccgaattcaatatactgctggcgactgacagctacaaggtcacgcactataagcaatatccacccaataccagcaaagtttatagctacttcgaatgcagagagaaaaagacagagaatagtaagctgcgcaaggtgaaatacgaagagaccgtgttttatggcttgcagtatatcttaaacaaatatcttaaagggaaggttgtgacgaaagaaaaaatccaagaagctaaggacgtgtacaaggagcatttccaagacgacgtatttaatgaaaagggctggaactacatactggagaaatatgatgggcacctgcctatcgagatcaaggccgttcctgaagggtttgtgatcccaagaggcaacgtcctgtttacagtggagaacactgatcctgaatgttactggctgaccaactggatagaaactatcttagtacaatcttggtatccaatcactgttgccaccaatagtagggagcagaagaagatactggctaagtatctcttggagacatcaggaaatctggatggacttgagtacaagctgcacgattttgggtaccggggtgtgtccagtcaggaaacggctggtataggggctagcgcacacctcgtcaatttcaagggtaccgatactgtggccggtcttgctctgatcaagaaatattatgggacaaaggaccctgtacctggatactcagtgccagcagctgagcattctacaatcaccgcatggggcaaagatcatgagaaagatgcctttgaacacattgtcactcagttctcttccgtgcctgtctcagtggtctccgactcttatgatatatacaatgcatgtgagaaaatatggggcgaggacttgaggcaccttatcgtgagcaggagtacccaggcgcctctgatcataaggcccgattccggtaacccactagacacagttcttaaggtacttgaaattctgggaaagaagtttcccgtgaccgaaaattccaaagggtataagctattgcccccttacctgagagtaattcaaggggatggagtcgatatcaatacgctacaggaggtgtgcgtcctttattag

SEQ ID NO: 270135 - DNA, 1476 bp, Artificial Sequence
  derived and/or modified sequence
atgaaccccgcagcagaagcagagttcaacatactgttagctactgacagctacaaggtgacgcattataaacaataccctcccaacacatcgaaggtgtacagctatttcgagtgcagagagaagaaaactgagaattctaaactgcggaaagtgaaatacgaagagactgtcttttatggactgcagtatattctgaacaaatacctcaaagggaaagtagtaactaaggagaaaatccaggaggctaaggatgtctacaaggaacacttccaagacgatgtgtttaacgaaaaggggtggaattatatacttgaaaagtatgacggtcacctgcccatcgagataaaagcagtgcccgaaggcttcgtgatccccagagggaacgtcctttttacggtggaaaatacagaccctgaatgttattggctgactaactggatcgaaacaatacttgtccagagctggtatcccattacagtggccaccaactcacgagagcagaagaagattttggctaagtacctcctcgagaccagtggaaacctcgacggtctggagtacaagcttcatgattttggctatcggggagtatcgagccaggagacagctggcatcggagcctctgcccaccttgtgaacttcaaagggacggacaccgtcgcaggtctggcactaattaagaagtactatggaacaaaagatcccgttccaggctactcagtgcctgctgctgagcacagtacaattacagcctggggaaaggatcacgaaaaggacgcattcgagcacattgtgacccaatttagctctgtgccggtaagtgttgtgtcagacagctacgacatctacaacgcctgcgagaaaatttggggagaggacttgcgccaccttattgtgtcccggtctactcaggctccactcataatccgccctgacagtggtaaccctctggacactgtgctgaaagtcttagaaatccttggaaagaagttccccgttaccgagaatagtaagggttataaactcctccctccttacctcagagtgatacaaggcgacggggttgacataaataccctccaggaaatcgtcgagggtatgaaacaaaaaatgtggagcatagaaaatatcgctttcggttccgggggaggtctgctgcagaagctcacgcgtgatctgttgaattgctcttttaagtgtagctatgtggttacaaacgggttgggaattaatgtgtttaaagatcctgtcgcagaccccaacaagaggtctaagaagggcagactgagcctgcatcgcacaccagcaggcaactttgttacactggaggagggcaagggtgacttggaggagtacggccaggatctgctccatacagtatttaagaatggtaaagtgacaaagagctattcctttgatgagatccgaaaaaacgcccagttaaacatcgagttagaggccgcacaccactag

SEQ ID NO: 270136 - DNA, 1107 bp, Artificial Sequence
  derived and/or modified sequence
atgaaccccgccgccgaggccgagttcaacatcctgctggccaccgacagctacaaggtgacccactacaagcagtacccccccaacaccagcaaggtgtacagctacttcgagtgcagagagaagaagaccgagaacagcaagctgagaaaggtgaagtacgaggagaccgtgttctacggcctgcagtacatcctgaacaagtacctgaagggcaaggtggtgaccaaggagaagatccaggaggccaaggacgtgtacaaggagcacttccaggacgacgtgttcaacgagaagggctggaactacatcctggagaagtacgacggccacctgcccatcgagatcaaggccgtgcccgagggcttcgtgatccccagaggcaacgtgctgttcaccgtggagaacaccgaccccgagtgctactggctgaccaactggatcgagaccatcctggtgcagagctggtaccccatcaccgtggccaccaacagcagagagcagaagaagatcctggccaagtacctgctggagaccagcggcaacctggacggcctggagtacaagctgcacgacttcggctacagaggcgtgagcagccaggagaccgccggcatcggcgccagcgcccacctggtgaacttcaagggcaccgacaccgtggccggcctggccctgatcaagaagtactacggcaccaaggaccccgtgcccggctacagcgtgcccgccgccgagcacagcaccatcaccgcctggggcaaggaccacgagaaggacgccttcgagcacatcgtgacccagttcagcagcgtgcccgtgagcgtggtgagcgacagctacgacatctacaacgcctgcgagaagatctggggcgaggacctgagacacctgatcgtgagcagaagcacccaggcccccctgatcatcagacccgacagcggcaaccccctggacaccgtgctgaaggtgctggagatcctgggcaagaagttccccgtgaccgagaacagcaagggctacaagctgctgcccccctacctgagagtgatccagggcgacggcgtggacatcaacaccctgcaggaggtgtgcgtgctgtactag

SEQ ID NO: 270137 - protein, 441 aa, Artificial Sequence
  derived and/or modified sequence
MRVVTIVILLCFCKAAELRKASPGSVRSRVNHGRAGGGRRGSNPVKRYAPGLPCDVYTYLHEKYLDCQERKLVYVLPGWPQDLLHMLLARNKIRTLKNNMFSKFKKLKSLDLQQNEISKIESEAFFGLNKLTTLLLQHNQIKVLTEEVFIYTPLLSYLRLYDNPWHCTCEIETLISMLQIPRNRNLGNYAKCESPQEQKNKKLRQIKSEQLCNEEEKEQLDPKPQVSGRPPVIKPEVDSTFCHNYVFPIQTLDCKRKELKKVPNNIPPDIVKLDLSYNKINQLRPKEFEDVHELKKLNLSSNGIEFIDPAAFLGLTHLEELDLSNNSLQNFDYGVLEDLYFLKLLWLRDNPWRCDYNIHYLYYWLKHHYNVHFNGLECKTPEEYKGWSVGKYIRSYYEECPKDKLPAYPESFDQDTEDDEWEKKHRDHTAKKQSVIITIVG

SEQ ID NO: 270138 - protein, 104 aa, Artificial Sequence
  derived and/or modified sequence
MRVVTIVILLCFCKAAELRKASPGSVRSRVNHGRAGGGRRGSNPVKRYAPGLPCDVYTYLHEKYLDCQERKLVYVLPGWPQDLLHMLLARNKIRTLKNNMFSKF

SEQ ID NO: 270139 - DNA, 1326 bp, Artificial Sequence
  derived and/or modified sequence
atgcgagtggtgacaatcgtgatcttgctgtgcttctgtaaggccgcagaactccggaaagcctctccaggatctgtcaggagcagagtgaatcacggcagggccggagggggaaggaggggcagcaatcccgtcaaaagatacgctcccggactaccttgtgacgtgtatacctacctgcacgaaaagtaccttgactgtcaggaaaggaagctggtgtatgtcctgcccggatggcctcaagacctgctccacatgctcctcgcgagaaataagatcaggacattgaagaataacatgtttagcaagtttaaaaagctgaaatcgctggacctgcagcagaacgaaatctcaaaaatcgaatcggaggcctttttcggtcttaataagctgacaacactgttattgcagcacaaccagataaaagtactcaccgaggaagtcttcatctacacacctctcttgtcctacttgagactttacgataatccctggcattgcacctgcgagatagagacacttatttcaatgctgcaaatccctcggaaccggaacctcggtaactacgcgaagtgcgaaagtccccaggagcagaagaataagaagctccgtcagatcaagagcgaacaactgtgtaacgaggaagagaaggagcagctggatcccaaaccccaggtctcagggagacctccagttataaagccagaggtagacagtactttttgccataattatgtttttcctatccagaccctggactgtaaacggaaggagttgaaaaaggtacctaacaacattccccctgacattgttaaactggacctcagctataacaagattaaccaactgagaccaaaggaattcgaggatgtgcatgaactgaaaaagctgaacctgtcctccaatggcatcgaatttatcgatcccgctgcttttcttggtttaacacatctcgaggaactggacctgagcaacaactctctccaaaactttgactacggcgtgcttgaggacctgtacttcctaaagctcctgtggcttagagataacccgtggcgctgtgactataatatccactacctttactattggctgaaacatcattataatgtgcacttcaacggcctggaatgtaaaactcccgaagaatacaaggggtggagtgtgggaaagtatattagatcctactacgaggagtgccccaaggataaactgccagcatacccagagagctttgaccaggataccgaggatgacgagtgggagaaaaaacatcgggaccatactgcaaagaagcagagcgtgatcatcaccattgtcggttag

SEQ ID NO: 270140 - DNA, 1326 bp, Artificial Sequence
  derived and/or modified sequence
atgagagtcgtcactatagtaatcctgctgtgtttttgcaaagctgccgagctcagaaaggccagccccggcagcgtgcgaagccgagtgaatcacgggcgggcaggcgggggccgccgcggctcaaaccccgtgaagcgatacgccccaggactcccatgtgacgtgtacacttacctacacgaaaagtatttagattgccaggaacggaaactggtatatgtgctccctggatggccccaggatttactgcacatgctcctagctcggaacaaaatcaggactttaaagaacaacatgttttctaagtttaagaaacttaagtccctcgatctgcagcagaatgagatttccaagattgaatccgaggccttttttggattgaacaagctaaccacactccttttacagcataaccagataaaggtcctcaccgaggaggttttcatctatacgccgctcttgtcttatcttcgcctttacgataatccctggcactgtacctgtgaaatagaaaccctgatttctatgctgcagatccccagaaaccgaaatctcggcaattatgcaaaatgcgagtcaccacaagaacagaaaaacaagaagttgcgccaaattaaatctgaacagttatgtaacgaggaggaaaaagagcagctcgacccaaaaccccaagtgtccgggcgccctcctgtgatcaaacccgaggtggattcgaccttttgccacaactacgtgtttccgatccagactcttgattgtaagcggaaggaactgaagaaagttcccaacaatatacctcctgacattgtgaagctcgaccttagttataacaagatcaaccaacttcgtcctaaggaattcgaggatgtgcacgaactaaaaaagctcaatctgtcgtctaacggtattgagttcatcgacccagctgcctttctcggactgacccacctcgaagaactggacctcagcaataattcactacagaatttcgactacggagtgcttgaggatctctactttctgaagctcttatggctccgcgataatccatggaggtgtgattacaatatccattatctgtactattggcttaagcatcactataatgtgcactttaatgggctggaatgtaaaacgcccgaggagtacaaggggtggagtgtcggaaaatacatccgatcctattacgaggaatgtccaaaggacaagttgccggcctatcctgaatctttcgaccaagacaccgaggatgacgagtgggaaaaaaaacatagagatcataccgccaagaaacaatctgtgattattacaattgtaggctag

SEQ ID NO: 270141 - DNA, 1326 bp, Artificial Sequence
  derived and/or modified sequence
atgcgggtggtcacaatcgtgattctgctgtgtttttgtaaagccgctgaattgcgaaaagcctcaccgggatccgttagaagtagagttaaccacggcagggctggtggagggcggcggggcagcaatcctgtgaaacggtatgctcctggcctaccatgtgacgtgtatacatacttgcatgagaagtatctggactgtcaggaaagaaaactggtttatgtgctccctggttggccacaagacctcctgcatatgcttttagccaggaataaaatcagaacacttaagaacaatatgttttcaaagtttaagaagttaaaaagcctagatctacagcagaacgagatcagcaagatcgagtctgaggccttcttcgggcttaacaagctcaccaccctgctcctccagcataatcaaataaaagtgctaaccgaagaagtattcatttacacccccctactctcatacctacgactgtacgataatccctggcattgtacatgtgaaattgagacactgatcagcatgctccagatccctagaaatagaaacctcggtaattacgccaaatgcgaaagcccacaagagcaaaagaacaagaagctgcgccaaataaaatctgaacagctgtgtaacgaagaagagaaggagcaactagaccccaagccacaggtttcaggtaggccccccgtgattaaaccggaagtggatagcactttttgtcacaactatgtttttcccattcaaacattagattgcaagcgcaaagagctgaaaaaggttcctaataatattccaccagacattgttaagttagacttaagctataataaaataaatcaactgagaccgaaagagttcgaggacgtacacgagctgaaaaaattgaacctgagtagcaatggtatagaattcatcgatcctgcagcatttctgggcctgacccacctggaggagttggatttgtcaaataatagcctgcaaaattttgattacggggttctcgaagacttgtatttcctgaagcttttgtggctgagagacaatccatggagatgcgattacaatattcactacctttactactggctgaaacatcattataacgtacattttaacggtctagaatgtaaaactcctgaggagtataaaggctggtccgtgggcaagtacataagatcatactatgaggagtgcccaaaggacaagttgccggcctatcctgaatctttcgaccaagacaccgaggatgacgagtgggaaaaaaaacatagagatcataccgccaagaaacaatctgtgattattacaattgtaggctag

SEQ ID NO: 270142 - DNA, 2002 bp, Artificial Sequence
  derived and/or modified sequence
tataacgtgagggctgaatgcagcccattctctggagaacttcctcacacaccgcagcaaagagaagactgaaagacaaacctgggtgcagccagagaggtccagatagatgagcttgtggcatccattccccaagttcagcctagggactccacgtaccccagctgggtctcattgttccagaactgcattagttaagattacccagacttggatttcaaaggaatactttcattgttccgtctgtaacacgaagtaattggggccagctggatgtcaggatgcgtgtggttaccattgtaatcttgctctgcttttgcaaagcggctgagctgcgcaaagcaagcccaggcagtgtgagaagccgagtgaatcatggccgggcgggtggaggccggagaggctccaacccggtcaaacgctacgcaccaggcctcccgtgtgacgtgtacacatatctccatgagaaatacttagattgtcaagaaagaaaattagtttatgtgctgcctggttggcctcaggatttgctgcacatgctgctagcaagaaacaagatccgcacattgaagaacaacatgttttccaagtttaaaaagctgaaaagcctggatctgcagcagaatgagatctctaaaattgagagtgaggcgttctttggtttaaacaaactcaccaccctcttactgcagcacaaccagatcaaagtcttgacggaggaagtgttcatttacacacctctcttgagctacctgcgtctttatgacaacccctggcactgtacttgtgagatagaaacgcttatttcaatgttgcagattcccaggaaccggaatttggggaactacgccaagtgtgaaagtccacaagaacaaaaaaataaaaaactgcggcagataaaatctgaacagttgtgtaatgaagaagaaaaggaacaattggacccgaaaccccaagtgtcagggagacccccagtcatcaagcctgaggtggactcaactttttgccacaattatgtgtttcccatacaaacactggactgcaaaaggaaagagttgaaaaaagtgccaaacaacatccctccagatattgttaaacttgacttgtcatacaataaaatcaaccaacttcgacccaaggaatttgaagatgttcatgagctgaagaaattaaacctcagcagcaatggcattgaattcatcgatcctgggtctttgagatgaaaccctgcaagtagacttacgtgaatgatttttgctgtgccgcttttttagggctcacacatttagaagaattagatttatcaaacaacagtctgcaaaactttgactatggcgtattagaagacttgtattttttgaaactcttgtggctcagagataacccttggagatgtgactacaacattcactacctctactactggttaaagcaccactacaatgtccattttaatggcctggaatgcaaaacgcctgaagaatacaaaggatggtctgtgggaaaatatattagaagttactatgaagaatgccccaaagacaagttaccagcatatcctgagtcatttgaccaagacacagaagatgatgaatgggaaaaaaaacatagagatcacaccgcaaagaagcaaagcgtaataattactatagtaggataaggtagaaattgttctgattgtaattagttttgtattttctatactggtgttagaaaacatatgtttacatttgattaactgtgttgcctatttatgcagggtaatccagctaaaggaagctttctttaattataagtattattgtgactattatagtaatcaagagaatgctatcatcctgcttgcctgtccatttgtggaacagcatctggtgatatgcaattccacactggtaacctgcagcagttgggtcctaatgatggcattagactttcataatgtcctgtataaatgtttttactgcttttagaaaataaagaaaaaaaacttggttcatgttta

SEQ ID NO: 270143 - DNA, 1326 bp, Artificial Sequence
  derived and/or modified sequence
atgagagtggtgaccatcgtgatcctgctgtgcttctgcaaggccgccgagctgagaaaggccagccccggcagcgtgagaagcagagtgaaccacggcagagccggcggcggcagaagaggcagcaaccccgtgaagagatacgcccccggcctgccctgcgacgtgtacacctacctgcacgagaagtacctggactgccaggagagaaagctggtgtacgtgctgcccggctggccccaggacctgctgcacatgctgctggccagaaacaagatcagaaccctgaagaacaacatgttcagcaagttcaagaagctgaagagcctggacctgcagcagaacgagatcagcaagatcgagagcgaggccttcttcggcctgaacaagctgaccaccctgctgctgcagcacaaccagatcaaggtgctgaccgaggaggtgttcatctacacccccctgctgagctacctgagactgtacgacaacccctggcactgcacctgcgagatcgagaccctgatcagcatgctgcagatccccagaaacagaaacctgggcaactacgccaagtgcgagagcccccaggagcagaagaacaagaagctgagacagatcaagagcgagcagctgtgcaacgaggaggagaaggagcagctggaccccaagccccaggtgagcggcagaccccccgtgatcaagcccgaggtggacagcaccttctgccacaactacgtgttccccatccagaccctggactgcaagagaaaggagctgaagaaggtgcccaacaacatcccccccgacatcgtgaagctggacctgagctacaacaagatcaaccagctgagacccaaggagttcgaggacgtgcacgagctgaagaagctgaacctgagcagcaacggcatcgagttcatcgaccccgccgccttcctgggcctgacccacctggaggagctggacctgagcaacaacagcctgcagaacttcgactacggcgtgctggaggacctgtacttcctgaagctgctgtggctgagagacaacccctggagatgcgactacaacatccactacctgtactactggctgaagcaccactacaacgtgcacttcaacggcctggagtgcaagacccccgaggagtacaagggctggagcgtgggcaagtacatcagaagctactacgaggagtgccccaaggacaagctgcccgcctaccccgagagcttcgaccaggacaccgaggacgacgagtgggagaagaagcacagagaccacaccgccaagaagcagagcgtgatcatcaccatcgtgggctag

SEQ ID NO: 270144 - DNA, 1963 bp, Artificial Sequence
  derived and/or modified sequence
gtgcacagcattagtataacgtgagggctgaatgcagcccattctctggagaacttcctcacacaccgcagcaaagagaagactgaaagacaaacctgggtgcagccagagaggtccagatagatgagcttgtggcatccattccccaagttcagcctagggactccacgtaccccagctgggtctcattgttccagaactgcattagttaagattacccagacttggatttcaaaggaatactttcattgttccgtctgtaacacgaagtaattggggccagctggatgtcaggatgcgtgtggttaccattgtaatcttgctctgcttttgcaaagcggctgagctgcgcaaagcaagcccaggcagtgtgagaagccgagtgaatcatggccgggcgggtggaggccggagaggctccaacccggtcaaacgctacgcaccaggcctcccgtgtgacgtgtacacatatctccatgagaaatacttagattgtcaagaaagaaaattagtttatgtgctgcctggttggcctcaggatttgctgcacatgctgctagcaagaaacaagatccgcacattgaagaacaacatgttttccaagtttaaaaagctgaaaagcctggatctgcagcagaatgagatctctaaaattgagagtgaggcgttctttggtttaaacaaactcaccaccctcttactgcagcacaaccagatcaaagtcttgacggaggaagtgttcatttacacacctctcttgagctacctgcgtctttatgacaacccctggcactgtacttgtgagatagaaacgcttatttcaatgttgcagattcccaggaaccggaatttggggaactacgccaagtgtgaaagtccacaagaacaaaaaaataaaaaactgcggcagataaaatctgaacagttgtgtaatgaagaagaaaaggaacaattggacccgaaaccccaagtgtcagggagacccccagtcatcaagcctgaggtggactcaactttttgccacaattatgtgtttcccatacaaacactggactgcaaaaggaaagagttgaaaaaagtgccaaacaacatccctccagatattgttaaacttgacttgtcatacaataaaatcaaccaacttcgacccaaggaatttgaagatgttcatgagctgaagaaattaaacctcagcagcaatggcattgaattcatcgatcctgccgcttttttagggctcacacatttagaagaattagatttatcaaacaacagtctgcaaaactttgactatggcgtattagaagacttgtattttttgaaactcttgtggctcagagataacccttggagatgtgactacaacattcactacctctactactggttaaagcaccactacaatgtccattttaatggcctggaatgcaaaacgcctgaagaatacaaaggatggtctgtgggaaaatatattagaagttactatgaagaatgccccaaagacaagttaccagcatatcctgagtcatttgaccaagacacagaagatgatgaatgggaaaaaaaacatagagatcacaccgcaaagaagcaaagcgtaataattactatagtaggataaggtagaaattgttctgattgtaattagttttgtattttctatactggtgttagaaaacatatgtttacatttgattaactgtgttgcctatttatgcagggtaatccagctaaaggaagctttctttaattataagtattattgtgactattatagtaatcaagagaatgctatcatcctgcttgcctgtccatttgtggaacagcatctggtgatatgcaattccacactggtaacctgcagcagttgggtcctaatgatggcattagactttcataatgtcctgtataaatgtttttactgcttttagaaaataaagaaaaaaaacttggttcatgttta

SEQ ID NO: 270145 - DNA, 1326 bp, Artificial Sequence
  derived and/or modified sequence
atgagagtagttacgattgtgatcctcctctgcttctgcaaggctgccgagcttcgcaaggctagtccaggctcagtgagaagtcgggttaatcacggcagagcgggcggaggtaggcgggggtctaaccccgtcaagcgctacgcacccgggctgccgtgtgacgtgtatacatacctgcacgagaagtacctcgactgccaggaacggaagctggtctacgtgctgcctggttggccacaagacctcctgcacatgttgttggccagaaacaaaataaggaccctgaagaacaatatgttttccaaatttaaaaaactcaagtcactggacctgcagcaaaatgagatctccaaaatcgagtctgaagctttcttcggactcaataaactgaccacgctgctcttacagcacaaccagataaaggttcttactgaggaggtctttatctacacaccgttgctgtcctatctgcgcctttatgacaacccatggcactgtacatgtgagattgaaacactgatttctatgctgcagataccacggaatcggaatttgggcaattacgcgaagtgtgaaagcccgcaggagcaaaaaaataaaaagctccggcagattaaatcggagcagctctgcaacgaagaagaaaaggagcagctcgatccaaaaccacaggtaagtggccgtccccccgttattaaacccgaggtggatagcaccttttgtcacaattatgtgttcccaattcagaccttagattgcaaaaggaaagagctgaagaaagtgccgaacaatataccccccgatatcgtcaaactggatttatcatacaacaaaattaaccaacttaggcccaaagagtttgaagacgttcacgagctgaagaagcttaacctgtcaagtaatggcatcgaattcatagacccagccgcattcttgggactgacccaccttgaggagttagacctcagtaataatagcctgcaaaacttcgactacggggtattagaagacctgtattttctcaaactgctgtggctaagggacaacccctggaggtgtgattacaatattcattacctgtattattggcttaaacatcactacaatgttcacttcaacggactcgaatgcaaaactccagaagagtataaaggttggtctgtcggtaagtacattagaagctactatgaagagtgccctaaggataaactaccagcctatcccgagtccttcgaccaagatacagaggatgatgaatgggagaaaaaacatcgggatcacaccgccaaaaagcagagtgtgatcattacgatcgtgggctag

SEQ ID NO: 270146 - DNA, 1326 bp, Artificial Sequence
  derived and/or modified sequence
atgagggtggtgaccatcgtcatcctgctgtgcttctgcaaggctgctgagctgaggaaggccagccctggctctgtgcgcagccgggtgaaccacggccgggccggcggcggcagaagaggcagcaaccctgtgaagagatatgcccctggcctgccctgtgatgtgtacacctacctgcacgagaagtacctggactgccaggagaggaagctggtgtatgtgctgcccggctggccccaggacctgctgcacatgctgctggccaggaacaagatccgcaccctgaagaacaacatgttcagcaagttcaagaagctgaagagcctggacctgcagcagaatgagatcagcaagattgagagcgaggccttcttcggcctgaacaagctgaccaccctgctgctgcagcacaaccagatcaaggtgctgacagaggaggtgttcatctacacccccctgctgagctacctgcggctgtatgacaacccctggcactgcacctgtgaaattgagaccctcatctccatgctgcagatccccaggaacagaaacctgggcaactatgccaagtgtgagagcccccaggagcagaagaacaagaagctgcggcagatcaagtctgagcagctgtgcaatgaggaggagaaggagcagctggaccccaagccccaggtgtctggccggccccctgtgatcaagccagaggtggacagcaccttctgccacaactacgtgttccccatccagaccctggactgcaagaggaaggagctgaagaaggtgcccaacaacatccccccagacatcgtgaagctggacctgagctacaacaagatcaaccagctgcggcccaaggagtttgaagatgtgcatgagctgaagaagctgaacctgagcagcaatggcatcgagttcattgatcctgctgccttcctgggcctgacccacctggaggagctggacctgagcaacaacagcctgcagaactttgattatggagtgctggaggacctgtacttcctgaagctgctgtggctgcgggacaacccctggaggtgtgactacaacatccactacctgtactactggctgaagcaccactacaacgtgcacttcaacggcctggagtgcaagaccccagaggagtacaagggctggagcgtgggcaagtacatccgcagctactatgaagaatgtcccaaggacaagctgcctgcctacccagagagctttgaccaggacacagaagatgatgagtgggagaagaagcaccgggaccacacagccaagaagcagagcgtcatcatcaccatcgtgggctag

SEQ ID NO: 270147 - DNA, 1326 bp, Artificial Sequence
  derived and/or modified sequence
atgcgggtggtgaccatcgtgatcctgctgtgcttctgcaaggccgccgaactccggaaggctagcccaggttcagtgcgttctcgagtgaaccatggcagggcaggcggtggtaggagaggaagtaatcctgtgaaacggtatgcacccggcctgccctgtgatgtctacacttatttgcatgaaaaatacctggattgtcaggaacgcaagcttgtgtatgtgttaccgggatggccccaggatcttctgcacatgttgctggccaggaacaagattcgtacattaaagaacaatatgtttagcaagttcaagaaattgaaaagcctagaccttcagcaaaatgagatttccaaaattgagagcgaagcttttttcggacttaacaagttgactaccctcctgttgcagcacaaccaaattaaggttctgaccgaggaagtttttatctacactcctttgctcagctatctgcgtctctatgacaacccatggcattgtacctgcgaaattgagaccctcatctccatgctgcagatccccaggaaccggaatttggggaattatgccaaatgcgagagtccgcaagagcagaagaacaaaaagctcagacaaattaaaagcgaacagctctgcaatgaggaggagaaggaacagctggaccctaaacctcaggtctcagggcgacctccggtcataaagccagaggtggattcaaccttctgccacaactacgtgttcccgatccagaccctcgattgcaagcgcaaggaattgaagaaggtgcccaataatattccccccgatattgtgaagctggatctgagctataacaagatcaaccaacttaggcccaaggagttcgaagacgtccacgagttgaagaaactcaatttatcctcaaacgggatcgaattcatcgacccagccgcctttctcggcttaacccatcttgaggagcttgatctgtccaataattctttacagaattttgattacggcgtactggaagatctctatttcttgaagcttctgtggctgcgagacaatccttggcgatgtgactataatatccactacctctattattggctgaaacaccactataacgtgcattttaacggccttgagtgcaaaactccggaggagtataaagggtggtcagtggggaagtacatcagaagttactatgaagaatgcccaaaagataagttgcccgcttatccagaatcattcgatcaagatactgaggacgacgagtgggaaaagaagcaccgggatcacacagccaagaagcaatctgtgatcattactatcgttggctag

SEQ ID NO: 270148 - RNA, 1326 nt, Artificial Sequence
  derived and/or modified sequence
augagagucgucacuauaguaauccugcuguguuuuugcaaagcugccgagcucagaaaggccagccccggcagcgugcgaagccgagugaaucacgggcgggcaggcgggggccgccgcggcucaaaccccgugaagcgauacgccccaggacucccaugugacguguacacuuaccuacacgaaaaguauuuagauugccaggaacggaaacugguauaugugcucccuggauggccccaggauuuacugcacaugcuccuagcucggaacaaaaucaggacuuuaaagaacaacauguuuucuaaguuuaagaaacuuaagucccucgaucugcagcagaaugagauuuccaagauugaauccgaggccuuuuuuggauugaacaagcuaaccacacuccuuuuacagcauaaccagauaaagguccucaccgaggagguuuucaucuauacgccgcucuugucuuaucuucgccuuuacgauaaucccuggcacuguaccugugaaauagaaacccugauuucuaugcugcagauccccagaaaccgaaaucucggcaauuaugcaaaaugcgagucaccacaagaacagaaaaacaagaaguugcgccaaauuaaaucugaacaguuauguaacgaggaggaaaaagagcagcucgacccaaaaccccaaguguccgggcgcccuccugugaucaaacccgagguggauucgaccuuuugccacaacuacguguuuccgauccagacucuugauuguaagcggaaggaacugaagaaaguucccaacaauauaccuccugacauugugaagcucgaccuuaguuauaacaagaucaaccaacuucguccuaaggaauucgaggaugugcacgaacuaaaaaagcucaaucugucgucuaacgguauugaguucaucgacccagcugccuuucucggacugacccaccucgaagaacuggaccucagcaauaauucacuacagaauuucgacuacggagugcuugaggaucucuacuuucugaagcucuuauggcuccgcgauaauccauggaggugugauuacaauauccauuaucuguacuauuggcuuaagcaucacuauaaugugcacuuuaaugggcuggaauguaaaacgcccgaggaguacaagggguggagugucggaaaauacauccgauccuauuacgaggaauguccaaaggacaaguugccggccuauccugaaucuuucgaccaagacaccgaggaugacgagugggaaaaaaaacauagagaucauaccgccaagaaacaaucugugauuauuacaauuguaggcuag

SEQ ID NO: 270149 - RNA, 1326 nt, Artificial Sequence
  derived and/or modified sequence
augcggguggucacaaucgugauucugcuguguuuuuguaaagccgcugaauugcgaaaagccucaccgggauccguuagaaguagaguuaaccacggcagggcugguggagggcggcggggcagcaauccugugaaacgguaugcuccuggccuaccaugugacguguauacauacuugcaugagaaguaucuggacugucaggaaagaaaacugguuuaugugcucccugguuggccacaagaccuccugcauaugcuuuuagccaggaauaaaaucagaacacuuaagaacaauauguuuucaaaguuuaagaaguuaaaaagccuagaucuacagcagaacgagaucagcaagaucgagucugaggccuucuucgggcuuaacaagcucaccacccugcuccuccagcauaaucaaauaaaagugcuaaccgaagaaguauucauuuacaccccccuacucucauaccuacgacuguacgauaaucccuggcauuguacaugugaaauugagacacugaucagcaugcuccagaucccuagaaauagaaaccucgguaauuacgccaaaugcgaaagcccacaagagcaaaagaacaagaagcugcgccaaauaaaaucugaacagcuguguaacgaagaagagaaggagcaacuagaccccaagccacagguuucagguaggccccccgugauuaaaccggaaguggauagcacuuuuugucacaacuauguuuuucccauucaaacauuagauugcaagcgcaaagagcugaaaaagguuccuaauaauauuccaccagacauuguuaaguuagacuuaagcuauaauaaaauaaaucaacugagaccgaaagaguucgaggacguacacgagcugaaaaaauugaaccugaguagcaaugguauagaauucaucgauccugcagcauuucugggccugacccaccuggaggaguuggauuugucaaauaauagccugcaaaauuuugauuacgggguucucgaagacuuguauuuccugaagcuuuuguggcugagagacaauccauggagaugcgauuacaauauucacuaccuuuacuacuggcugaaacaucauuauaacguacauuuuaacggucuagaauguaaaacuccugaggaguauaaaggcugguccgugggcaaguacauaagaucauacuaugaggagugcccaaaggacaaguugccggccuauccugaaucuuucgaccaagacaccgaggaugacgagugggaaaaaaaacauagagaucauaccgccaagaaacaaucugugauuauuacaauuguaggcuag

SEQ ID NO: 270150 - DNA, 702 bp, Artificial Sequence
  derived and/or modified sequence
atggaccaggtgttcatgattgactcaaaatgtgagtcagggaaaggtaggtgctccttcaaccctaacgtgaatactgtgagtgtgatgataaatgaagagttgttctccggaatgtacattgattttatgggtacagatgccgctatcttccggagcttgactaaacgcaatgccgtccgtaccgaccaacataactcgaaatggcttagcgagccgatgtttgtagacgcccatgtcatcccagacggcactgatcccaatgacgctaaggtgtacttttttttcaaggagaaactgacagacaataataggtccactaagcaaatccacagtatgattgccaggatctgtccaaacgatactggcggactgagatcacttgttaacaagtggacgactttccttaaagcgagacttgtctgttctgtcaccgacgaggatggcccagagacacacttcgatgaactggaagacgtgtttctgttagagacggacaacccaaggactaccctcgtttatggcatcttcactaccagttccagcgtctttaaaggatctgccgtgtgcgtgtatcatctgagtgatattcagaccgtgtttaacgggccatttgcccacaaagaaggaccaaaccaccaactgatatcctaccaggggaggattccctatccccgaccgggaacgaatacttgtgtgtag

SEQ ID NO: 270151 - DNA, 702 bp, Artificial Sequence
  derived and/or modified sequence
atggatcaggtttttatgatcgactcaaaatgtgagagcggcaaaggcagatgtagcttcaatcccaatgtcaacaccgttagcgtgatgattaatgaagagcttttttctgggatgtatattgactttatgggaacggacgcagctatcttcagatcgctcacgaaaagaaatgctgtgcgcacagaccagcataatagcaagtggttgtccgaacctatgttcgtggacgcccatgtgataccagatggcacagatcctaatgatgctaaagtttacttcttctttaaggagaaactgacagataacaaccggtctaccaaacagatccactccatgatcgcccgtatttgccctaacgataccggaggtttgaggtctcttgttaacaagtggaccactttcctgaaagctcgattagtctgctccgtgaccgatgaagacggacctgagacgcattttgacgagctggaagatgtttttttgctagagaccgacaatcctcgaacaacccttgtttatgggatcttcacaacctcaagctctgtcttcaagggatccgctgtgtgcgtgtatcatctttccgatattcagactgtgttcaacggaccctttgcacacaaggaaggcccaaaccaccagttgatttcataccaaggcagaatcccttatcctcggcccggcaccaacacgtgtgtatag

SEQ ID NO: 270152 - DNA, 702 bp, Artificial Sequence
  derived and/or modified sequence
atggatcaggtcttcatgattgactctaaatgtgagtccggtaaaggccgttgcagctttaacccgaatgtcaatacagtcagcgttatgatcaacgaagagctcttcagtggaatgtatatagacttcatgggcacagacgccgccatttttcgcagcctgacaaaaagaaacgctgtaagaacagatcagcataattcgaagtggctctccgagccaatgttcgtggacgcacacgtgatccccgatggaaccgaccctaatgatgctaaagtctacttcttcttcaaagaaaaattgaccgacaacaatagaagcaccaaacagatccacagcatgatagctagaatctgtccaaatgatacgggcggactacgatcactagtgaataagtggactactttcctgaaggcgaggcttgtctgttccgtcaccgacgaggacggtcctgagacacactttgatgaactagaagacgtttttctccttgaaaccgacaatccgcgcacgacactggtatacggcattttcaccacctcttcttctgtgtttaagggaagtgctgtgtgcgtgtaccatctgagcgacatccagactgtgttcaacggacctttcgcccataaagaaggacccaatcatcagttaatctcttaccaaggtcgaattccctatcccaggcctgggaccaatacgtgtgtgtag

SEQ ID NO: 270153 - DNA, 1318 bp, Artificial Sequence
  derived and/or modified sequence
gatgcggccggggctgcgcggtggtgatgcgagcctgcagggcggcgcgccggggcagccggagccgcgcgccgcggcgctgtaatcggacaccaagagcgctcgcccccggcctccggccactttccattcactccgaggtgcttgattgagcgacgcggagaagagctccgggtgccgcggcactgcagcgctgagattcctttacaaagaaactcagaggaccgggaagaaagaatttcacctttgcgacgtgctagaaaataaggtcgtctgggaaaaggactggagacacaagcgcatccaaccccggtagcaaactgatgacttttccgtgctgatttctttcaacctcggtattttcccttggatattaacttgcatatctgaagaaatggcattccggacaatttgcgtgttggttggagtatttatttgttctatctgtgtgaaaggatcttcccagccccaagcaagagtttatttaacatttgatggaccaagttttcatgattgactccaagtgtgaatctggaaaaggacgctgctctttcaaccccaacgtgaacacggtgtctgttatgatcaatgaggagcttttctctggaatgtatatagatttcatggggacagatgctgctatttttcgaagtttaaccaagaggaatgcggtcagaactgatcaacataattccaaatggctaagtgaacctatgtttgtagatgcacatgtcatcccagatggtactgatccaaatgatgctaaggtgtacttcttcttcaaagaaaaactgactgacaataacaggagcacgaaacagattcattccatgattgctcgaatatgtcctaatgacactggtggactgcgtagccttgtcaacaagtggaccactttcttaaaggcgaggctggtgtgctcggtaacagatgaagacggcccagaaacacactttgatgaattagaggatgtgtttctgctggaaactgataacccgaggacaacactagtgtatggcatttttacaacatcaagctcagttttcaaaggatcagccgtgtgtgtgtatcatttatctgatatacagactgtgtttaatgggccttttgcccacaaagaagggcccaatcatcagctgatttcctatcagggcagaattccatatcctcgccctggaactaatacttgtgtctgaagataacagtaattttttattcttgtgtcccctactgggcacatcaaagtgctttttggataaaatatgctcaagtaatggatacgtatattaacatataagtatattctgaaaactgacct

SEQ ID NO: 270154 - DNA, 702 bp, Artificial Sequence
  derived and/or modified sequence
atggaccaggtgttcatgatcgacagcaagtgcgagagcggcaagggcagatgcagcttcaaccccaacgtgaacaccgtgagcgtgatgatcaacgaggagctgttcagcggcatgtacatcgacttcatgggcaccgacgccgccatcttcagaagcctgaccaagagaaacgccgtgagaaccgaccagcacaacagcaagtggctgagcgagcccatgttcgtggacgcccacgtgatccccgacggcaccgaccccaacgacgccaaggtgtacttcttcttcaaggagaagctgaccgacaacaacagaagcaccaagcagatccacagcatgatcgccagaatctgccccaacgacaccggcggcctgagaagcctggtgaacaagtggaccaccttcctgaaggccagactggtgtgcagcgtgaccgacgaggacggccccgagacccacttcgacgagctggaggacgtgttcctgctggagaccgacaaccccagaaccaccctggtgtacggcatcttcaccaccagcagcagcgtgttcaagggcagcgccgtgtgcgtgtaccacctgagcgacatccagaccgtgttcaacggccccttcgcccacaaggagggccccaaccaccagctgatcagctaccagggcagaatcccctaccccagacccggcaccaacacctgcgtgtag

SEQ ID NO: 270155 - DNA, 702 bp, Artificial Sequence
  derived and/or modified sequence
atggaccaagtgtttatgattgactcaaagtgcgagagcggaaaaggacggtgctcattcaatccaaacgtcaacaccgtgtctgtgatgattaatgaggaactcttttctggaatgtatatcgacttcatggggaccgacgccgctatattccgtagcctgaccaagagaaatgccgtccggacagaccagcacaatagtaagtggctaagcgaacccatgtttgtagacgctcatgtgattcctgacggcacagatccgaacgacgccaaggtctatttttttttcaaggagaagcttacagataacaaccgcagtacaaagcagatacactccatgatagcgaggatatgtccaaatgacactggcggcttaagatccctcgtaaataagtggaccacattcctgaaagctcgcctcgtgtgcagcgtgaccgatgaggatggccccgagactcacttcgatgaactagaagacgttttcttgcttgaaactgacaatccgcggacaaccttggtgtacggcatttttactacaagttcatccgttttcaaaggtagcgctgtgtgcgtctaccacctgtcagatatccagactgtcttcaacggtcctttcgctcacaaggaagggccaaatcaccagctcataagctatcaggggaggatcccttatcctaggcccggtaccaacacttgtgtatag

SEQ ID NO: 270156 - DNA, 702 bp, Artificial Sequence
  derived and/or modified sequence
atggaccaggtgttcatgattgacagcaaatgtgagagcggcaagggccgctgcagcttcaaccccaacgtgaacacagtgtctgtgatgatcaatgaggagctgttcagcggcatgtacatcgacttcatgggcacagatgctgccatcttccgcagcctgaccaagagaaatgctgtgaggacagaccagcacaacagcaagtggctgtctgagcccatgtttgtggatgcccacgtgatcccagatggaacagaccccaatgatgccaaggtgtacttcttcttcaaggagaagctgacagacaacaacagaagcaccaagcagatccacagcatgattgcccgcatctgccccaatgacaccggcggcctgcggagcctggtgaacaagtggaccaccttcctgaaggcccggctggtgtgcagcgtgacagatgaagatggccctgagacccactttgatgagctggaggatgtgttcctgctggagacagacaaccccaggaccaccctggtgtatggcatcttcaccaccagcagcagcgtcttcaagggcagcgctgtgtgtgtgtaccacctgagtgacatccagacagtgttcaacggcccctttgcccacaaggagggccccaaccaccagctgatctcctaccagggccgcatcccctaccccaggcctggcaccaacacctgtgtgtag

SEQ ID NO: 270157 - DNA, 702 bp, Artificial Sequence
  derived and/or modified sequence
atggaccaggtgttcatgatcgacagcaagtgcgagagcggcaagggccgttgcagcttcaaccccaatgttaacaccgtgagcgtgatgattaacgaggaactgtttagcggaatgtacattgacttcatgggaaccgatgccgcaatatttaggtccctgactaaaagaaatgctgtgcggacggaccagcacaattctaaatggctgagtgaacccatgtttgtcgacgcccacgttataccggatggaaccgatcccaacgacgctaaagtgtactttttcttcaaggaaaagcttactgataacaaccggtctacaaaacagatacactctatgatcgcacgtatttgcccaaatgataccggcggcctgagaagtctggtcaataagtggacaaccttcctgaaggcacgcctggtgtgctccgtcacagatgaagacgggcctgaaactcactttgatgaactagaagatgtctttttgttagaaacagacaatccgcggactaccctggtatacggaatcttcaccactagttcctcagtcttcaagggcagtgctgtgtgcgtgtaccatctgtctgatattcagacagtgtttaatggacctttcgctcacaaggaaggacccaaccaccagttgataagctatcagggacggattccctacccacgccccggaacgaatacttgtgtatag

SEQ ID NO: 270158 - RNA, 702 nt, Artificial Sequence
  derived and/or modified sequence
auggaucagguuuuuaugaucgacucaaaaugugagagcggcaaaggcagauguagcuucaaucccaaugucaacaccguuagcgugaugauuaaugaagagcuuuuuucugggauguauauugacuuuaugggaacggacgcagcuaucuucagaucgcucacgaaaagaaaugcugugcgcacagaccagcauaauagcaagugguuguccgaaccuauguucguggacgcccaugugauaccagauggcacagauccuaaugaugcuaaaguuuacuucuucuuuaaggagaaacugacagauaacaaccggucuaccaaacagauccacuccaugaucgcccguauuugcccuaacgauaccggagguuugaggucucuuguuaacaaguggaccacuuuccugaaagcucgauuagucugcuccgugaccgaugaagacggaccugagacgcauuuugacgagcuggaagauguuuuuuugcuagagaccgacaauccucgaacaacccuuguuuaugggaucuucacaaccucaagcucugucuucaagggauccgcugugugcguguaucaucuuuccgauauucagacuguguucaacggacccuuugcacacaaggaaggcccaaaccaccaguugauuucauaccaaggcagaaucccuuauccucggcccggcaccaacacguguguauag

SEQ ID NO: 270159 - RNA, 702 nt, Artificial Sequence
  derived and/or modified sequence
auggaucaggucuucaugauugacucuaaaugugaguccgguaaaggccguugcagcuuuaacccgaaugucaauacagucagcguuaugaucaacgaagagcucuucaguggaauguauauagacuucaugggcacagacgccgccauuuuucgcagccugacaaaaagaaacgcuguaagaacagaucagcauaauucgaaguggcucuccgagccaauguucguggacgcacacgugauccccgauggaaccgacccuaaugaugcuaaagucuacuucuucuucaaagaaaaauugaccgacaacaauagaagcaccaaacagauccacagcaugauagcuagaaucuguccaaaugauacgggcggacuacgaucacuagugaauaaguggacuacuuuccugaaggcgaggcuugucuguuccgucaccgacgaggacgguccugagacacacuuugaugaacuagaagacguuuuucuccuugaaaccgacaauccgcgcacgacacugguauacggcauuuucaccaccucuucuucuguguuuaagggaagugcugugugcguguaccaucugagcgacauccagacuguguucaacggaccuuucgcccauaaagaaggacccaaucaucaguuaaucucuuaccaaggucgaauucccuaucccaggccugggaccaauacguguguguag

SEQ ID NO: 270160 - protein, 888 aa, Artificial Sequence
  derived and/or modified sequence
MSSPLQRAVGDTKRALSASSSSSASLPFDDRDSNHTSEGNGDSLLADEDTDFEDSLNRNVKKRAAKRPPKTTPVAKHPKKGSRVVHRHSRKQSEPPANDLFNAVKAAKSDMQSLVDEWLDSYKQDQDAGFLELVNFFIQSCGCKGIVTPEMFKKMSNSEIIQHLTEQFNEMDDLISLLTGLSDSQVRAFRHTSTLAAMKLMTSLVKVALQLSVHQDNNQRQYEAERNKGPGQRAPERLESLLEKRKELQEHQEEIEGMMNALFRGVFVHRYRDVLPEIRAICIEEIGCWMQSYSTSFLTDSYLKYIGWTLHDKHREVRLKCVKALKGLYGNRDLTTRLELFTSRFKDRMVSMVMDREYDVAVEAVRLLILILKNMEGVLTDADCESVYPVVYASHRGLASAAGEFLYWKLFYPECEIRMMGGREQRQSPGAQRTFFQLLLSFFVESELHDHAAYLVDSLWDCAGARLKDWEGLTSLLLEKDQNLGDVQESTLIEILVSSARQASEGHPPVGRVTGRKGLTSKERKTQADDRVKLTEHLIPLLPQLLAKFSADAEKVTPLLQLLSCFDLHIYCTGRLEKHLELFLQQLQEVVVKHAEPAVLEAGAHALYLLCNPEFTFFSRADFARSQLVDLLTDRFQQELEELLQSSFLDEDEVYNLAATLKRLSAFYNTHDLTRWELYEPCCQLLQKAVDTGEVPHQVILPALTLVYFSILWTLTHSLSPVENTAETSPQVLPSSKRRRVEGPAKPNREDVSSSQEESLQLNSIPPTPTLTSTAVKSRQPLWGLKEMEEEDGSELDFAQGQPVAGTERSRFLGPQYFQTPHNPSGPGLGNQLMRLSLMEEDEEEELEIQDESNEERQDTDMQASSYSSTSERGLDLLDSTELDIEDF

SEQ ID NO: 270161 - DNA, 438 bp, Artificial Sequence
  derived and/or modified sequence
atgagcagccccctgcagagagccgtgggcgacaccaagagagccctgagcgccagcagcagcagcagcgccagcctgcccttcgacgacagagacagcaaccacaccagcgagggcaacggcgacagcctgctggccgacgaggacaccgacttcgaggacagcctgaacagaaacgtgaagaagagagccgccaagagaccccccaagaccacccccgtggccaagcaccccaagaagggcagcagagtggtgcacagacacagcagaaagcagagcgagccccccgccaacgacctgttcaacgccgtgaaggccgccaagagcgacatgcagagcctggtggacgagtggctggacagctacaagcaggaccaggacgccggcttcctggagctggtgaacttcttcatccagagctgcggctgcaagggctag

SEQ ID NO: 270162 - DNA, 438 bp, Artificial Sequence
  derived and/or modified sequence
atgtcatctcccctgcagagggcagtaggagacaccaaacgcgccctgagcgcctcaagcagctcttctgctagcctcccttttgatgaccgcgacagcaatcatacttccgagggaaacggagacagcttgctagccgacgaagatactgatttcgaggatagtctaaacagaaatgtcaagaaacgtgccgctaagcgcccacctaaaaccactcccgttgcaaaacatccaaaaaaaggaagccgggtcgtccacagacacagccgcaagcagagtgagcctcctgctaatgatctcttcaatgccgttaaggctgcaaagtccgacatgcaaagccttgtggatgagtggctcgactcctataaacaggaccaggacgccggcttcctcgaattggtgaacttttttatacaatcttgtgggtgcaagggctag

SEQ ID NO: 270163 - DNA, 438 bp, Artificial Sequence
  derived and/or modified sequence
atgagcagccccctgcagagagctgtgggggacaccaagagggccctgagcgccagcagcagcagcagcgccagcctgccctttgatgaccgggacagcaaccacaccagcgagggcaatggagacagcctgctggctgatgaggacacagactttgaggacagcctgaacagaaatgtgaagaagagagctgccaagaggcctcccaagaccacccctgtggccaagcaccccaagaagggcagccgggtggtgcaccgccacagcaggaagcagagcgagcccccagccaatgacctcttcaatgctgtgaaggccgccaagagtgacatgcagagcctggtggatgagtggctggacagctacaagcaggaccaggatgctggcttcctggagctggtgaacttcttcatccagagctgtggctgcaagggctag

SEQ ID NO: 270164 - DNA, 438 bp, Artificial Sequence
  derived and/or modified sequence
atgagcagccccctgcagcgggccgtgggcgacaccaagcgggccctgtcagcctcttcgagtagttcggcctcccttccattcgatgatagagattccaatcacacatcggaaggtaatggcgactctctgctcgccgacgaagatacagatttcgaagactccctcaatagaaacgtgaagaaaagagccgccaagcgcccacccaaaactacccctgtggccaaacaccctaagaaagggtccagggtggtgcatcgccacagtcgcaagcaaagcgaaccccctgctaacgatttattcaacgcagtaaaagccgccaaaagtgatatgcagtccctcgtggatgaatggctggattcttataaacaggaccaggatgctggctttctggagttagtgaatttctttatccagtcatgcggttgcaaaggttag

SEQ ID NO: 270165 - DNA, 438 bp, Artificial Sequence
  derived and/or modified sequence
atgagctccccattgcagcgggctgtgggggacaccaagagggccctgtccgcttcaagctcttccagcgcctccctcccgttcgacgatcgggattcaaatcacaccagtgaaggcaatggtgactccctattggcggatgaagacacggacttcgaagacagtctgaaccgtaatgtgaagaagagagcggctaagaggccccctaagacaaccccggtcgccaagcatccgaaaaagggttcgcgcgttgtccacaggcattctcgcaaacagagcgagccccctgccaacgatctgttcaacgcggtgaaggcagcaaagtcggatatgcagtcactcgtcgatgagtggctggattcctataagcaagatcaagatgcgggatttctggaactggttaacttcttcattcagtcatgcgggtgtaagggttag

SEQ ID NO: 270166 - protein, 217 aa, Artificial Sequence
  derived and/or modified sequence
MNSGAMRIHSKGHFQGGIQVKNEKNRPSLKSLKTDNRPEKSKCKPLWGKVFYLDLPSVTISEKLQKDIKDLGGRVEEFLSKDISYLISNKKEAKFAQTLGRISPVPSPESAYTAETTSPHPSHDGSSFKSPDTVCLSRGKLLVEKAIKDHDFIPSNSILSNALSWGVKILHIDDIRYYIEQKKKELYLLKKSSTSVRDGGKRVGSGAQKTRKALQSI

SEQ ID NO: 270167 - DNA, 1274 bp, Artificial Sequence
  derived and/or modified sequence
actgcgtagaggccgtagctggcggaaggagagaggcggccgtcctgtcaacaggccgggggaagccgtgctttcgcggctgcccggtgcgacactttctccggacccagcatgtaggtgccgggcgactgccatgaactccggagccatgaggatccacagtaaaggacatttccagggtggaatccaagtcaaaaatgaaaaaaacagaccatctctgaaatctctgaaaactgataacaggccagaaaaatccaaatgtaagccactttggggaaaagtattttaccttgacttaccttctgtcaccatatctgaaaaacttcaaaaggacattaaggatctgggagggcgagttgaagaatttctcagcaaagatatcagttatcttatttcaaataagaaggaagctaaatttgcacaaaccttgggtcgaatttctcctgtaccaagtccagaatctgcatatactgcagaaaccacttcacctcatcccagccatgatggaagttcatttaagtcaccagacacagtgtgtttaagcagaggaaaattattagttgaaaaagctatcaaggaccatgattttattccttcaaatagtatattatcaaatgccttgtcatggggagtaaaaattcttcatattgatgacattagatactacattgaacaaaagaaaaaagagttgtatttactcaagaaatcaagtacttcagtaagagatgggggcaaaagagttggtagtggtgcacaaaaaacaagaaaagccctgcagtccatttgatgtagacaagccatctagtatgcaaaagcaaactcaggttaaactaagaatccaaacagatggcgataagtatggtggaacctcaattcaactccagttgaaagagaagaagaaaaaaggatattgtgaatgttgcttgcagaaatatgaagatctagaaactcaccttctaagtgagcaacacagaaactttgcacagagtaaccagtatcaagttgttgatgatattgtatctaagttagtttttgactttgtggaatatgaaaaggacacacctaaaaagaaaagaataaaatacagtgttggatccctttctcctgtttctgcaagtgtcctgaaaaagactgaacaaaaggaaaaagtggaattgcaacatatttctcagaaagattgccaggaagatgatacaacagtgaaggagcagaatttcctgtataaagagacccaggaaactgaaaaaaagctcctgtttatttcagagcccatc

SEQ ID NO: 270168 - DNA, 654 bp, Artificial Sequence
  derived and/or modified sequence
atgaacagcggtgcgatgcgaatccattcaaaaggccacttccaaggcggcatacaagtgaaaaacgaaaaaaatcggccgagcctgaagagcttgaagacagacaaccgtcctgaaaaaagcaaatgtaaacctctgtggggcaaggtcttctaccttgacctcccaagcgtaacaataagcgaaaagctgcaaaaggacattaaagacttgggtggaagagtggaggagtttctgtctaaggacatctcgtacctgatctcaaacaagaaggaagccaaattcgctcagaccctggggcggatttcccccgtgccgtcacccgagtccgcttacacggctgaaacgacaagcccacatccttctcacgacgggtccagcttcaagagtcctgataccgtttgtctttcaagggggaaactcctggtggaaaaagccataaaggaccacgattttattccctccaactccatcctgagcaatgcgctcagctggggcgttaaaatcctgcacatcgacgacataaggtattatattgagcagaagaagaaggagttgtacctgctgaagaaatcttctacgtccgtgagggatggtggcaaacgagttggctctggcgcacagaaaacgcgcaaggcgttacaatcgatttag

SEQ ID NO: 270169 - DNA, 654 bp, Artificial Sequence
  derived and/or modified sequence
atgaacagcggggccatgaggatccacagcaagggccacttccagggcggcatccaggtgaagaatgagaagaaccggcccagcctgaagagcctgaagacagacaacagacctgagaagagcaagtgcaagcccctgtggggcaaggtgttctacctggacctgcccagcgtgaccatcagcgagaagctgcagaaggacatcaaggacctgggcggccgggtggaggagttcctgagcaaggacatctcctacctgatcagcaacaagaaggaggccaagtttgcccagaccctgggccgcatcagccctgtgcccagccctgagagcgcctacacagctgagaccaccagcccccaccccagccatgatggcagcagcttcaagagcccagacacagtgtgcctgagccggggcaagctgctggtggagaaggccatcaaggaccatgacttcatccccagcaacagcatcctgagcaatgccctgtcctggggcgtgaagatcctgcacattgatgacatccgctactacatcgagcagaagaagaaggagctgtacctgctgaagaagagcagcacctctgtgagagatggcggcaagagggtgggcagcggggcccagaagaccaggaaggccctgcagagcatctag

SEQ ID NO: 270170 - DNA, 654 bp, Artificial Sequence
  derived and/or modified sequence
atgaacagcggcgccatgcggatccacagcaagggccacttccagggaggcatccaggtcaaaaacgagaagaatcgcccatcgttgaagtccctgaagacggacaatcgccctgaaaaatccaagtgcaaaccactttggggtaaggtcttctacctcgacctgccttctgtgacaatctctgagaagttacagaaggacatcaaagatctgggcgggcgggttgaggagttcctgtctaaggatattagttatctgatttcaaacaagaaagaagccaagttcgctcagactctaggcagaatatcaccggtgccttctcctgaatctgcgtatactgcagaaacaacgagcccgcatcccagccatgatggttccagtttcaagagcccagataccgtgtgtctctcccgcgggaagctgctggtcgagaaggcaatcaaggaccatgacttcattcccagcaattctattctgtcgaacgcactcagctggggagtcaagattcttcatatcgatgatatcagatattatatcgagcagaaaaagaaggaattatatctgctgaaaaaatcctccacaagcgtgcgagacggcgggaagcgcgtagggtccggcgcacaaaagacacgaaaagcgcttcagtctatttag

SEQ ID NO: 270171 - DNA, 654 bp, Artificial Sequence
  derived and/or modified sequence
atgaactctggcgcaatgcgcattcattccaaggggcattttcagggtggcatccaggtcaaaaacgagaagaaccggccaagcctcaaatctcttaagactgataacaggcccgagaagagcaagtgcaaacccttgtggggaaaagtcttctacttggaccttccatcagtgaccatatctgaaaagctgcaaaaagatatcaaagacttaggcggtagggtggaggaattcctctccaaagatatctcctacctcatcagcaacaagaaggaggcaaagtttgcccaaaccttggggaggattagtcctgtgccttctcctgagtctgcttacaccgccgagaccacatccccccaccccagccacgatggatcctctttcaagtcccctgacacggtttgtctgagtcggggaaagctgctcgttgagaaggctatcaaggatcacgactttatcccaagcaatagcattctctcgaacgctcttagttggggcgtaaagattctccacattgacgacatacggtactacatagagcagaagaaaaaagaactttacctgcttaagaaatcctctacctccgtgcgagacggaggcaaacgggtgggttccggcgctcagaagaccagaaaagccctacagtccatctag

SEQ ID NO: 270172 - DNA, 654 bp, Artificial Sequence
  derived and/or modified sequence
atgaacagcggcgccatgagaatccacagcaagggccacttccagggcggcatccaggtgaagaacgagaagaacagacccagcctgaagagcctgaagaccgacaacagacccgagaagagcaagtgcaagcccctgtggggcaaggtgttctacctggacctgcccagcgtgaccatcagcgagaagctgcagaaggacatcaaggacctgggcggcagagtggaggagttcctgagcaaggacatcagctacctgatcagcaacaagaaggaggccaagttcgcccagaccctgggcagaatcagccccgtgcccagccccgagagcgcctacaccgccgagaccaccagcccccaccccagccacgacggcagcagcttcaagagccccgacaccgtgtgcctgagcagaggcaagctgctggtggagaaggccatcaaggaccacgacttcatccccagcaacagcatcctgagcaacgccctgagctggggcgtgaagatcctgcacatcgacgacatcagatactacatcgagcagaagaagaaggagctgtacctgctgaagaagagcagcaccagcgtgagagacggcggcaagagagtgggcagcggcgcccagaagaccagaaaggccctgcagagcatctag

SEQ ID NO: 270173 - protein, 588 aa, Artificial Sequence
  derived and/or modified sequence
MDTNDDPDEDHLTSYDIQLSIQESIEASKTALCPERFVPLSAQNRKLVEAIKQGHIPELQEYVKYKYAMDEADEKGWFPLHEAVVQPIQQILEIVLDASYKTLWEFKTCDGETPLTLAVKAGLVENVRTLLEKGVWPNTKNDKGETPLLIAVKKGSYDMVSTLIKHNTSLDQPCVKRWSAMHEAAKQGRKDIVALLLKHGGNVHLRDGFGVTPLGVAAEYGHCDVLEHLIHKGGDVLALADDGASVLFEAAGGGNPDCISLLLEYGGSGNVPNRAGHLPIHRAAYEGHYLALKYLIPVTSKNAIRKSGLTPIHSAADGQNAQCLELLIENGFDVNTLLADHISQSYDDERKTALYFGVSNNDVHCTEVLLAAGADPNLDPLNCLLVAVRANNYEIVRLLLSHGANVNCYFMHVNDTRFPSVIQYALNDEVMLRLLLNNGYQVEMCFDCMHGDIFGNSFVWSEIQEEVLPGWTSCVIKDNPFCEFITVPWMKHLVGRVTRVLIDYMDYVPLCAKLKSALEVQREWPEIRQILENPCSLKHLCRLKIRRLMGLQKLCQPASVEKLPLPPAIQRYILFKEYDLYGQELKLT

SEQ ID NO: 270174 - protein, 97 aa, Artificial Sequence
  derived and/or modified sequence
MDTNDDPDEDHLTSYDIQLSIQESIEASKTALCPERFVPLSAQNRKLVEAIKQGHIPELQEYVKYKYAMDEADEKGWFPLHEAVVQPIQQILEIVLD

SEQ ID NO: 270175 - DNA, 1767 bp, Artificial Sequence
  derived and/or modified sequence
atggacaccaacgacgaccccgacgaggaccacctgaccagctacgacatccagctgagcatccaggagagcatcgaggccagcaagaccgccctgtgccccgagagattcgtgcccctgagcgcccagaacagaaagctggtggaggccatcaagcagggccacatccccgagctgcaggagtacgtgaagtacaagtacgccatggacgaggccgacgagaagggctggttccccctgcacgaggccgtggtgcagcccatccagcagatcctggagatcgtgctggacgccagctacaagaccctgtgggagttcaagacctgcgacggcgagacccccctgaccctggccgtgaaggccggcctggtggagaacgtgagaaccctgctggagaagggcgtgtggcccaacaccaagaacgacaagggcgagacccccctgctgatcgccgtgaagaagggcagctacgacatggtgagcaccctgatcaagcacaacaccagcctggaccagccctgcgtgaagagatggagcgccatgcacgaggccgccaagcagggcagaaaggacatcgtggccctgctgctgaagcacggcggcaacgtgcacctgagagacggcttcggcgtgacccccctgggcgtggccgccgagtacggccactgcgacgtgctggagcacctgatccacaagggcggcgacgtgctggccctggccgacgacggcgccagcgtgctgttcgaggccgccggcggcggcaaccccgactgcatcagcctgctgctggagtacggcggcagcggcaacgtgcccaacagagccggccacctgcccatccacagagccgcctacgagggccactacctggccctgaagtacctgatccccgtgaccagcaagaacgccatcagaaagagcggcctgacccccatccacagcgccgccgacggccagaacgcccagtgcctggagctgctgatcgagaacggcttcgacgtgaacaccctgctggccgaccacatcagccagagctacgacgacgagagaaagaccgccctgtacttcggcgtgagcaacaacgacgtgcactgcaccgaggtgctgctggccgccggcgccgaccccaacctggaccccctgaactgcctgctggtggccgtgagagccaacaactacgagatcgtgagactgctgctgagccacggcgccaacgtgaactgctacttcatgcacgtgaacgacaccagattccccagcgtgatccagtacgccctgaacgacgaggtgatgctgagactgctgctgaacaacggctaccaggtggagatgtgcttcgactgcatgcacggcgacatcttcggcaacagcttcgtgtggagcgagatccaggaggaggtgctgcccggctggaccagctgcgtgatcaaggacaaccccttctgcgagttcatcaccgtgccctggatgaagcacctggtgggcagagtgaccagagtgctgatcgactacatggactacgtgcccctgtgcgccaagctgaagagcgccctggaggtgcagagagagtggcccgagatcagacagatcctggagaacccctgcagcctgaagcacctgtgcagactgaagatcagaagactgatgggcctgcagaagctgtgccagcccgccagcgtggagaagctgcccctgccccccgccatccagagatacatcctgttcaaggagtacgacctgtacggccaggagctgaagctgacctag

SEQ ID NO: 270176 - DNA, 726 bp, Artificial Sequence
  derived and/or modified sequence
atggacaccaacgacgaccccgacgaggaccacctgaccagctacgacatccagctgagcatccaggagagcatcgaggccagcaagaccgccctgtgccccgagagattcgtgcccctgagcgcccagaacagaaagctggtggaggccatcaagcagggccacatccccgagctgcaggagtacgtgaagtacaagtacgccatggacgaggccgacgagaagggctggttccccctgcacgaggccgtggtgcagcccatccagcagatcctggagatcgtgctggacgccagctacaagaccctgtgggagttcaagacctgcgacggcgagacccccctgaccctggccgtgaaggccggcctggtggagaacgtgagaaccctgctggagaagggcgtgtggcccaacaccaagaacgacaagggcgagacccccctgctgatcgccgtgaagaagggcagctacgacatggtgagcaccctgatcaagcacaacaccagcctggaccagccctgcgtgaagagatggagcgccatgcacgaggccgccaagcagggcagaaaggacatcgtggccctgctgctgaagcacggcggcaacgtgcacctgagagacggcttcggcgtgacccccctgggcgtggccgccgagtacggccactgcgacgtgctggagcacctgatccacaagggcggcgacgtgctggccctggccgactag

SEQ ID NO: 270177 - DNA, 1767 bp, Artificial Sequence
  derived and/or modified sequence
atggataccaacgatgaccccgacgaggatcacctgaccagctacgacattcaactgtctatccaggagtccattgaagcaagcaagacagcactatgtcccgagcggtttgtccccttatctgcccaaaataggaagcttgttgaagcgatcaaacaggggcacatccccgaactccaggaatacgttaaatacaagtatgccatggatgaggccgacgagaaggggtggttcccgctccatgaagctgtcgttcaacctattcagcagatcctggagattgtgctcgatgcatcatacaagaccctttgggagttcaagacatgcgatggggaaaccccattgacactggctgttaaggcaggactcgtggagaacgtgagaaccctattggagaaaggcgtttggcccaataccaagaatgataagggcgaaacgccgttactaatcgctgttaaaaagggatcatacgacatggtgtctacattgataaaacataatacaagcctggatcagccttgcgtcaaaaggtggagcgcaatgcatgaggccgctaagcaggggcgaaaggatatagtggctttgttattgaagcatggtggcaatgtgcacctacgtgacggattcggggtcactccactgggcgtggccgcggagtacggacactgtgacgtgttagagcacttgatccacaaaggaggtgatgtgctagccctagccgatgacggcgcctccgttctatttgaagccgccggcggaggaaatcccgactgcatctctctactgcttgaatacggtggtagcggcaacgttccaaacagagccgggcatctgcctattcacagagccgcctatgagggccattatttagctctcaagtaccttattccggtgacctcaaaaaatgccatcaggaagtccggcctgacgcccatccatagcgccgcagatggacaaaatgcacaatgcctggaactgctgattgagaatggtttcgacgtgaataccctccttgctgaccatatctcccagtcatacgatgacgagaggaagacggccctgtatttcggggtcagtaataacgacgtgcactgtaccgaggtgctactggccgccggagcggatcccaatctggacccattaaactgtctgctcgttgccgtgcgggccaacaactatgagatcgtccggctactgctctcacacggtgccaatgtgaactgctactttatgcacgttaatgataccaggttccctagtgtcatccaatacgcacttaacgatgaggtgatgctgcgcttgttattgaataacggctaccaggtggagatgtgtttcgactgcatgcacggcgacatcttcgggaactctttcgtctggtctgaaattcaggaagaggtactgccagggtggacctcctgcgtgataaaagataatccattctgcgagttcatcaccgtcccctggatgaagcaccttgtgggtcgagtcacccgcgtcttgattgactatatggattacgtgcccctgtgcgccaaactaaagagcgccctcgaagtccagcgggagtggcccgaaatcagacagatcctcgagaatccctgtagtctgaaacatctgtgccggttgaaaatccgccggctgatgggactccagaaactgtgtcagcctgcgtccgttgagaagctgccacttcctcctgccatacaaaggtacatactctttaaggaatacgacttgtacgggcaggagctgaagctgacatag

SEQ ID NO: 270178 - DNA, 1767 bp, Artificial Sequence
  derived and/or modified sequence
atggacactaacgacgacccggatgaggaccacctaacttcatacgacattcagctgagtattcaggaaagtatcgaggcaagcaagaccgctctttgccctgagagatttgtgccattgagtgcgcaaaaccgaaaactggtcgaagctatcaagcagggccacatccccgagctgcaagaatacgtgaagtataaatatgcaatggatgaggccgatgaaaagggatggtttccactgcatgaggctgttgtgcaacccatacagcagatcttagagatcgtgctagatgcttcctacaagactttgtgggagttcaaaacttgcgatggggaaacacctctcacattggccgtaaaggcaggtctggtggagaatgttcgaacactgctggaaaagggtgtgtggcctaatacaaaaaacgataagggtgaaacccccctcctaatcgctgtaaagaaaggttcttacgatatggtatccaccctgatcaagcacaatacgtctctggaccagccctgtgttaagcgttggtctgccatgcacgaggctgctaagcagggccggaaggatatcgtcgctctgctgctgaagcacgggggcaacgtacacttgagagatggattcggagtgaccccgttgggagttgccgctgagtatggccattgtgacgtgctcgagcacctcattcacaagggcggcgatgtcctagcccttgctgatgatggggcctccgtgctttttgaggctgcagggggaggcaacccagactgtatctcgctacttctcgagtacgggggcagtggaaatgtgcccaacagggccgggcatctgcctatccatagggctgcctatgaaggccactatctagccctgaagtatttgatccccgttacctcaaagaacgccattcgaaaaagtggacttacccccattcatagtgcggcagacggccaaaatgctcagtgtctggagctgctgatcgagaacggctttgatgtcaacactctgcttgccgaccacatttcacagagctatgatgacgagcggaaaacggcactgtacttcggcgtgagcaacaacgatgtgcactgcaccgaagtccttttggccgctggagccgaccccaacctggacccactgaattgtctgcttgtggctgtgagagctaacaattacgaaattgtgcggcttttactatcacacggtgctaacgtcaactgttattttatgcacgtaaacgacacgcggtttccctctgtcattcagtatgcactgaacgatgaagtcatgctcaggctccttttgaataacggctaccaggtggagatgtgttttgactgtatgcatggtgatatctttggtaactccttcgtctggtcggagatccaggaggaggttctccctggatggacctcttgcgtcattaaagataatcctttctgcgaatttatcaccgtaccctggatgaaacatctggtgggccgtgtgacacgcgtgctgattgactacatggattatgtcccactgtgtgctaaactgaagtccgccctggaggtgcagcgggagtggcccgagatccggcaaattttggagaacccatgtagtctcaagcacctatgcagactgaaaataagacgactgatgggattacagaagctgtgtcaacccgcctccgtcgagaagttaccactacctcccgcgatccagagatacattctgttcaaggagtacgatctttatgggcaggaactgaagctgacctag

SEQ ID NO: 270179 - DNA, 726 bp, Artificial Sequence
  derived and/or modified sequence
atggacacgaatgacgacccggacgaagatcacctgaccagttatgacattcagctgtctatccaggaatccatcgaggctagcaagacagcactttgtccagaaaggttcgttcctttaagcgcccagaatcgaaagctggtcgaagccatcaaacagggccatatcccagaactccaggaatatgtaaagtataaatatgcaatggacgaggcagacgagaagggatggtttcctttacatgaagctgtcgtgcagccaattcagcagattctcgaaatcgtcctggacgcctcgtataaaaccctgtgggagttcaaaacctgtgacggggaaacacctttgaccctggctgttaaagctggcctggtggaaaatgtccgaaccctcttggaaaaaggcgtctggccaaatacaaagaatgacaagggggagacacctctgcttatcgcggtcaagaaggggtcctatgatatggtgagtacccttatcaagcataacacatctttagaccagccttgcgtgaagcggtggtctgctatgcacgaggcagcgaagcagggtaggaaagacatcgtggccctgctccttaaacacggcggcaacgtgcaccttcgcgatgggttcggggtcaccccgctcggtgttgccgccgaatacggacactgcgacgtacttgaacatttgattcacaaggggggcgatgtgctggctctggctgactag

SEQ ID NO: 270180 - DNA, 1767 bp, Artificial Sequence
  derived and/or modified sequence
atggatactaatgacgatccagacgaggatcaccttaccagctacgacatccagctctctatccaggagtcaatcgaagcaagcaagaccgcactgtgtcccgaacgatttgttcccctgtcagcacagaacagaaagctagtggaagctatcaaacaggggcacatcccggagctgcaggaatatgtcaagtacaagtacgccatggatgaggcggacgagaaggggtggtttcccctgcacgaagccgtcgtgcagccaattcagcagattctggaaatcgtattggacgcctcatacaaaaccttgtgggagttcaagacatgcgatggggaaaccccattaacacttgcggtgaaggccgggctcgtggagaatgtgcggacactgctggaaaagggcgtctggcccaataccaagaatgacaagggagaaacacctctgcttatcgccgttaaaaagggctcctacgatatggtgtccacactgattaagcataataccagtctcgaccaaccatgtgtaaagcgttggtcagccatgcacgaagcagcgaaacaaggtagaaaggacatcgtcgccctgcttctgaagcacggggggaacgtccatttgcgagacggcttcggtgtgacgcctttaggtgtcgctgcagagtacggccactgcgatgttctggaacatttgatacataaggggggggacgtgctcgcccttgccgatgatggcgcatcagttcttttcgaagcagctgggggagggaatcccgattgcatctcacttctgctggagtacggcggctccggtaacgtgcccaatagagctggccacctgccgattcaccgcgccgcttacgagggacactatctggccctgaagtatctgatacccgtgacgagtaaaaacgcaattcgcaaatccgggctaacgccaatccactctgccgccgacgggcagaacgctcagtgcctcgagctgctgatagaaaatggctttgacgtaaacactttgcttgccgatcatatttcgcagagctatgatgatgagcggaagacagctttgtacttcggcgtaagcaacaacgacgtccattgcacggaggtcctcctagctgcaggggccgacccaaacctcgacccattgaactgcctcctggtagccgtcagagccaacaattacgagatcgtgcgactcctgctttctcatggggctaatgtcaattgttactttatgcacgtgaacgatacacgattcccttctgtcattcagtatgccttgaacgatgaagttatgctaagactgttactcaacaatggttatcaggtggagatgtgttttgactgtatgcacggagatatttttggaaattccttcgtgtggtccgagatacaagaagaagtgcttcctggatggacctcatgtgtaatcaaggacaatccattttgtgagtttatcacggttccctggatgaagcacctggtgggccgggtgaccagagtgctaatagactacatggactacgtgcctctgtgcgccaagctcaagtcagcactggaagtccagagagagtggcctgagatcaggcagatcctagagaacccctgctctttgaaacacctgtgcagactcaagattagacgcttgatgggtctacagaagctctgccagcctgcgtcagtggagaaactgccactgcctccggccattcagcggtatatcctgtttaaagagtatgatctgtatgggcaggagttaaagttgacatag

SEQ ID NO: 270181 - DNA, 1767 bp, Artificial Sequence
  derived and/or modified sequence
atggatacgaacgatgatccggatgaggatcaccttacctcatacgacattcagttgtctatccaagagtccattgaggcctctaagaccgctctgtgccctgagcggttcgtccctctctctgcacagaaccgcaagctagtggaggctatcaagcaggggcatattcccgagttgcaggaatatgttaagtataaatatgccatggacgaggccgatgagaagggatggtttccgctgcatgaggccgtggttcagccaatccagcagattctggaaatcgttcttgatgcaagttacaaaactctgtgggaattcaagacctgcgatggtgagaccccactgaccctggccgtaaaagcgggtctggtggaaaacgtgcgcaccctgctggaaaaaggcgtctggccaaatacgaagaatgacaagggggagacacctctactgatagcggtgaaaaaaggttcatacgacatggtaagcacgctaattaagcataatacaagcctcgatcaaccctgcgtcaagcgctggtctgccatgcatgaagcagcaaaacagggcagaaaagacattgtagcactgcttttaaaacacggaggaaatgtgcatctgcgcgatggttttggcgtgacccccctcggggtggcggccgagtatggacactgcgacgtgcttgaacacctgattcacaaagggggtgatgttctagctctggcggacgacggagcatcggtgctttttgaggctgcaggggggggtaacccggattgtattagcctcctcttagaatatggcggaagtgggaatgtgcctaaccgggcgggacatctgcccatccatcgggcagcatatgaaggtcattatcttgcactgaaatatctaattcctgttacctcaaaaaacgccatccgcaaatcagggcttactccaatacattccgcagcggatggacagaatgcccagtgtctggaactgctgatcgaaaatgggtttgacgtcaacacccttctggccgatcacatcagccagtcctatgacgacgaacgtaagacggcattatatttcggagtcagcaacaacgatgtgcactgtaccgaggttctgctcgctgccggtgcagaccccaacctagacccactaaattgcttactcgtcgccgtgcgagcaaacaattacgagatcgtgaggctgcttctttcccacggtgccaatgtgaattgctactttatgcacgtgaacgacaccagattcccttcagtcatccagtacgctcttaacgacgaggttatgttgaggctgttattgaacaacggttaccaggttgagatgtgcttcgactgtatgcatggcgatatttttgggaactccttcgtttggtcagagattcaagaggaggtcctcccgggctggaccagttgcgtcataaaagataatcctttctgcgaattcatcactgtgccatggatgaagcatctcgtgggcagggtgacaagggtgctaatcgattatatggactatgtgcccctctgtgccaaattaaagtccgctctggaagtccagcgggagtggcctgagattcggcagattcttgagaatccgtgtagcctgaaacacctttgcagacttaagatccggcgcctcatgggactgcagaagctgtgccagccggcatctgtggagaagctgccgctcccacctgccatacaacgatatatccttttcaaagagtacgatttgtatgggcaggagctgaagctgacttag

SEQ ID NO: 270182 - DNA, 1767 bp, Artificial Sequence
  derived and/or modified sequence
atggacaccaacgacgacccagatgaagatcatctgacctcttacgacatccagctcagcatccaggaatccatcgaggcatcaaaaacggccctgtgtcctgaacgattcgtgcccttgtccgctcaaaatcgcaaactggttgaggcgatcaaacaaggacacattcctgaactccaagaatacgttaagtataagtacgccatggacgaagcggatgagaaaggctggttccctctccatgaggccgtcgtgcagcctatccaacagattctagagattgtgctcgatgcatcctacaaaactctgtgggaatttaagacatgcgatggagaaactcccttaacattggcagtcaaagctggcctagttgaaaacgtccgaacattactcgagaaaggagtatggcctaatacaaaaaatgacaaaggcgagaccccgctgcttatagctgtgaaaaagggatcttatgatatggtgtcaaccctcattaagcacaatacctcacttgaccaaccgtgtgtcaagaggtggtctgctatgcacgaggcggccaaacagggcagaaaggatatcgtcgcactccttctcaagcatgggggcaacgtgcacctgagagatggcttcggggtgacacctctaggcgtcgccgccgagtacggtcactgtgacgtgctggagcacctaatccacaagggaggcgacgtgctggcgcttgccgatgacggtgctagtgtgttatttgaagctgcggggggggggaatccagattgtatcagcttattactcgagtatggaggttccggcaatgtgccgaacagggccgggcacttgccaattcatagagctgcatacgaaggccactatctggctctgaaatacctgattccagttacctctaagaacgctatccgtaagagtgggctgactcctatacacagtgcagctgacgggcaaaacgctcaatgcctcgagttgctcattgagaatgggttcgacgtgaatacgttgctggcggatcatatatcccagtcttacgatgacgagcgaaagaccgctctctatttcggcgtgagcaacaatgatgtgcattgcacagaagtcctgctggcggccggagcagacccaaacctggaccctctgaattgcctgctcgtggcggtgagggctaataactacgagatcgttcgccttctgctaagtcacggtgcaaacgtcaactgctattttatgcacgttaatgatacccgattcccctctgtcattcagtacgcgctgaatgatgaagtgatgctacgtctgctgctgaataacgggtatcaggtagagatgtgttttgactgcatgcacggggacatcttcggcaacagcttcgtctggagcgaaattcaagaggaagttttgccgggctggacttcatgtgtcatcaaagataatcctttttgcgagttcattactgttccttggatgaaacatctagtcggtcgcgtgacaagggttctgatcgactacatggactatgtccctctgtgtgcgaagttaaaatctgcactggaggtccagcgagaatggccagagatacgccagatcttagaaaatccctgctcactcaaacatctgtgccgcctgaaaattcgacggctaatggggctacagaaactgtgccaacccgcctccgtcgagaagctgcctctcccaccagctatccagcgctatatcctattcaaggagtacgatctttacgggcaggagctcaagttgacctag

SEQ ID NO: 270183 - DNA, 1767 bp, Artificial Sequence
  derived and/or modified sequence
atggacaccaatgatgatcctgatgaggaccacctgaccagctatgacatccagctgagcatccaggagagcattgaggccagcaagacagccctgtgcccagagagatttgtgcccctgagcgcccagaacaggaagctggtggaggccatcaagcagggccacatccctgagctgcaggagtatgtgaagtacaagtatgccatggatgaagcagatgagaagggctggttccccctgcatgaagctgtggtgcagcccatccagcagatcctggagatcgtgctggatgccagctacaagaccctgtgggagttcaagacctgtgatggagagacccccctgaccctggccgtgaaggccggcctggtggagaatgtgaggaccctgctggagaagggcgtgtggcccaacaccaagaatgacaagggggagacccccctgctgattgctgtgaagaagggcagctatgacatggtgtccaccctcatcaagcacaacaccagcctggaccagccctgtgtgaagcgctggagcgccatgcatgaggccgccaagcagggcaggaaggacatcgtggccctgctgctgaagcatggaggaaatgtgcacctgagagatggctttggagtgacccccctgggcgtggccgcagaatatggccactgtgatgtgctggagcacctgatccacaagggaggagatgtgctggccctggctgatgatggagcctctgtgctgtttgaggccgccggcggcggcaacccagactgcatcagcctgctgctggagtatggaggcagcggaaatgtgcccaacagagctggccacctgcccatccacagagctgcctatgagggccactacctggccctgaagtacctgatccctgtgaccagcaagaatgccatcaggaagagcggcctgacccccatccacagcgctgctgatggccagaatgcccagtgcctggagctgctgattgaaaatggatttgatgtgaacaccctgctggccgaccacatcagccagagctatgatgatgagaggaagacagccctgtactttggagtgagcaacaatgatgtgcactgcacagaggtgctgctggccgccggggctgaccccaacctggaccccctgaactgcctgctggtggccgtgcgggccaacaactatgaaattgtgcggctgctgctgagccacggggccaacgtgaactgctacttcatgcacgtgaatgacacccgcttccccagcgtcatccagtatgccctgaatgatgaggtgatgctgcggctgctgctgaacaacggctaccaggtggagatgtgctttgactgcatgcacggggacatcttcggcaacagctttgtgtggagcgagatccaggaggaggtgctgcccggctggaccagctgtgtgatcaaggacaaccccttctgtgagttcatcaccgtgccctggatgaagcacctggtgggccgggtgaccagggtgctgattgactacatggactatgtgcccctgtgtgccaagctgaagagcgccctggaggtgcagcgggagtggccagagatccggcagatcctggagaacccctgcagcctgaagcacctgtgccgcctgaagatccggcggctgatgggcctgcagaagctgtgccagcctgcctctgtggagaagctgcccctgcccccagccatccagcgctacatcctcttcaaggagtatgacctgtatggccaggagctgaagctgacctag

SEQ ID NO: 270184 - DNA, 726 bp, Artificial Sequence
  derived and/or modified sequence
atggacaccaatgatgatcctgatgaggaccacctgaccagctatgacatccagctgagcatccaggagagcattgaggccagcaagacagccctgtgcccagagagatttgtgcccctgagcgcccagaacaggaagctggtggaggccatcaagcagggccacatccctgagctgcaggagtatgtgaagtacaagtatgccatggatgaagcagatgagaagggctggttccccctgcatgaagctgtggtgcagcccatccagcagatcctggagatcgtgctggatgccagctacaagaccctgtgggagttcaagacctgtgatggagagacccccctgaccctggccgtgaaggccggcctggtggagaatgtgaggaccctgctggagaagggcgtgtggcccaacaccaagaatgacaagggggagacccccctgctgattgctgtgaagaagggcagctatgacatggtgtccaccctcatcaagcacaacaccagcctggaccagccctgtgtgaagcgctggagcgccatgcatgaggccgccaagcagggcaggaaggacatcgtggccctgctgctgaagcatggaggaaatgtgcacctgagagatggctttggagtgacccccctgggcgtggccgcagaatatggccactgtgatgtgctggagcacctgatccacaagggaggagatgtgctggccctggccgactag

SEQ ID NO: 270185 - DNA, 2956 bp, Artificial Sequence
  derived and/or modified sequence
aggaaggcaagtccctggataagaatgacaagatgatcattccaaaaggaaagcagtcaagacagtgcaggaggtgaggccatcttataggaagagcagttgtccagcctctggaagaaaaagctcagtggagatctgacagccttcctgggggatattaacagggctcctgtgttgcagaggaacactactttctcagtgtagctctgagaaagagaaccagaaaaaggatttctcttcagtagaaaaggcaaataccataaagaaggaatcgctgtaacttattgcttgaatggatactaatgatgaccctgatgaagaccatcttacaagttatgatattcagctaagtattcaagaatccattgaagccagcaagactgcactttgtcctgaaagatttgtacccctaagtgctcaaaacagaaaacttgtggaggccataaaacaaggtcacattcctgagctccaggagtatgtaaaatataaatatgcaatggatgaagctgatgaaaaaggatggtttccattgcatgaagctgttgttcaacccattcaacaaatacttgagattgttctggatgcatcctataagacactctgggaattcaagacctgtgatggagaaacacccttgactttggcagtcaaagctggtctggtggaaaatgtaagaactttattagaaaagggagtgtggcccaacacaaaaaatgataaaggagagaccccccttctgattgctgtgaaaaagggctcctatgacatggtgtcgactctgatcaaacataacactagcctagaccagccctgtgtcaagcgatggtcagcaatgcatgaagcagccaagcaaggccgaaaagatatcgtagctctgctgctgaaacatggaggcaatgtccacctgagagatggatttggagtcacaccactaggcgtcgctgccgagtatggtcactgtgacgtgttagaacatctaatccacaaaggtggtgatgtgcttgctttggcggatgatggggcgtcggtgctgtttgaggcagcaggaggtggcaatcccgactgcatttccctcctgctggaatatggaggaagcggaaatgtacctaaccgagcaggacatcttcctatacaccgagctgcctatgaggggcattatcttgcactgaaatatcttatcccagtaacatctaaaaatgcaattcggaaaagtgggctaacaccaattcactcagcagcagatggacaaaatgcacagtgtctagaactgctcattgaaaatggttttgatgtcaacactctacttgctgaccacatttcccagagctatgacgatgagaggaagactgcgctgtattttggcgtttctaataatgacgttcattgcacagaagtccttctggctgcaggtgcagacccaaacttagatcccctcaactgtctacttgttgcagtgagggccaataattatgaaattgtcaggctgcttctctcccatggagctaatgtcaattgttattttatgcatgtgaatgacactcgtttccccagtgtcattcaatatgctctaaacgacgaggtaatgctgaggctattgctgaataatggctatcaagtggagatgtgctttgactgcatgcatggtgacatctttggaaattcatttgtgtggtcagagatacaggaagaggtgctgccaggatggacatcttgtgtaataaaagataacccgttctgtgagtttattacagttccttggatgaagcacttggtaggcagagttactcgtgtactaatagattacatggattatgttcctctgtgtgctaaactgaagtctgcactagaagtacagagagaatggccagaaatccgccaaatactagagaatccttgttcattgaagcatttgtgtcggttaaaaattcgaaggcttatgggtctccagaaactctgccagccagcctcagtggagaagcttcctctaccaccagctattcaaagatacatattatttaaagagtatgatctctatggacaagagctaaaattgacataacttaatattttaaaatgtgatttaaaaaaaatgttgaaatgtgattccctcagataatttcttgtaaccattttacatccttaattgtaaagtgtatttaaattcattgacagttttataggttatcatgtgttcttatgggaacaccatgatttatgtctttaaagacatttgcattttttaaagatagtattttgaacttagatttgtatctttgtttgctacaagtcatcaaactctccctatcaagtggctcctacaatatccacaatcaagtctctatgtttaaaaaacagataaccactttctcaaacccacatctgccagttgctggccagattctcctgtctttcacggtcttgctgtgtaaaagagctcctcctgcctgtaagttcacagactgtgatctggcatctgaccctccactgcttttctcaaggtccctgacaatctctttgttggtaaattcagtgaacattcttcagtccctcttccaatcgattcctacagcatctaacattgttgcctgttccttgcttgaaatgatatctctttccttgtttctcgcaaaacctgttctcttgggtgtcctcccacctccctggacactctgtctctggcttctttctgcctagctcatctctagccaatcttacagttatatatcttaagccctcttctctttgttctttaagttatatatcctaagccctctttgctttgttctctgggatattttatccacatccatggtcttaatcattttgctagagactacaaaatttccatccaaagctcagctctttctctcatgttctcctgacctatgtagacaattggcctcatgaacatttgaacacaaagacacctcaaattcaacatgtccccagatgaact

SEQ ID NO: 270186 - DNA, 3204 bp, Artificial Sequence
  derived and/or modified sequence
aaccctgggttcaggcttctgctgtatcatatttgctaaagacaccaaaactagatagagctatttgatcctgactaaggaaagcagtcaagacagtgcaggaggtgaggccatcttataggaagagcagttgtccagcctctggaagaaaaagctcagtggagatctgacagccttcctgggggatattaacagggctcctgtgttgcagaggaacactactttctcagtgtagctctgagaaagagaaccagaaaaaggatttctcttcagtagaaaaggcaaataccataaagaaggaatcgctgtaacttattgcttgataaatcctgatgattctctcagggacctctagtagattagctcaacactcgagaatcattgcagcttcaagggaccactgacagcagctgtttgcaatagttgacaaggagaaggaatagagggaaaagatagagaaaagaagagattttgtttcctctcagaaaaccaatggtccaagtgaaaacacaaacacaagaatggatactaatgatgaccctgatgaagaccatcttacaagttatgatattcagctaagtattcaagaatccattgaagccagcaagactgcactttgtcctgaaagatttgtacccctaagtgctcaaaacagaaaacttgtggaggccataaaacaaggtcacattcctgagctccaggagtatgtaaaatataaatatgcaatggatgaagctgatgaaaaaggatggtttccattgcatgaagctgttgttcaacccattcaacaaatacttgagattgttctggatgcatcctataagacactctgggaattcaagacctgtgatggagaaacacccttgactttggcagtcaaagctggtctggtggaaaatgtaagaactttattagaaaagggagtgtggcccaacacaaaaaatgataaaggagagaccccccttctgattgctgtgaaaaagggctcctatgacatggtgtcgactctgatcaaacataacactagcctagaccagccctgtgtcaagcgatggtcagcaatgcatgaagcagccaagcaaggccgaaaagatatcgtagctctgctgctgaaacatggaggcaatgtccacctgagagatggatttggagtcacaccactaggcgtcgctgccgagtatggtcactgtgacgtgttagaacatctaatccacaaaggtggtgatgtgcttgctttggcggatgatggggcgtcggtgctgtttgaggcagcaggaggtggcaatcccgactgcatttccctcctgctggaatatggaggaagcggaaatgtacctaaccgagcaggacatcttcctatacaccgagctgcctatgaggggcattatcttgcactgaaatatcttatcccagtaacatctaaaaatgcaattcggaaaagtgggctaacaccaattcactcagcagcagatggacaaaatgcacagtgtctagaactgctcattgaaaatggttttgatgtcaacactctacttgctgaccacatttcccagagctatgacgatgagaggaagactgcgctgtattttggcgtttctaataatgacgttcattgcacagaagtccttctggctgcaggtgcagacccaaacttagatcccctcaactgtctacttgttgcagtgagggccaataattatgaaattgtcaggctgcttctctcccatggagctaatgtcaattgttattttatgcatgtgaatgacactcgtttccccagtgtcattcaatatgctctaaacgacgaggtaatgctgaggctattgctgaataatggctatcaagtggagatgtgctttgactgcatgcatggtgacatctttggaaattcatttgtgtggtcagagatacaggaagaggtgctgccaggatggacatcttgtgtaataaaagataacccgttctgtgagtttattacagttccttggatgaagcacttggtaggcagagttactcgtgtactaatagattacatggattatgttcctctgtgtgctaaactgaagtctgcactagaagtacagagagaatggccagaaatccgccaaatactagagaatccttgttcattgaagcatttgtgtcggttaaaaattcgaaggcttatgggtctccagaaactctgccagccagcctcagtggagaagcttcctctaccaccagctattcaaagatacatattatttaaagagtatgatctctatggacaagagctaaaattgacataacttaatattttaaaatgtgatttaaaaaaaatgttgaaatgtgattccctcagataatttcttgtaaccattttacatccttaattgtaaagtgtatttaaattcattgacagttttataggttatcatgtgttcttatgggaacaccatgatttatgtctttaaagacatttgcattttttaaagatagtattttgaacttagatttgtatctttgtttgctacaagtcatcaaactctccctatcaagtggctcctacaatatccacaatcaagtctctatgtttaaaaaacagataaccactttctcaaacccacatctgccagttgctggccagattctcctgtctttcacggtcttgctgtgtaaaagagctcctcctgcctgtaagttcacagactgtgatctggcatctgaccctccactgcttttctcaaggtccctgacaatctctttgttggtaaattcagtgaacattcttcagtccctcttccaatcgattcctacagcatctaacattgttgcctgttccttgcttgaaatgatatctctttccttgtttctcgcaaaacctgttctcttgggtgtcctcccacctccctggacactctgtctctggcttctttctgcctagctcatctctagccaatcttacagttatatatcttaagccctcttctctttgttctttaagttatatatcctaagccctctttgctttgttctctgggatattttatccacatccatggtcttaatcattttgctagagactacaaaatttccatccaaagctcagctctttctctcatgttctcctgacctatgtagacaattggcctcatgaacatttgaacacaaagacacctcaaattcaacatgtccccagatgaactaaaaaaaaaaaaaaaaaaa

SEQ ID NO: 270187 - DNA, 2729 bp, Artificial Sequence
  derived and/or modified sequence
aggatttctcttcagtagaaaaggcaaataccataaagaaggaatcgctgtaacttattgcttgaatggatactaatgatgaccctgatgaagaccatcttacaagttatgatattcagctaagtattcaagaatccattgaagccagcaagactgcactttgtcctgaaagatttgtacccctaagtgctcaaaacagaaaacttgtggaggccataaaacaaggtcacattcctgagctccaggagtatgtaaaatataaatatgcaatggatgaagctgatgaaaaaggatggtttccattgcatgaagctgttgttcaacccattcaacaaatacttgagattgttctggatgcatcctataagacactctgggaattcaagacctgtgatggagaaacacccttgactttggcagtcaaagctggtctggtggaaaatgtaagaactttattagaaaagggagtgtggcccaacacaaaaaatgataaaggagagaccccccttctgattgctgtgaaaaagggctcctatgacatggtgtcgactctgatcaaacataacactagcctagaccagccctgtgtcaagcgatggtcagcaatgcatgaagcagccaagcaaggccgaaaagatatcgtagctctgctgctgaaacatggaggcaatgtccacctgagagatggatttggagtcacaccactaggcgtcgctgccgagtatggtcactgtgacgtgttagaacatctaatccacaaaggtggtgatgtgcttgctttggcggatgatggggcgtcggtgctgtttgaggcagcaggaggtggcaatcccgactgcatttccctcctgctggaatatggaggaagcggaaatgtacctaaccgagcaggacatcttcctatacaccgagctgcctatgaggggcattatcttgcactgaaatatcttatcccagtaacatctaaaaatgcaattcggaaaagtgggctaacaccaattcactcagcagcagatggacaaaatgcacagtgtctagaactgctcattgaaaatggttttgatgtcaacactctacttgctgaccacatttcccagagctatgacgatgagaggaagactgcgctgtattttggcgtttctaataatgacgttcattgcacagaagtccttctggctgcaggtgcagacccaaacttagatcccctcaactgtctacttgttgcagtgagggccaataattatgaaattgtcaggctgcttctctcccatggagctaatgtcaattgttattttatgcatgtgaatgacactcgtttccccagtgtcattcaatatgctctaaacgacgaggtaatgctgaggctattgctgaataatggctatcaagtggagatgtgctttgactgcatgcatggtgacatctttggaaattcatttgtgtggtcagagatacaggaagaggtgctgccaggatggacatcttgtgtaataaaagataacccgttctgtgagtttattacagttccttggatgaagcacttggtaggcagagttactcgtgtactaatagattacatggattatgttcctctgtgtgctaaactgaagtctgcactagaagtacagagagaatggccagaaatccgccaaatactagagaatccttgttcattgaagcatttgtgtcggttaaaaattcgaaggcttatgggtctccagaaactctgccagccagcctcagtggagaagcttcctctaccaccagctattcaaagatacatattatttaaagagtatgatctctatggacaagagctaaaattgacataacttaatattttaaaatgtgatttaaaaaaaatgttgaaatgtgattccctcagataatttcttgtaaccattttacatccttaattgtaaagtgtatttaaattcattgacagttttataggttatcatgtgttcttatgggaacaccatgatttatgtctttaaagacatttgcattttttaaagatagtattttgaacttagatttgtatctttgtttgctacaagtcatcaaactctccctatcaagtggctcctacaatatccacaatcaagtctctatgtttaaaaaacagataaccactttctcaaacccacatctgccagttgctggccagattctcctgtctttcacggtcttgctgtgtaaaagagctcctcctgcctgtaagttcacagactgtgatctggcatctgaccctccactgcttttctcaaggtccctgacaatctctttgttggtaaattcagtgaacattcttcagtccctcttccaatcgattcctacagcatctaacattgttgcctgttccttgcttgaaatgatatctctttccttgtttctcgcaaaacctgttctcttgggtgtcctcccacctccctggacactctgtctctggcttctttctgcctagctcatctctagccaatcttacagttatatatcttaagccctcttctctttgttctttaagttatatatcctaagccctctttgctttgttctctgggatattttatccacatccatggtcttaatcattttgctagagactacaaaatttccatccaaagctcagctctttctctcatgttctcctgacctatgtagacaattggcctcatgaacatttgaacacaaagacacctcaaattcaacatgtccccagatgaact

SEQ ID NO: 270188 - DNA, 1767 bp, Artificial Sequence
  derived and/or modified sequence
atggacaccaacgacgaccccgacgaggaccacctgaccagctacgacatccagcttagcatccaggagtcaattgaagcatcaaaaacggcgctgtgtcccgagagattcgtacccctgagcgctcagaatcggaaactggtcgaagccataaagcaaggtcacataccagagctccaggagtacgtcaagtataaatacgctatggatgaggcggacgagaaagggtggttcccacttcacgaagctgtcgtgcagccgatccaacagattctcgaaatcgtgctcgacgcctcctacaagactctgtgggagtttaaaacgtgcgacggtgaaactcccctgaccctggccgtgaaggctggtctagtcgaaaacgtgagaacacttctcgaaaagggggtgtggccaaatactaagaacgataaaggcgagacgccactgctcattgcagtgaaaaaaggctcatatgacatggtcagcacattgattaaacataacacgtccctggaccaaccctgcgtcaaacgctggagtgccatgcacgaagccgctaaacagggtaggaaagatatcgtggccctgctgctgaaacatgggggcaatgtgcacctgcgcgacgggttcggcgtaacacccctgggtgttgccgcggaatacggccactgcgatgttctggagcacctgatccataagggcggcgatgtgctagcactggcggatgacggtgctagtgtgttatttgaggctgctggagggggaaatcccgattgtatttctctgctgcttgaatacggcggaagcgggaatgtgcctaacagagccgggcacctccctatccatagggctgcttacgagggtcactaccttgccctgaagtatctcatccctgttactagcaaaaacgcaatcagaaagagcgggctgacacctatccacagtgcagccgatggtcagaatgcccagtgcttggagttgctgatcgaaaacggttttgatgtgaacacactcttggccgaccacatttcacagtcttatgacgatgaaaggaagacggcgctctacttcggcgtaagcaataatgatgtgcactgtaccgaggtactcctggccgccggcgcagatcccaacctagatccgctcaattgcctgctggtggcagtgcgtgccaataattatgaaattgtgcgcttgctcttatcgcacggtgccaatgtgaactgttatttcatgcacgtgaatgatactcggtttccatccgttatccagtatgccctgaacgacgaggtgatgctgcgattgctcctgaacaacggttatcaggtcgaaatgtgctttgattgtatgcacggggacatattcggcaacagcttcgtttggtcggagatccaggaagaagttctgccgggatggacttcttgtgtgatcaaggataaccctttttgcgagtttattaccgtgccctggatgaagcacttagtaggcagggttactcgcgtacttatcgattacatggattatgtacccttgtgtgcgaagctgaagtccgcacttgaggttcagcgtgagtggcctgaaattagacaaattcttgagaacccttgctccttaaagcacctgtgccgcttgaagattcgccgtctgatgggcttgcagaagctgtgccagcccgcaagtgtggaaaaactgccgttacctccggccatccagaggtatattctctttaaggaatacgacctgtacggccaggaactgaagttaacatag

SEQ ID NO: 270189 - DNA, 1767 bp, Artificial Sequence
  derived and/or modified sequence
atggacaccaacgacgaccccgacgaggaccacctgaccagctacgatattcagctctccatccaggagagtatagaggctagcaagacagcactctgccccgaacggtttgtacctttgagtgcccaaaatcgaaagcttgtagaggccatcaagcaggggcatatacctgagctacaggaatatgtaaaatacaaatatgccatggatgaggcagacgaaaaaggctggttccccttgcacgaggcagtggtgcaacccattcagcagatcctagaaatcgtcctggacgcgtcatacaagactctgtgggagttcaagacctgcgatggggagactcccctgacacttgctgtgaaggcgggcctggtggagaacgtgcgaacattgttagagaagggcgtctggcctaataccaagaacgataaaggggagactcccctgctcattgctgtgaagaagggctcctacgatatggtaagtactctcatcaaacataacacatcattggatcagccttgtgtgaagcgttggtcagctatgcatgaggcggccaagcaaggccgtaaagatatcgtggcactgctcttaaaacacggagggaacgttcatcttcgtgatggatttggtgtaactcctctaggcgtggccgcagaatacgggcactgtgacgtgcttgaacacctgattcataagggaggcgatgtgttagccttggctgacgacggcgccagcgtgttgtttgaggccgctgggggcggcaatccggattgcatttcactgctcctggaatacggcgggtccgggaatgttcctaaccgggccgggcacctccctatacatagagccgcttacgagggccattatctggctctgaaatacttgatccccgtgacaagtaagaacgccatccggaagtcggggttaaccccaatccatagcgccgccgacggtcagaacgcgcagtgtcttgaactgctcattgaaaatggttttgatgttaatacgctcctagcggatcatatatctcagtcatatgatgacgagcgtaagaccgccctgtatttcggcgttagtaacaacgacgtgcattgtaccgaggttctcctggcagcaggtgcagatcccaaccttgaccctctcaattgtcttttagtcgcagtaagagcaaataactacgagatcgtgcgcctactgttatcacatggcgcaaacgtcaattgctattttatgcatgttaacgatacaagattcccctctgtaatacagtacgcgctcaacgacgaggtgatgcttaggcttttactgaacaatggatatcaggtggaaatgtgtttcgattgtatgcacggtgatatctttgggaactcctttgtatggtcggaaattcaagaagaagtgctgccgggatggaccagttgcgtgatcaaggacaaccccttttgcgagttcatcaccgtcccatggatgaagcacctggtgggtagagtgacccgcgtactgattgattatatggactatgtgccactctgcgcaaagctcaaatctgccttggaggtccagagggaatggccagaaatcagacaaatattggaaaacccctgtagcttgaaacacctctgcaggctgaagatacgtaggctgatgggcctacagaagttgtgccaaccggcaagcgttgagaagctccctctcccaccagccatccagagatacatcttgtttaaagagtatgatctttatgggcaggaactcaagctcacttag

SEQ ID NO: 270190 - DNA, 726 bp, Artificial Sequence
  derived and/or modified sequence
atggacaccaacgacgaccccgacgaggaccacctgaccagctacgacatccagctctccatacaggagtccatagaggcgtcaaagaccgctttgtgtcccgagcggttcgtccccttgtccgcacagaaccggaagttggtggaagccattaaacaggggcacatacctgaactgcaggagtacgtgaagtataaatacgccatggacgaggccgatgaaaaaggatggttccctttgcacgaggcagtggtacaaccaatccagcagattctcgagatcgttctggacgccagttacaagaccctctgggagtttaagacttgtgatggcgagactcctctgacattagccgtgaaggcaggcctcgtagaaaacgtcagaaccctattggagaaaggcgtatggccgaatacgaagaatgacaaaggggagactccattgttgatcgcagtcaaaaagggctcctacgatatggttagcaccctaataaagcacaacacaagcctggatcagccatgtgtcaagcggtggtctgccatgcacgaggctgctaaacagggtcgcaaggatatcgtggccttactgctcaaacatggcgggaacgtgcatcttcgggacggctttggcgtgactccgcttggggtggccgctgaatacggacactgtgatgtcctggagcatttgatccacaaaggcggtgacgtgctggccctcgcagattag

SEQ ID NO: 270191 - DNA, 1767 bp, Artificial Sequence
  derived and/or modified sequence
atggacaccaacgacgaccccgacgaggaccacctgaccagctacgacattcaactgagcattcaggaatcgattgaggcttcaaaaaccgctctctgcccagagcgattcgtgccgttgtctgcacaaaaccgtaagttggttgaagctatcaagcagggccacattcccgaattacaagagtacgtcaagtataagtacgccatggatgaggcggatgaaaaaggatggtttcccctacacgaggcggttgttcagccaattcagcaaatcctcgaaattgttctcgacgccagttacaagaccctttgggagtttaagacctgcgatggagagacacctttgactctggccgtgaaggcaggcctcgtggagaatgtcagaacactcctcgaaaagggcgtctggcctaacaccaagaatgacaaaggggaaacccccctgctaatcgcagtgaaaaagggaagctacgacatggtgtcaacgctgattaagcataacacctctctggatcagccatgtgtcaagcggtggtccgcaatgcatgaggcagctaagcagggtaggaaagatatagtggctcttctcctcaaacacgggggcaatgtccacctgcgcgatggcttcggtgttacccctctgggggtcgcagcagaatacggacattgtgatgtgcttgagcacctgatccataagggaggggatgtgttagctctggctgacgatggcgcctcggttctctttgaggccgccgggggcggaaatcctgactgtatatccctgttactggagtatggaggcagcggaaatgtgcctaaccgagcaggtcatctgcctattcaccgagctgcttacgagggccattatctggctctgaaatatctgatacccgtaacctcgaaaaacgccatacggaagtccggattgacacccatccatagtgctgccgacggccagaatgctcagtgtctggagctgctgatcgagaacggcttcgacgtaaacaccctcctggcggatcacattagtcagagttatgacgatgagagaaaaacagcactttatttcggcgtgtccaataacgatgtccactgcacagaggtactgctggccgctggtgcagaccccaatctagatcccttgaactgcctgctggtggcagttagggccaacaattacgagattgttcggctgttgctatctcatggcgccaacgtcaattgttacttcatgcatgtgaacgacacccgcttccccagcgtgatacagtatgcattaaacgatgaggtaatgctgaggctgctcctcaataatggctatcaggtcgagatgtgcttcgactgcatgcacggagacatcttcgggaattccttcgtgtggtccgagatccaggaggaagtgttgcccggttggactagttgtgtgattaaagataatccattctgtgagttcataacagtcccctggatgaagcatctggtcggtagagtaactagggttctgatcgactacatggactacgttcccctctgcgccaaactaaaatccgctctggaggtgcagagggaatggccagagatcagacagatcctggagaacccgtgctcccttaagcatctgtgccgtttgaaaattcggagactaatgggcctgcagaaactatgccagcccgcttctgtggagaagcttcccttaccccccgccatccagagatacatcctgtttaaggagtatgatctctacggccaggagctgaaacttacatag

SEQ ID NO: 270192 - DNA, 1767 bp, Artificial Sequence
  derived and/or modified sequence
atggacaccaacgacgaccccgacgaggaccacctgaccagctacgacattcagctctccattcaggaaagtattgaggcttctaaaacagccctgtgccccgagaggttcgttcccctttctgctcagaaccgcaaactcgttgaagcaattaaacaaggacacatcccggaattgcaagagtacgtgaagtacaaatacgctatggatgaagccgacgagaagggctggttccctcttcacgaggccgtggtacagcctatccagcagatacttgagatcgtccttgacgcctcttataaaacactgtgggagttcaaaacgtgcgacggcgaaacacccctgactctggctgtcaaagccggcctggtagagaacgtgcggactttattggagaagggggtgtggcctaataccaagaatgataagggcgaaacacccctgctcattgccgtgaaaaagggaagctacgatatggtcagtaccctgattaaacataacaccagcctggatcagccgtgcgtgaagcgctggagtgctatgcatgaggccgcgaaacagggccgcaaggacattgttgcacttcttcttaaacatggggggaacgtacatctgagggacgggttcggagtgacgcccctcggcgttgctgcggaatacgggcattgcgatgtcctggaacatctgatccacaaaggcggagacgtcttggccctggccgacgacggggctagtgtgttgttcgaagctgccggcggaggcaacccagattgcatatccctgctcctagaatacggaggaagcggtaatgtgccaaacagggcaggacaccttccaatccatcgcgccgcttatgaaggccactacctcgcgttgaaatacttaattcccgtcactagtaagaacgccatcaggaaatctgggctaacaccaatccattcggccgctgatggacagaacgcacaatgtttggagcttctcatcgagaatggcttcgatgtcaacaccctactggccgaccacatttctcagtcctacgatgacgagagaaaaacggccctctacttcggggttagcaataacgatgtccactgtactgaagtcctgctggccgcgggagccgacccgaacctggaccccctcaactgtctgctagtggctgtgagagccaacaattacgagatcgtgagactgctcctgtcacacggcgcgaacgtgaactgttattttatgcacgtaaacgacactcgcttcccatcagtcattcagtacgcactgaatgacgaggtgatgcttcggctattgctgaacaacggataccaggtcgagatgtgttttgactgcatgcacggggatatttttggaaacagttttgtgtggtcggagatacaggaagaagtgctccctggttggacctcctgcgtaatcaaagacaaccccttttgcgaatttatcaccgttccttggatgaaacacctggtcgggcgcgttacaagggtactgatcgactatatggactatgtcccactgtgtgccaaactgaagtctgccctggaggtgcagcgcgagtggccagaaataagacagattcttgaaaacccttgttctctcaaacacctctgcagactcaaaataagacgactgatgggcctacaaaagctgtgtcaaccagccagcgttgagaaattgcctctcccccccgctattcagaggtatatcctgttcaaagaatacgatctttatggccaagagctgaagctgacttag

SEQ ID NO: 270193 - DNA, 1767 bp, Artificial Sequence
  derived and/or modified sequence
atggacaccaacgacgaccccgacgaggaccacctgaccagctacgacatccaattgagcatccaggagtccatagaagcatctaagactgctctgtgcccagagcggtttgtgcccctgtccgcccagaaccgtaagctagtagaggctattaaacaggggcacatccctgaacttcaggaatacgttaaatacaagtatgcgatggatgaggccgacgaaaaggggtggttccccctgcacgaggccgtggtccaacccatccaacagatattggaaatcgtgctggacgcgtcttacaaaacactgtgggaatttaaaacttgtgacggtgaaaccccactgacattggccgtaaaggccgggctggtggaaaacgtgcgcactctgctggagaaaggcgtttggcctaacactaaaaatgataagggtgagacgcctctgctgatagctgtgaagaagggctcgtacgacatggttagcaccctcataaagcataacacaagcctcgaccagccatgcgtgaagagatggagtgccatgcatgaagccgcaaaacagggtagaaaggacattgtggccctcctgctcaagcacggggggaacgttcacctgagggatggcttcggcgtcaccccactgggcgtggctgctgagtacggtcactgcgatgtgcttgagcacttaattcacaaggggggagatgtcctcgccctggcggacgatggggccagcgtcctcttcgaggctgcagggggcggaaacccggattgtattagtctccttctggaatacggcggatccggcaacgtccccaaccgggccggccatctcccaatccacagggcagcttacgaagggcactacctggccctaaagtacctaattccggtgacatccaagaacgctattcgaaaaagcgggctgacccctatccacagtgccgccgatggacagaatgctcagtgtctggagctgctcattgaaaatggttttgatgtaaataccctgctggctgatcatatcagccagtcttacgacgacgagagaaaaaccgctctctactttggagtgtccaacaatgatgtgcactgcactgaagtactcctagctgccggcgctgaccctaacctcgatcccctcaattgtcttctggtcgctgtccgcgcgaacaattacgaaatcgtaaggctgcttctttcgcacggagccaatgttaactgttactttatgcacgtcaacgatacacgatttcccagcgtgatccagtacgccctgaacgatgaagtaatgttgcggctgctgctgaataatggatatcaggtggagatgtgctttgactgtatgcacggagatatctttggcaatagctttgtttggtctgaaatccaggaagaagtgctcccggggtggacaagttgtgtcataaaggacaaccctttttgcgaattcatcaccgtcccctggatgaagcacctcgtcggacgagtgacccgcgtattgattgactacatggattatgtacctctttgcgcaaaactgaagtcagccctggaagtgcagagagagtggcccgaaattcgccagatactggaaaacccatgctcgctgaagcacctctgtaggctcaagattaggcgcctcatggggcttcagaaactgtgccaacctgcaagcgtggaaaaacttcctctccctccagctatccagaggtacatactgttcaaggaatatgacttatatgggcaggagttgaagctcacatag

SEQ ID NO: 270194 - DNA, 1767 bp, Artificial Sequence
  derived and/or modified sequence
atggacactaatgatgaccccgacgaagatcatcttactagttacgatatccagctgtcaattcaggaatccatagaggcgagtaagacagctctctgtccagagaggttcgttccactgagtgcacagaaccgaaagcttgtcgaagcaatcaagcagggccacatcccagaactacaggagtacgtaaaatacaagtacgcaatggacgaggccgatgagaagggctggtttcctctccacgaggccgtagtgcaacccatacagcagatcctcgaaattgtcctcgacgctagctacaagaccctgtgggaattcaagacctgcgatggcgagacgcctctgacgctggccgttaaggctggcttggtggagaacgttagaacccttctcgaaaagggagtttggccaaacactaaaaatgacaagggcgaaaccccattgctgattgctgtgaaaaaggggagttatgacatggtgtctactctgataaaacacaataccagtctggatcagccttgcgtcaagcgctggagcgccatgcatgaagctgcaaaacagggaaggaaagacatcgtcgcgcttctactgaagcatggcggaaacgttcatctgcgggacggcttcggagtgacaccgctgggcgtcgccgcagagtatggtcattgcgacgtgctagagcacctcattcacaaagggggtgatgtcttggctctggctgacgatggtgcctcagtgctgtttgaagctgccggtggtgggaaccctgattgtataagcctgcttctggagtacggcggaagtggcaatgtgccgaatagggcagggcacttgccaattcatagagctgcatatgagggtcactacctcgccttgaagtatctgattccagtgaccagcaagaatgcaattcgtaaaagcggactgactcctatccactcagccgcagacggccagaacgcacagtgtctagagctgctcatagaaaacggctttgacgtaaacaccttgttggcagaccacatttcgcaatcttatgacgacgagcgcaaaacagccttatactttggagttagcaacaacgacgttcattgcactgaagtgttgctcgccgctggggctgatcctaatctggaccccctgaattgcctgcttgttgccgtacgagcgaacaattacgagattgttcgcctcctgttgagtcacggggctaatgtcaactgctactttatgcatgtaaacgacacgaggttcccaagcgtcatccaatacgcgctcaacgatgaggttatgctgcggcttctactgaataacgggtaccaggtggaaatgtgtttcgactgtatgcatggcgatatttttggaaacagttttgtctggagcgagattcaggaagaagtgctgcccggatggactagctgcgtgattaaagacaatccgttctgcgagttcatcactgtcccctggatgaaacacttggtcggacgcgtcaccagggtgctgattgactatatggactatgtgcctttgtgtgccaaactcaagtccgcccttgaagtccaacgcgagtggccagaaattcgtcaaatcttagagaacccttgttcattgaagcacctgtgcaggctgaagatccgaaggttgatggggctgcagaaactgtgccagcccgcatcggtggaaaaactccctctccctcccgctatccaaaggtacattctcttcaaagagtatgacctctatgggcaggaactaaagctgacatag

SEQ ID NO: 270195 - DNA, 1767 bp, Artificial Sequence
  derived and/or modified sequence
atggacactaacgacgatcccgacgaggaccacctcactagctatgacatccagctgtcaatccaggaaagcatcgaggcttccaagacagctctgtgtcctgagcgtttcgtgccactgagcgcacagaacaggaagcttgtggaggctataaagcaaggccacatccctgaactccaggagtacgtcaagtacaagtacgccatggatgaggcagacgaaaagggttggttcccactgcatgaggctgtggtacaacccatccaacaaatattagaaattgtactggacgcctcgtataagaccctatgggagtttaaaacctgtgacggggagactccccttactctggcagtcaaagcaggattggtggagaatgtcaggacactgctcgaaaaaggggtgtggcccaacacgaagaatgacaagggcgagacgcctttgctcatagcggtgaagaagggcagctatgatatggtatctacactgatcaaacataacaccagcctagaccagccctgcgtaaagcgttggtctgcaatgcacgaggcagctaaacaaggtcgcaaagatattgttgcccttttactgaaacacggaggcaacgtccacttaagggacggctttggtgtgacacccctcggcgtcgccgctgaatatgggcactgcgatgtcctggaacatctgatccacaaagggggagacgtgcttgctctagccgacgacggagcttcagtgcttttcgaggccgcaggcggaggcaatccagattgcatctctttgctgttggagtacggagggagtggtaatgttcccaacagagccggacatcttccaatacaccgagcggcatacgaaggccactacttagcactgaaatacctcatcccggtgacctccaaaaacgcgatacgcaagagcggactgacccccatccacagcgccgcagacggccagaacgctcaatgtctggagttgctaatcgaaaatggcttcgacgtgaacaccctgctggccgaccacatatcccagtcatacgatgatgaaaggaaaaccgcactctatttcggcgtctcaaataatgacgttcactgtacagaggttctgttggcggctggcgcagaccccaatctggaccccttaaattgtttgctggtggcagtgagagccaacaactacgaaatcgtgagactgctcctgtcccatggggctaacgtcaactgctattttatgcatgtgaacgataccagattccccagtgtgatccagtacgctctgaacgatgaagtgatgcttcggttgctgctgaacaacgggtatcaggtagaaatgtgtttcgactgtatgcatggagatatcttcggcaatagttttgtatggtctgagattcaagaggaagtcttgccaggatggacttcatgtgtcataaaggacaaccctttttgcgagtttataaccgttccttggatgaagcatcttgtgggcagggtgactcgagtacttattgactatatggattacgtgcccctgtgtgcgaagctcaagtcagcactggaggtccagagggaatggccggagattaggcagatcctggaaaacccgtgctcactgaagcacttgtgccggctgaagatccggagactgatgggcctgcagaagctatgtcagcccgcatccgtggagaaattgccacttccccctgcaattcaacgctacatactctttaaggagtatgacctttacgggcaggagttaaagcttacatag

SEQ ID NO: 270196 - DNA, 726 bp, Artificial Sequence
  derived and/or modified sequence
atggatactaacgacgatcctgacgaggaccaccttacaagttatgatatccagctgtctatccaggaatctatagaagcaagcaaaaccgcactttgtcctgaacggtttgtgcccctgagtgcccagaatcgaaaactggtagaagctatcaagcaaggacacatacccgagctgcaggagtatgttaagtacaagtacgccatggacgaagccgacgagaaaggatggttccccttacacgaagccgtagtacaaccgatccagcagatcctcgaaattgtgctggatgcttcctataaaaccctgtgggagttcaaaacctgcgacggtgagacgccccttacactggccgtgaaggccggtctcgtggaaaacgttaggaccctgctggagaaaggggtgtggcccaataccaagaacgacaaaggagagactccactcctgatcgcggtgaaaaaggggtcgtatgacatggtgtccaccctgattaaacacaatacaagcttagatcagccatgtgtgaaaaggtggtcggccatgcacgaggctgctaaacaggggagaaaagacatagtggccctgctactcaagcatgggggaaacgtgcacctcagagatggctttggcgtgacacctttaggagtggccgcagagtacgggcactgtgacgtcttagagcacctaattcataagggaggagacgtgttagccctggcagactag

SEQ ID NO: 270197 - DNA, 1767 bp, Artificial Sequence
  derived and/or modified sequence
atggatacgaatgacgatcctgatgaagaccatctcaccagttacgatattcagctctccattcaggaaagcatagaggcttcaaagaccgcactgtgccccgaaaggttcgttccactgtccgcacagaatcggaaattagttgaggctatcaagcagggccacattcccgaactccaggagtacgtgaagtacaaatatgccatggacgaagcggatgagaagggttggttcccactccatgaagctgtggttcagcctatccagcaaatcctggagatcgtgttagacgcctcctacaagactctctgggagttcaagacatgtgatggggagacgcctctgaccctggccgtgaaggccggactggttgaaaatgttcgcaccctgcttgagaagggtgtgtggcccaacaccaaaaacgataagggcgaaactcctctactcattgccgtgaagaaggggtcttacgatatggtgtcaactctcattaaacataacaccagtctcgatcagccgtgtgtcaaaagatggtcagccatgcatgaggctgcgaagcaggggaggaaagacatcgttgcactccttctgaagcacggtggtaatgtgcacctaagagatggattcggggtcaccccactgggagtggcagctgaatacgggcactgcgacgtgctcgaacatctgatacacaagggcggtgatgtattggccctggcggatgacggtgcgtccgtcctctttgaggcggcaggcggtggcaatcccgattgtatatctctgctacttgagtacggcggatcaggtaatgtgcctaatcgcgctgggcacctgccaatccaccgtgcagcctacgagggacactatctggccctcaagtacctgatccctgtcacaagtaaaaatgcgattagaaaatccggattgaccccaatccactccgccgctgacggccagaacgcacaatgtctggagctgttaatcgaaaacggttttgatgtaaacacgctgctggccgaccacatatcccagtcttatgatgatgagcggaaaaccgcattgtatttcggtgtctcaaacaacgacgtccattgtacagaggtgctcctggcggctggagctgacccgaacctggacccactgaactgtctccttgtcgccgtccgcgcaaacaattacgagattgtcagactgctgctgagtcacggggcaaacgtcaactgctatttcatgcatgtaaacgacactaggttcccaagcgttatccagtacgcccttaatgacgaggtgatgctccgattgctgctcaacaatggctatcaggtcgagatgtgcttcgattgcatgcatggggatatcttcggcaactccttcgtctggtccgaaattcaggaagaagtcctgcctggatggacctcatgtgtgattaaagataatccattctgtgagtttataaccgtaccttggatgaaacatttagtggggagagttacgagagtgctgattgattacatggactacgttcctttatgcgctaaattaaaaagtgcgctcgaggtccagcgggagtggccggagattcgacagattttggagaatccgtgttccctgaaacacctctgtcgcctaaaaatcagacgcttaatggggctgcagaagctgtgtcaacccgcttccgttgaaaagctgcccctgcctcccgcaattcaaaggtacattctgtttaaggagtatgatctgtacgggcaggagctcaagttaacgtag

SEQ ID NO: 270198 - DNA, 1767 bp, Artificial Sequence
  derived and/or modified sequence
atggataccaatgatgatccagatgaggaccacctgaccagttatgacatacagctttctatccaggagagtattgaggcatctaaaaccgctctttgccctgagcggttcgtgcctttatccgcccagaataggaaactggtggaggccatcaagcaggggcacattccagaacttcaagagtacgtcaaatataagtacgctatggacgaggccgacgagaaaggatggttcccattacacgaagcagtggtgcaacccatccagcagatcctggagattgttctcgatgcaagctacaaaaccctctgggaatttaaaacctgcgacggagaaacccccctgaccttggctgtcaaggctggactagtcgagaacgtacgcacactgctcgagaagggtgtgtggcccaataccaagaacgacaagggagaaacccctttgctgattgccgtgaagaaaggcagctacgacatggtctctacccttatcaaacacaacacgtctctggatcaaccctgcgttaaacgctggagcgcgatgcatgaggctgcaaagcaaggcaggaaggatattgtcgctcttctgctaaaacatggcggtaatgtgcatctgagagacggatttggcgtcacacctcttggcgtcgcagcggagtatggacactgcgacgtactcgaacacctgattcacaaaggaggcgatgtgttggccctggcagatgacggagctagtgtgctcttcgaggcggcaggcggaggcaacccagactgtatctctcttctcctggagtacggagggagcggcaatgtgcctaatagggccggacatctgccaatccaccgagccgcatatgaaggccactacctggccctgaaatatctgatcccggtcacgagcaagaacgccataagaaagtctgggctgacaccaatccactcagccgctgatggtcagaacgcacagtgcctggagctacttattgagaatgggtttgacgtaaatactttgttggctgaccatatcagtcagtcttacgacgacgaacggaaaacggctctatatttcggagtgagcaacaacgatgttcactgcaccgaggtcctcttggccgcaggagctgaccctaacctggaccctttaaattgcctcctggttgccgttagggccaataactacgagatagtgaggctgctgctgtctcacggggcaaacgtcaactgctactttatgcatgtgaacgatacaagattcccatctgtgatccagtacgccttgaacgatgaagtgatgcttagactgctcctgaataacgggtaccaggtggagatgtgtttcgactgtatgcatggggacatctttggtaatagttttgtgtggagtgaaatccaagaagaggtgttacctgggtggacaagctgcgtaataaaggacaatccattctgcgagttcattaccgttccttggatgaagcatctcgtgggtcgcgttactagagtcctgatcgactacatggattatgtgcctctgtgcgcaaaactgaagagcgcattggaggtgcagcgggaatggccggagatcaggcagatactggaaaacccgtgcagcctcaagcatttatgtagacttaagatcaggagactaatgggcttgcagaagctatgtcaacctgcaagtgtggaaaagctgcctttgcctccagctatccaaagatacatcctgtttaaggaatacgacttgtatggtcaggaactcaaactaacctag

SEQ ID NO: 270199 - DNA, 1767 bp, Artificial Sequence
  derived and/or modified sequence
atggacaccaacgacgaccctgacgaagaccatctcacttcctacgatattcagttgtctatccaggaaagtattgaggcctctaaaacagccctgtgtccagaacgctttgttcctctgagcgcccagaaccgtaagttagttgaggccataaagcagggacacatccccgagcttcaggagtacgtcaaatataagtacgccatggacgaagccgatgaaaagggctggtttccactccacgaagcagtggtccagcctattcagcagattctcgaaattgtgttagatgcatcgtacaaaaccctatgggagttcaaaacttgtgatggggaaactcccctgacactggcagttaaggccggattagtggagaatgtgcgaacgttacttgagaagggagtctggcccaacaccaaaaacgataagggcgagacccctctcctcattgccgtgaagaaaggatcatacgatatggtaagcaccttaatcaaacataatactagcttggaccagccatgcgttaaaaggtggtcggccatgcatgaagccgcaaagcaaggtagaaaggacatcgtggccttgctgcttaaacacgggggtaatgtgcacctacgcgacggcttcggagtgacacccctgggtgtagctgccgaatatggacactgcgacgttctggaacacttaatccataagggcggagacgtcctggcactggccgatgacggcgcttccgtcctctttgaggccgctggtggcggaaacccagactgtatctccctgctgctggagtatggtgggtccggtaacgtgcctaatcgggcaggccacttacccatccaccgggctgcctacgagggacactatttggccctaaagtatctgatcccagtaacatcaaaaaacgctatccgaaaatccggcctaaccccaatacacagcgctgccgacgggcaaaacgctcaatgtctggaactgctgatcgaaaacggattcgacgtgaatactttactggcagaccacatcagccaatcctacgatgatgagagaaaaactgctctgtattttggcgtgagcaacaacgatgtgcactgtactgaggtgttgctggctgcaggagccgatcctaacctagatccacttaattgcttactcgtggctgtccgcgctaataattacgagatcgttcgcctgttgctgtcccatggggcaaacgtgaattgctactttatgcacgtgaatgacacccgctttccttccgtcatacagtacgctctgaacgatgaggttatgctccggctcctgctgaataatggttatcaagtggaaatgtgtttcgactgcatgcacggggatatcttcgggaactcctttgtttggtccgaaattcaggaagaggtgttacctggctggacatcttgtgtgatcaaggataatcccttctgcgaatttattaccgttccatggatgaaacatcttgtcggcagggtaacgcgtgtgttgatcgactatatggactatgttcctctttgtgccaagctgaagtcagcattggaggttcaaagggagtggccagaaatccggcagattctcgaaaacccctgtagtttgaagcatctgtgtagactcaaaatccggcgtctcatgggcctccaaaaattgtgccagccagctagcgtagagaaactgccactgccccctgcaatccagagatatatcctttttaaggagtatgacctatatgggcaggaacttaagctgacttag

SEQ ID NO: 270200 - DNA, 13747 bp, Artificial Sequence
  derived and/or modified sequence
ccgcggcgccgggacagccccgggactctgccaggtggatgttgtgcgtagccggagccaggttgaagagagaactcgatgccaccgcaacggtattggcgaaccggcaggatgaaagtgagcagtccagaaagcggcttatcgaacagagccgggagttcaagaagaacactccagaggatttgcgcaagcaggtagcgccgctgctgaagagtttccaaggagagattgatgcactgagtaaaagaagcaaggaagctgaagcagctttcttgaatgtctacaaaagattgattgacgtcccagatcccgtaccagctttggatctcggacagcaactccagctcaaagtgcagcgcctgcacgatattgaaacagagaaccagaaacttagggaaactctggaagaatacaacaaggaatttgctgaagtgaaaaatcaagaggttacgataaaagcacttaaagagaaaatccgagaatatgaacagacactgaagaaccaagccgaaaccatagctcttgagaaggaacagaagttacagaatgactttgcagaaaaggagagaaagctgcaggagacacagatgtccaccacctcaaagctggaggaagctgagcataaggttcagagcctacaaacagccctggaaaaaactcgaacagaattatttgacctgaaaaccaaatacgatgaagaaactactgcaaaggccgacgagattgaaatgatcatgacggaccttgaaagggcaaaccagagggcagaggtggctcagagagaggcggagaccttaagggaacagctctcatcggccaatcactccctccagctggcctcacagatccagaaggcaccagacgtggagcaggccatagaggtgctgacccgctccagcctagaagttgagttggccgccaaggagcgggagatcgcacagctggtggaggacgtgcagagactccaggccagcctcaccaagctgcgggagaattcggccagccagatctcacagcttgagcagcagctgagcgccaaaaacagcacactcaaacaactggaagaaaaactcaaaggccaggctgactatgaagaggtgaagaaagagctgaacattctgaagtccatggagtttgcaccgtccgagggcgctgggacacaggatgcggccaagcccctggaggtgctgttgctggagaagaaccgctcgctgcagtccgagaacgccgcgctgcgcatctccaacagcgacctgagcgggtcagccaggaggaaagggaaagaccagcctgaaagtcggcgcccgggatctttgccggccccccctccttctcagttgccccgcaacccgggggagcaggcttccaatactaatggtacacaccagttctcaccagcggggttaagtcaagactttttcagctcatccctggcaagccccagcctacccctggcttctacaggaaaatttgcactaaactctcttctccagcggcagctaatgcagtccttctactccaaggctatgcaggaagccggaagcacaagcatgattttttcaacaggtccatacagcacaaactccatatcttcccaaagtccattacaacaaagcccagatgtcaatggcatggccccatcccccagccagtcagaaagtgctgggagcgtctccgagggcgaggagatggacactgcagaaatcgcccggcaggtcaaagagcagctgattaagcacaatatcggacaacgtattttcggacattatgtgttgggactgtctcaagggtccgtgagcgagattctggcccggcccaagccatggaataaactgactgttcgtggcaaggagccatttcacaagatgaaacagttcctctccgatgagcagaacatcctggccctccgtagcatccaaggcagacaaagagagaatccaggccagagcctgaacagactatttcaggaagtaccgaaacgaagaaatgggtctgaaggtaacatcaccacccggatccgagcctcggagactggctctgatgaagccatcaagtccatcctagagcaagccaagagggagctccaagtgcagaaaactgcagagccggcccagccttcctccgcatccggcagcgggaactctgatgacgccatccgctccatcctgcagcaagcccgccgggagatggaggcccagcaggctgccctcgaccctgccttaaagcaggcaccactgtcccagagtgacatcaccatcctcacccccaagcttctgtccacctcgcccatgcccaccgtgtccagctacccacctctcgccatctccctgaagaagccctccgcagctcctgaggccggtgcctctgctctgccgaaccccccggccctcaaaaaggaggcccaggacgcccccgggctggacccccagggagcagccgattgtgcacaaggggtcctgagacaggtgaaaaatgaggtgggccgcagcggtgcctggaaggaccactggtggagcgcggtgcagccggagagaagaaatgccgcctcctccgaggaggccaaggccgaagaaacgggcggcgggaaagagaagggcagcggtggcagcggaggtggcagccagcctcgggccgagcgcagtcagctccagggaccctcgtcgtcagagtactggaaggagtggcccagcgctgagtccccatactcccagagctcagagctgagtctgaccggggccagccgcagcgagacaccacagaacagccccctgccatcctccccgatcgtgcccatgtccaagcccaccaagccctcggtccccccgctgacccccgagcagtacgaggtctacatgtaccaggaggtggacaccatcgagctcacccggcaggttaaggaaaagctggccaagaacggcatctgccagagaatcttcggggagaaggtgctgggcctgtcccagggcagcgtcagcgacatgctgtcccgaccgaagccatggagcaagctgacgcagaaaggccgagaacccttcatccggatgcagctctggctgaacggcgagctaggccagggtgttctacccgtccagggccagcagcaagggccagtcctccactccgtgacatcgctccaggacccgctgcagcagggctgtgtgagctcagaaagcactccaaagacctccgccagctgcagccctgcccctgagtccccgatgagttccagtgagtcggtgaagagcctgaccgagctggtccagcagccctgtccccccatcgaggcgagcaaggacagcaagccaccagagcccagtgacccgccagcatccgactcccagcccacaaccccgctgcctctctccggacactcggccctcagcatccaagaattagtagccatgtccccggagctggacacctacggcataaccaagcgggtgaaggaggtgctgacggacaacaacctcggccagcgcttatttggggagaccatcttagggctcacccaaggctctgtctctgacctccttgcccgccccaaaccctggcataagctcagtctgaaaggacgagagcccttcgtccggatgcagctgtggctgaacgaccccaacaatgtggagaagctgatggacatgaaacggatggagaagaaagcctacatgaagcggcggcacagctcagtcagtgacagccagccctgcgaaccgccctctgtcggcaccgagtacagccagggcgccagcccccagccccagcaccagctgaagaaaccccgggtggtgctggctccggaggagaaggaggcgctgaaacgagcgtatcagcaaaagccatacccgtcaccaaaaaccatcgaagacctcgccacccagctcaacctgaaaaccagcaccgtcatcaactggttccacaactacaggtctcggatccgcagagaactgttcattgaggaaattcaggccgggagtcagggccaggcgggcgccagcgactcaccctcggcccgcagcggccgggcggcgcccagctcggagggcgacagctgcgacggcgtggaggccactgagggcccaggcagcgccgacaccgaggagcccaagtctcagggagaggccgagcgggaggaggtgccgcggccggcggagcagacggagccgccgccctcggggaccccgggcccggacgacgcccgcgacgacgaccacgagggaggccccgtggaaggcccggggcccctgcccagccccgcctccgcgaccgccaccgccgcgcccgcggcccccgaggacgccgctacctcagccgccgccgcgccgggggagggccccgcggccccgagctccgcgccgccgcccagcaacagcagcagcagcagcgccccccgcaggcccagctcgctgcagagccttttcggcctccccgaggccgcgggcgcccgggactcgcgcgacaaccccctgcgcaagaagaaggccgcgaacttgaacagcatcatccaccgcctggagaaggccgccagccgggaggaacctatcgaatgggagttctgaggggccgcggccctggggcgggcagccaggctgggccgcaagggcctggacggggtcggacggggcaggcgctgcggacaccgtggcctgggcttggcccgcggcctgcaccgaccccgggccggacctgagcccgcagcccagaccccctccacggtccgcggcctgcaccgacccgaggcccagatccaaggccgcggcccagacccactctgcggcccgggccgaccctgcggcctccaccaaccccgcggcccagacccagcccgcggcctggacccctggaccgctttgcgcacttaccgccctgcgggccacagggcaaaatcgccataggccaaggtgcatatagaaaacaaaggagcattaagcccaatctatgtcgtgttttcaaggaagaaaacggaaatgtgtggtcgagcttttttgtaccctgaagtgttttttttattgccctaagtgatttccacaggttctggaataactcttacagctttgccttgtgtcctcctgttccgtgtgggctttaaaagaaaaaaaatcaaacccacatattaaaagggggctttttatctgccatctaatggcttcagagcgataatacactattatcttcttaaaccaggaaaaaataaaagggggggtgggatttttcagaaaaattaaaaaagaaagtttttgtagctgttcagttgccactaagagattgcacagtcaaaacgactctaaacacactagtttggattcctaaatattttcaagaaaagaatcttctcgtttgaaactttgaattaaaataaaacacatttactccacatattttttaacaaaaagaaaacgtcacatcaggaaactctgattttgtggtagctgacatagtgttttcttgtacgtgaatagaatcctgacatgtagtgcacattgatgtatagctttaactgaccctgggttttgcagaccagggtttgtttaatacactccattctaggccaaatcaggacaaaaaaaagaaaaaaaaagaaaaaaaaaaaagaaaagatccgaatctaggtattttataatctgctttttaacctctaaccgcagagcacgctgatcagacctcatatcttggaggtttaggagacaagttagaactgtagcatgtacctgttaattttgtttaatttatggtgtctcaatctgtctgtgcgtctgcacgtgtgcaagcattgaaagaaaggagagagtagtccgggcgagcacagcaggcagttccagggccagacgggcccatccccaagtagatagcagtctacggatctctctctggcacagaaggcacctcacctcacaccactctcctggatacctgatgaactgagccctcccaggggaagacactccccaggcctgggcagggcttacacgcgcactctctctcttctttccctttttcttcccaccgcaagcactgatgaccctgttgaactcgtgggaaacttcctttctctgcaggagagagaacgtggcattctgggctccccactcccatccctgtagaaatggcccaaactcacaccaaaacgtggatgctcttcaacttccaaacctaccatttgcccttctttcatttcgcctcttagttctttttatgcacagttttagggcagtctaagtacaaactgaaagtctaacttgtctctgattcctcccttgtctatgtgtatatgcgtgagaatagaggcgggtgagagtgtgcgtgcgtgtgcgtgtgtgcaattttatacgtctgtgtattttcttaagtacctgtgcacacgtagagtgcattactgccacctttttcaataagctgttttatcagttacggcttctacaagtttgctaatttagacttctttattgccatatctttaaactaacaatagatgatttcggtatatatatatatttttttttgcttatttataggtgctgtattttattatctgattgttaggaagggatgaaaggggcaaatattctttagagggatagactgccggcagtattgggtataatttacaagatgtagttgtcatactgtatattactgattgaaaactttttgaccgtattgtgtatcattgaaacctttgtcttaggtcaacatctttggatgacattttaatggtgcattcattatttcttaagtttaattaatattacttttttttttatttggggggtgggagggagttataattttaaaggtatgctctggctgttccacctccgtgtgcttgttaattaacttgtaggactttgactgtaagatgtgaaaccacgtttcttgcatgatgttttagagattatttcatttacagtcttttaacctgcagctgcagcacttagttcacgttttcacaaatttcaagagtcactacactaaagacaatgccttttcatgaataagaagttttcagaaggctctagggggctgggaggcaggctgttcgtttgtcttttgttgggggtatcatttctgaacttgaaatccagttcagggagaagagaattcaaaattagaggagcttaaggggacacgggtcaacatctagctcgattcaggtgcattgagaagagtgagttcacatcggtgacccttaggacagtgagtggcagagccctgacgactgtggtgtcctctccacaaaaccctcaagggacttttgtcatcatgtgtgatgaatctttaaatatcgtctaattttcataagaatgaaaagaagttaacaggaaatagtaggctagggtttagttttaaaggcatgactgttatttacaaaggtgttaaatctgaggaaattgacaaatacagatttgtccattctagtggccaaacagtaacagtctaaaatgcagtcattttgaccctcccaagcaatttagtcatatgtgttgttttctcttttctgtttttacttcttagatttttaactaggttactgttggttcccattctgtcttttttgccagacttacatctggtgccagatacaatcagttggttaaattttgcttgcagttctgtgtattttttttcctctattatttatttttttaaaaaaaatagagatcctaaccttagatctttgatgtgaagctagcactgtctgtaatacttctaagagctgccactaaaataatacagcaatccgtggccaggggagcaccccctcctggttgggcccctcagttggagtctaagggttaatctctcatcttgctaagcagtattcaagtgccttgaacagtgtcccctcggcatggctccccttcagcaggctggcattccaagcagtggcccccgcaggcagccgacccccttcctcttcacgctctatgagtttaaaaagctgatttgtacctctcccctgggggaaacggttccatataaaacactaacacttaattacaagctccattatgccattttaaatggcttctttttgttaattggaggcattgttcataacttaaggcttttgccattaacttagctggctaagcagaggctcggggtaaaatcagtgtttgcatttagcctcttgacccggagttccggcccaagctcccttgtgatagccgagatggcaggtgtgtgagttctgtcctagacctgtgcccaactcacttccaccccagaggagtcttctgtcctcctccccaacccccgagctccctggtaacctcctcttgaacttctgtatcagtgaagacatctgtggtttctgctcaccagacctctctttagaaagggttatcagagccatggagcttagctcaattggattcttctagacgatcttaggaggcatcttggcatgaggcagcttctaagcgtctcctgggacaggattggggtgacagcccagggatgcatgcatgggagaactctctgagaaatgccaggatcgtggctcacagggacccaccatcaaaacctgctactttgtgcaagtaattgaggcaaaagataccagtcgacagcctccctggggtagatcccttgtacctccaaagtacaaatacctccctgctcagtttccttcctgtcgccatctttgttttcttcccattgaaaaaccatcctgtctgatgtggacgttcaggtctgctggttggcggtccgggcccagagtgcagcagagctctgggttaaatattcctttctggccaccgcccaagcccaggtggccagctctcataccccatctccctccttggccagggccagcatcaggcgtgcagctcatgaccagtttacacaggctgcaaagagatcgctgtgggcctcggctgactactttaagattatgccacagccaggccctaaaaagagaggggaacaggagtccccaggtgagctctctgacgggcaggtgccttcccgactaaggttggactggatgactttgttcctcctgcatgcatgtcctttgatgcaagggtgatcaatgaactctgttgacattctatgcaatgtttttcattcctctgattttagcaaagcaaatcttactgaaaaatagcagagccaggggaacagacgcatgtccttctgggagtcacacaaaagcagagagattttgaactgaggggcgacagcctttgccttaaatgcagtatgacaggcgcttcttggcagaccagtaaaaacaaaagcccatagaccttactcatcccaaggccgacaagccagctgtacagggcgagatgtagcaacacggggcatgagcggtgggcgtgctgggctatttgctgtggtactttaggctggaggtttggctcctgtgctgccggtggggggccctgtccctccccagatgtcctccctcttcttcacactcctcattgtcccttctacctcactaacctgtcttctccatctgatgtcacccagaaccacaccccacagaactgtgaggcacgtgggctggagagagcagaaaagctgccagcgcagcagacacgaacatccctctgcctggtgggccggctttgtgtgtctctccttttgtgagcgcaacacggacaaacagctgtgctctgcaaggcacacggatgtttcccttccacctgttcccaaagctccagcagctgtttcttttgcaggcagggcgtggtctcggggctccgagggtcttgtctttggtccgccttcctttctgtccagtcctgctcagctgttaagatccatcatggccattatccttgtcccggactgccccaaagttcccagctggctttggggaacactgtagctcttgggtgtctcttgtctctggcatggttttagcgtcactgcgaacactcctttgcaaacatcaaacatctcaaagacggaaaaggatagatggcttcctccagcctacacgccccgtccacagtggcatcaccctcttatcccaaaagaatatgccagttcccatccagcaccgaagaaaatcagctcctggggctggtggttggaggtgggtctgtccactgtgggggccaaagtgttcccctgctggagacagtttgcaagtaagaacctaaggatggggacagcatcctgtgcttgggcattgaccagccaaagctcacatttagaaagccctcagtgcttctgtggtttcacctgggcatcgacgacattagggaagcctttgtgaccacaagggcagggcttgtgccctgagtggcgaggtggtgacctgaggccagtgtgatgtggttggatctcagcgtgtactgaatgccagtctggccggcacactcgaacgctaagagaatggtccaatttgatgatcttatttctatttcgatcaggttttgactttttgtagatgaaaactaccagggaaaaggggaagcaggtacccaataaagtttagaaagatccagtctgtgaaacccttagagatgggctgaaagttaagtccaccaacccttgggcttaatcaggacggaagaggagggggtgtggggggcagagcgtaaaacaagccccagccctactcccggccccccagcccagtcttcccaatcccagaggccccggcggcctgtgctcctcaccaccctggtcaggggaatagaaggaaatgcaatttccgcctgtctgcccgacttccaaaaactgcctcctcctgcccaggcctctcccaccaccaccttccctccaaagataaccgtgtccatgccatccgtggcatcatctcgagttttcatttttggatgaagtgacatttagctttaacaagacatttccaaagcgcctagtctcctccaaaatgctaactttaaaagttgggcattgtaggcgaaaaatcccaaaaaaaaaaaaagacaaaaaaaaaaggctggcgagagaaagacatttggctatgcataaatgtgcacttcccccatgcccccgttcttaaactcttaagatgcctttgagttgcttttcatgaatccttttagtttacccgataatgttaagaaagcattagtctacgttactgtaatttctgtagtgtttacgctttaatttctaccacaaaatatgctatatgctatgtatcaagctttctgtaatcagaaagaaaaggtgccttatatcccaatgtcacggctacatccctatggaaattaatcagaagcacagtgtgtacggaagcattgggacttctgctggtgaaacaagagaccattcagcaagacacattgaagtggcacggagctgcttttgttttataattcttttttccccccttttccttcttcttttttattattttattattttttttgtactttgctttaaacggaaagcacttaaatagatgactatgtgtaaaagctctgtgcaattgaaatcatttttcttcattttaaaaaaataacgtattgcacaccaaatgaactcaaagtaagctttagaccaggacgattcaggttatgaatgagtttgttcactgtagttccgtttgttcatgaaccgaagggaaaacaggcctccccgactccctccagtctcccagcctgcctcttggtgaccactgtgctgggcgtgcagggcccgcgggctctggccggagccgctggcctgacgaggcaggatagggagtatccgtgattcagaagctgagacccttccccagtgtctgaggccacagccatcccttccagcacttaatcttgtcttgttgaaatggactgactgctactgacctgccggcgtgcgtgagggtgattataaaaggatgtttccttgagaaaaaaaaaattatttctatcctcttctatttattattaggttaatcatttaagtacttatcaggagtgtattgttattttgtgttttgttgtcataaatgctttttgctgtcactctagtggttactatcctctgccttcctctcctcccctactcccccagagaaccaaggcgtctgggggattgactggggggcagagggggtttccccagcaaaatcaaacacctgtctccagagtagccactcaaaaactggtggtctctatgtgtctaactttttaaatgagagtgtttatgaacaaaaaaatttaccaacgtgtgagggagttgctgagttgaagaatgctcgcttgaggagcttcagaggaatcttagcaaagccaagttcagttccccaaagcctcctagagcctctggtaagacttctgggttcatgaagtttcggcgagccgtggtcagagagggcgcggtggcctggccaagactttacctccaagcgagagagtgatttcttgcaaggcccgcatgggttgatacgttttggttggttttttgttgttgtttttcttgcgtacaaagttggtcaaaaccatctttcaaagcaacagtgttttgtagtaccaggctgtggcttgagggctcacctaggagatcataggcagagggcccctttcccctataggtggttcaacgtggaggaaggttgggtgtggagattgcttgctgtggccccaagctcagccagcaggacacccagttgttgccaatcaggtgtgaaggtgaggcgccctgccttgatcccatgggcccagcagaaggaaacttaccccaggccaaggcaagggccctgctcaccccaaggtaggctgggaagagcatctctttccatatcatcacctccccttctccaagattgccgggggccctgattttgttctctctttgaaagaaaccctccaccgaaacaatggtccccatctccccagaagcctttttttttttcatttttctctaattagtctatgcatttctctctctcaaaccatcttctgcctcttcccttgagaaaacgggcatctcacgtacccccatctgagacctcttggaaaaaaaaaatcccgtgtattctggagatgtgagaattcacccaaaattcttaaaacattggagaatagcttgttataaaataaaagtgggggtaaaaagaaggtggttttccccacatccctttgcattgaataagagacctagttctttgcgtttgtgcaataactctttgctgcttgccttgagagcgggtagcaccacgctcctgtccagactactaacagcacaagacgcactcacagggtggcggaatcttccggaaaactctctataagctcagctccccccaccccacccccactctagcgttttgtcacgtcttacattttagcagtattttatattttctgtaacgcaccaagtcttagatctttctagagcttgtttgttcatcctcacaatcacagatttttttctccaatcctcacagagacccaattgaccaaaaaagaaaaaaggaaaaaaaaaaagtcgtcttttttttttttttttgtacaaatcgctttgagatgcctctggtgtgttgctgtgtgacatctctctggtaacattttatttcttgctatttgtttttctacattaagagtcaaagttgacctggctggcgtgggggtgggggaggcacccgtcggccccttggtgttgtccctctgtctttggttagccatacgatgtttgttctcagcactgtacaacggtccctatataatacggagaagcaatatcactgtatgagactcacaccatgtattattattcactagcaccctaggtgtgataattgaagtaaatatcttttatacaaacacaa

SEQ ID NO: 270201 - DNA, 2965 bp, Artificial Sequence
  derived and/or modified sequence
aaagtgccaggaacccatatcgcatgcaagcgtgtgtgttcaaattagccttctccagggaggaattcacagcaccaggaatacgcgcagagatgttcttttgcacttttgcattttaaaacgtgcatcgcttacgagcgcagcattttcaagccttttcttgagatcagctcgttcagttacatgtgcttttgaagatgaccatttgtgaaaccatcagccactggcaaagtgaagaaaaatgaagatttcggcctggttgatgtgtgctcggggaaaggatttgcgcaagcaggtagcgccgctgctgaagagtttccaaggagagattgatgcactgagtaaaagaagcaaggaagctgaagcagctttcttgaatgtctacaaaagattgattgacgtcccagatcccgtaccagctttggatctcggacagcaactccagctcaaagtgcagcgcctgcacgatattgaaacagagaaccagaaacttagggaaactctggaagaatacaacaaggaatttgctgaagtgaaaaatcaagaggttacgataaaagcacttaaagagaaaatccgagaatatgaacagacactgaagaaccaagccgaaaccatagctcttgagaaggaacagaagttacagaatgactttgcagaaaaggagagaaagctgcaggagacacagatgtccaccacctcaaagctggaggaagctgagcataaggttcagagcctacaaacagccctggaaaaaactcgaacagaattatttgacctgaaaaccaaatacgatgaagaaactactgcaaaggccgacgagattgaaatgatcatgacggaccttgaaagggcaaaccagagggcagaggtggctcagagagaggcggagaccttaagggaacagctctcatcggccaatcactccctccagctggcctcacagatccagaaggcaccagacgtggagcaggccatagaggtgctgacccgctccagcctagaagttgagttggccgccaaggagcgggagatcgcacagctggtggaggacgtgcagagactccaggccagcctcaccaagctgcgggagaattcggccagccagatctcacagcttgagcagcagctgagcgccaaaaacagcacactcaaacaactggaagaaaaactcaaaggccaggctgactatgaagaggtgaagaaagagctgaacattctgaagtccatggagtttgcaccgtccgagggcgctgggacacaggatgcggccaagcccctggaggtgctgttgctggagaagaaccgctcgctgcagtccgagaacgccgcgctgcgcatctccaacagcgacctgagcggacgctgtgcagagctgcaagtccgtatcactgaggctgtggccacagccactgagcagagagagctgatcgcccgcctggagcaggacctgagcatcattcagtccatccagcggcccgatgccgagggtgccgctgagcaccgcctggagaagatcccagagcccatcaaagaggccactgccctattctacggacctgcagcaccagccagcggtgccctcccagagggccaggtggattcactgctttccatcatctccagccagagggagcgcttccgtgcccggaaccaggagcttgaggccgagaaccgcctggcccagcacaccctccaggccctgcagagtgagctggacagcctgcgcgccgacaacatcaagctctttgagaagatcaagttcctgcagagctaccctggccggggcagcggcagtgatgacacggagctgcggtactcgtcccagtacgaggagcgcctggaccccttctcctccttcagcaagcgggagcggcagaggaagtacctgagcttgagtccctgggacaaggccaccctcagcatggggcgtctggttctctccaacaagatggcgcgcaccatcggcttcttctacacactgttcctgcactgcctggtcttcctggtgctctacaagctggcatggagcgagagcatggagagggactgtgccaccttctgcgccaagaagttcgctgaccacctgcacaagttccacgagaatgacaacggggctgcggctggtgacttgtggcagtgataccccggggcctcccccgtgacagtgacggctgcgcctccaccccgactgctcagtgcatctaatcacttagactcccctgaagaatcccccatggaaactgcccttatccgctgtccagcagctgccagaggccccaggtcacctcgggtccccttgaaagaatgtctcggtcacatcaggcccgctaggtccagagagcgagcccccaatgcccggccaggctaagccgcagagaccctctcagcccccacctcaggttagggctctgcccgcagcctgacctctagccctggtggcagaggtccctcagctgcgaggctaattgggtgaccaccgattccagctgcggttaatccagcttgggcctgtctgcactgcgatcctcttgggctctcctaggatccccccatgccccgtaagaggtggaagacgcttccttccaggacagcaggctttgagtccagcacccccagcctgcctttgccaccagccccaccctgcagagtatatgaggcttgacagagtctgccccctcccccactgcaccccaagagagagagccccagccagcggaacagtttctattaccccctccctgcccccagacccatgtgatttctgctttcttctttagcaagatattctggtttctagataaggaagagtctctaatgagcccccgagccccagtctcttcagactcatggattggtctgaggggtctgaacgtctcctagccaatcagaactggctgtggaccaccctagcacggccacctctcagggccactggcaggccttcctgagttagatttgtagt

SEQ ID NO: 270202 - DNA, 3492 bp, Artificial Sequence
  derived and/or modified sequence
ggggctaaaccgacagggtattgctgggcatggaggaggttgggtccaggttttttgctctttgtgactttttaatgcctttcagatgtgacgactctccatacgccttctcacacgtgacccgtgactcatgggccgaggcctctgcatttgggacccccacctccacctccccaagatgcatttcattcccttgttaatgtgtcattgtagttgacgctttgaggataggcaggcttggtagataataaaacagtatttggcttatgtttaatcgctgtctcctcccacagcccgagaacgccttagcgtccttcagaaaggatttggtggtactggtttttatgtgtgtgtgtgttgttttttaaaaaaattttctccaagggacctggtcaaagatttcaagccttaaatctgatcaacccaatctggggcggcggcagctcagtctctcctcctcgctgtgccaatctgtttctgtggtggcgggtggcggctcggtgttaaatttggagacccccgtgggtttcccatgccgacctgcatatgtctgcgggcacggggaagggagggccgcagacccccgttgagtccccgactgccagcagcaagttgccgcaggcgcactggctctgcagccccgggatcaagagagaactcgatgccaccgcaacggtattggcgaaccggcaggatgaaagtgagcagtccagaaagcggcttatcgaacagagccgggagttcaagaagaacactccagaggatttgcgcaagcaggtagcgccgctgctgaagagtttccaaggagagattgatgcactgagtaaaagaagcaaggaagctgaagcagctttcttgaatgtctacaaaagattgattgacgtcccagatcccgtaccagctttggatctcggacagcaactccagctcaaagtgcagcgcctgcacgatattgaaacagagaaccagaaacttagggaaactctggaagaatacaacaaggaatttgctgaagtgaaaaatcaagaggttacgataaaagcacttaaagagaaaatccgagaatatgaacagacactgaagaaccaagccgaaaccatagctcttgagaaggaacagaagttacagaatgactttgcagaaaaggagagaaagctgcaggagacacagatgtccaccacctcaaagctggaggaagctgagcataaggttcagagcctacaaacagccctggaaaaaactcgaacagaattatttgacctgaaaaccaaatacgatgaagaaactactgcaaaggccgacgagattgaaatgatcatgacggaccttgaaagggcaaaccagagggcagaggtggctcagagagaggcggagaccttaagggaacagctctcatcggccaatcactccctccagctggcctcacagatccagaaggcaccagacgtggagcaggccatagaggtgctgacccgctccagcctagaagttgagttggccgccaaggagcgggagatcgcacagctggtggaggacgtgcagagactccaggccagcctcaccaagctgcgggagaattcggccagccagatctcacagcttgagcagcagctgagcgccaaaaacagcacactcaaacaactggaagaaaaactcaaaggccaggctgactatgaagaggtgaagaaagagctgaacattctgaagtccatggagtttgcaccgtccgagggcgctgggacacaggatgcggccaagcccctggaggtgctgttgctggagaagaaccgctcgctgcagtccgagaacgccgcgctgcgcatctccaacagcgacctgagcggacgctgtgcagagctgcaagtccgtatcactgaggctgtggccacagccactgagcagagagagctgatcgcccgcctggagcaggacctgagcatcattcagtccatccagcggcccgatgccgagggtgccgctgagcaccgcctggagaagatcccagagcccatcaaagaggccactgccctattctacggacctgcagcaccagccagcggtgccctcccagagggccaggtggattcactgctttccatcatctccagccagagggagcgcttccgtgcccggaaccaggagcttgaggccgagaaccgcctggcccagcacaccctccaggccctgcagagtgagctggacagcctgcgcgccgacaacatcaagctctttgagaagatcaagttcctgcagagctaccctggccggggcagcggcagtgatgacacggagctgcggtactcgtcccagtacgaggagcgcctggaccccttctcctccttcagcaagcgggagcggcagaggaagtacctgagcttgagtccctgggacaaggccaccctcagcatggggcgtctggttctctccaacaagatggcgcgcaccatcggcttcttctacacactgttcctgcactgcctggtcttcctggtgctctacaagctggcatggagcgagagcatggagagggactgtgccaccttctgcgccaagaagttcgctgaccacctgcacaagttccacgagaatgacaacggggctgcggctggtgacttgtggcagtgataccccggggcctcccccgtgacagtgacggctgcgcctccaccccgactgctcagtgcatctaatcacttagactcccctgaagaatcccccatggaaactgcccttatccgctgtccagcagctgccagaggccccaggtcacctcgggtccccttgaaagaatgtctcggtcacatcaggcccgctaggtccagagagcgagcccccaatgcccggccaggctaagccgcagagaccctctcagcccccacctcaggttagggctctgcccgcagcctgacctctagccctggtggcagaggtccctcagctgcgaggctaattgggtgaccaccgattccagctgcggttaatccagcttgggcctgtctgcactgcgatcctcttgggctctcctaggatccccccatgccccgtaagaggtggaagacgcttccttccaggacagcaggctttgagtccagcacccccagcctgcctttgccaccagccccaccctgcagagtatatgaggcttgacagagtctgccccctcccccactgcaccccaagagagagagccccagccagcggaacagtttctattaccccctccctgcccccagacccatgtgatttctgctttcttctttagcaagatattctggtttctagataaggaagagtctctaatgagcccccgagccccagtctcttcagactcatggattggtctgaggggtctgaacgtctcctagccaatcagaactggctgtggaccaccctagcacggccacctctcagggccactggcaggccttcctgagttagatttgtagttgcatatttagctttgcacatttgaaataaaccacggttgcagcc

SEQ ID NO: 270203 - DNA, 1902 bp, Artificial Sequence
  derived and/or modified sequence
atgaagatcagcgcctggctgatgtgcgccagaggcaaggacctgagaaagcaggtggcccccctgctgaagagcttccagggcgagatcgacgccctgagcaagagaagcaaggaggccgaggccgccttcctgaacgtgtacaagagactgatcgacgtgcccgaccccgtgcccgccctggacctgggccagcagctgcagctgaaggtgcagagactgcacgacatcgagaccgagaaccagaagctgagagagaccctggaggagtacaacaaggagttcgccgaggtgaagaaccaggaggtgaccatcaaggccctgaaggagaagatcagagagtacgagcagaccctgaagaaccaggccgagaccatcgccctggagaaggagcagaagctgcagaacgacttcgccgagaaggagagaaagctgcaggagacccagatgagcaccaccagcaagctggaggaggccgagcacaaggtgcagagcctgcagaccgccctggagaagaccagaaccgagctgttcgacctgaagaccaagtacgacgaggagaccaccgccaaggccgacgagatcgagatgatcatgaccgacctggagagagccaaccagagagccgaggtggcccagagagaggccgagaccctgagagagcagctgagcagcgccaaccacagcctgcagctggccagccagatccagaaggcccccgacgtggagcaggccatcgaggtgctgaccagaagcagcctggaggtggagctggccgccaaggagagagagatcgcccagctggtggaggacgtgcagagactgcaggccagcctgaccaagctgagagagaacagcgccagccagatcagccagctggagcagcagctgagcgccaagaacagcaccctgaagcagctggaggagaagctgaagggccaggccgactacgaggaggtgaagaaggagctgaacatcctgaagagcatggagttcgcccccagcgagggcgccggcacccaggacgccgccaagcccctggaggtgctgctgctggagaagaacagaagcctgcagagcgagaacgccgccctgagaatcagcaacagcgacctgagcggcagatgcgccgagctgcaggtgagaatcaccgaggccgtggccaccgccaccgagcagagagagctgatcgccagactggagcaggacctgagcatcatccagagcatccagagacccgacgccgagggcgccgccgagcacagactggagaagatccccgagcccatcaaggaggccaccgccctgttctacggccccgccgcccccgccagcggcgccctgcccgagggccaggtggacagcctgctgagcatcatcagcagccagagagagagattcagagccagaaaccaggagctggaggccgagaacagactggcccagcacaccctgcaggccctgcagagcgagctggacagcctgagagccgacaacatcaagctgttcgagaagatcaagttcctgcagagctaccccggcagaggcagcggcagcgacgacaccgagctgagatacagcagccagtacgaggagagactggaccccttcagcagcttcagcaagagagagagacagagaaagtacctgagcctgagcccctgggacaaggccaccctgagcatgggcagactggtgctgagcaacaagatggccagaaccatcggcttcttctacaccctgttcctgcactgcctggtgttcctggtgctgtacaagctggcctggagcgagagcatggagagagactgcgccaccttctgcgccaagaagttcgccgaccacctgcacaagttccacgagaacgacaacggcgccgccgccggcgacctgtggcagtag

SEQ ID NO: 270204 - DNA, 2079 bp, Artificial Sequence
  derived and/or modified sequence
atgagcgccggcaccggcaagggcggcccccagacccccgtggagagccccaccgccagcagcaagctgccccaggcccactggctgtgcagccccggcatcaagagagagctggacgccaccgccaccgtgctggccaacagacaggacgagagcgagcagagcagaaagagactgatcgagcagagcagagagttcaagaagaacacccccgaggacctgagaaagcaggtggcccccctgctgaagagcttccagggcgagatcgacgccctgagcaagagaagcaaggaggccgaggccgccttcctgaacgtgtacaagagactgatcgacgtgcccgaccccgtgcccgccctggacctgggccagcagctgcagctgaaggtgcagagactgcacgacatcgagaccgagaaccagaagctgagagagaccctggaggagtacaacaaggagttcgccgaggtgaagaaccaggaggtgaccatcaaggccctgaaggagaagatcagagagtacgagcagaccctgaagaaccaggccgagaccatcgccctggagaaggagcagaagctgcagaacgacttcgccgagaaggagagaaagctgcaggagacccagatgagcaccaccagcaagctggaggaggccgagcacaaggtgcagagcctgcagaccgccctggagaagaccagaaccgagctgttcgacctgaagaccaagtacgacgaggagaccaccgccaaggccgacgagatcgagatgatcatgaccgacctggagagagccaaccagagagccgaggtggcccagagagaggccgagaccctgagagagcagctgagcagcgccaaccacagcctgcagctggccagccagatccagaaggcccccgacgtggagcaggccatcgaggtgctgaccagaagcagcctggaggtggagctggccgccaaggagagagagatcgcccagctggtggaggacgtgcagagactgcaggccagcctgaccaagctgagagagaacagcgccagccagatcagccagctggagcagcagctgagcgccaagaacagcaccctgaagcagctggaggagaagctgaagggccaggccgactacgaggaggtgaagaaggagctgaacatcctgaagagcatggagttcgcccccagcgagggcgccggcacccaggacgccgccaagcccctggaggtgctgctgctggagaagaacagaagcctgcagagcgagaacgccgccctgagaatcagcaacagcgacctgagcggcagatgcgccgagctgcaggtgagaatcaccgaggccgtggccaccgccaccgagcagagagagctgatcgccagactggagcaggacctgagcatcatccagagcatccagagacccgacgccgagggcgccgccgagcacagactggagaagatccccgagcccatcaaggaggccaccgccctgttctacggccccgccgcccccgccagcggcgccctgcccgagggccaggtggacagcctgctgagcatcatcagcagccagagagagagattcagagccagaaaccaggagctggaggccgagaacagactggcccagcacaccctgcaggccctgcagagcgagctggacagcctgagagccgacaacatcaagctgttcgagaagatcaagttcctgcagagctaccccggcagaggcagcggcagcgacgacaccgagctgagatacagcagccagtacgaggagagactggaccccttcagcagcttcagcaagagagagagacagagaaagtacctgagcctgagcccctgggacaaggccaccctgagcatgggcagactggtgctgagcaacaagatggccagaaccatcggcttcttctacaccctgttcctgcactgcctggtgttcctggtgctgtacaagctggcctggagcgagagcatggagagagactgcgccaccttctgcgccaagaagttcgccgaccacctgcacaagttccacgagaacgacaacggcgccgccgccggcgacctgtggcagtag

SEQ ID NO: 270205 - DNA, 1902 bp, Artificial Sequence
  derived and/or modified sequence
atgaagatatcagcatggctgatgtgcgctagaggcaaggacctgcggaagcaggtggcccctctgctgaaaagcttccagggtgaaattgacgcgctaagcaagcgatcaaaggaagccgaggccgcgtttctgaatgtctataaacgccttattgacgtccctgacccagttccggcactggacctggggcaacagttgcagcttaaagtacagcgcctgcatgatatcgagactgaaaaccaaaagctcagggagacattggaagaatataacaaagagttcgctgaggtgaagaatcaggaagtgacaattaaagctctcaaggaaaaaatcagagaatacgaacaaacgttgaagaaccaggctgagaccatcgcgcttgaaaaggaacagaagttgcagaacgacttcgccgaaaaggagcggaaactccaggagactcagatgtcgacgaccagcaaattggaggaagccgagcacaaggtgcagtcattgcagacagctctggagaaaacacgcactgaattgtttgacctgaagacgaagtatgacgaggagacaacagcgaaggccgacgaaatcgaaatgatcatgacagatttagagagagccaaccaaagagctgaggtggcccagcgggaggctgaaacactgcgggaacagctgagtagcgctaaccactcactgcagttggcctcacaaattcaaaaagcaccggatgtcgagcaagccatcgaagttctcacccggtctagcctggaagtagagttagctgccaaggaaagggagatcgcacagctcgtggaggacgtacaacggcttcaggctagcctaacgaaactgagggaaaacagcgcgtcccaaatctcacaattagagcagcagctatcagcgaagaactccactctgaaacaacttgaagagaagctaaaaggccaagcggactacgaagaggtcaaaaaggaactgaatatcctgaagtctatggagtttgccccttctgagggcgcgggaacacaggatgcggcaaaacctctggaagtactcttgcttgagaagaatagatccttacaatctgagaacgctgcactgcgcatttcaaactccgatttgtccggcaggtgcgcagagcttcaggtaaggataaccgaagctgtagcaaccgcaaccgaacagagggaactaattgcgcgcctggagcaggaccttagtattatccagagtatccagagaccggacgccgagggcgcagccgaacatcgactcgaaaagattccggagcctattaaggaggccacagccctgttttatggccccgccgcgccagctagtggggcattacccgaggggcaggtggactctctgctgagtatcattagttcccagagggagaggttccgggcaaggaaccaggaactggaggccgaaaatcgcctggcccaacatacgctgcaggcacttcagtcagagcttgactcacttcgcgcggacaacattaagctctttgagaagattaaatttctccagagctatcccggacgcggatccggtagtgacgatacagagctcagatactcctcccagtacgaggagcggctcgatccattctccagcttcagcaagcgcgaacgccaaaggaagtacttgtctctgtccccatgggacaaagctacactgtccatggggaggctggtactaagcaacaagatggcccgtacgattggcttcttttacaccttgtttctgcactgtcttgtgtttctcgtgctgtacaaactggcatggtcagagtccatggaaagggattgcgcgaccttttgtgccaagaaattcgctgatcatctgcacaagttccatgaaaatgataatggcgctgcagctggcgacctgtggcagtag

SEQ ID NO: 270206 - DNA, 2079 bp, Artificial Sequence
  derived and/or modified sequence
atgagcgccggaaccggaaagggtgggccccagacacctgtcgagtccccaaccgcaagctccaaacttcctcaggcgcactggctgtgctcccctggtattaaaagagagctcgacgctactgcaacagtgcttgctaacaggcaggatgagtctgagcagagcaggaagcgcctcatcgaacaatctcgggagttcaaaaagaatacgccggaggaccttagaaaacaagtggcgcctctgctcaagtctttccaaggggagatcgacgccttatcaaaacgctccaaggaggctgaggccgcgtttttaaatgtctataaaagactaattgacgtcccagacccagttcctgccctggacctggggcagcagctacagcttaaggttcaacggttacacgatattgaaaccgagaaccagaagctgcgcgaaaccctggaggagtacaacaaagaatttgcagaggtcaaaaaccaggaggtaaccattaaggcacttaaggaaaaaatccgcgagtacgagcaaacgctgaagaatcaagctgaaaccatagcacttgagaaggagcagaaattgcagaatgactttgccgaaaaagagaggaaactgcaggaaacccaaatgtccacaacctctaaactggaagaagccgagcacaaggtgcagagtctgcagacagccctagaaaagacccgcactgaattgttcgatctgaagacaaagtacgacgaagaaaccaccgccaaagcagacgagatagagatgattatgacagatctggaacgggctaatcaacgagcagaagttgctcagcgcgaggccgagactctacgcgagcagcttagctcagcaaaccacagccttcagctcgcgtcacagatccagaaagctcctgacgtggagcaggccatcgaagtgttgacaaggagctccctggaggttgagctggccgccaaagagcgtgagattgcccagctggtggaggatgtgcagcgtttgcaggctagtttgacgaagctgcgagaaaattccgccagtcagatctcgcagctagaacagcagctgtcggcgaaaaatagtacattaaagcagctagaggagaaacttaaaggacaggcagattacgaagaagtgaaaaaagaactcaatatcctcaaaagcatggagtttgctcctagcgaaggggccgggacccaagatgccgcgaaacccctggaggtgctgctcttggaaaaaaatcgaagtctgcagtcagagaacgccgcacttcgaataagcaattctgacctgagcgggcggtgcgccgagctccaggttcgcatcaccgaggcggttgcaactgcaactgaacaaagggagttgattgctcgcctggaacaggacctgtctattattcagtctattcagagacccgatgcagaaggcgctgctgaacacaggctcgagaagatccctgagcccatcaaggaggcaacagcgctgttttacgggcccgctgctcccgcaagcggcgcacttcctgagggccaagtcgacagcctactgagtatcatctcctcccagagggaaaggtttagggccagaaatcaagaactcgaagccgaaaatcgcttggctcagcacaccctgcaggccctgcaatcagagttggactctctcagagctgacaatatcaagctgtttgaaaaaatcaaattccttcagtcctaccccggacggggctccggctctgacgataccgagctccgatacagctctcaatacgaagagaggctggatccattctcatcgttctcaaagcgcgaaaggcaacgcaagtatttgtctctaagtccctgggataaggcaacactgtctatgggtcgattggttctgtccaataaaatggctcgcaccattggctttttttacaccctgttcctgcattgcttagtcttcctggtcctctataagctggcttggtccgagtcgatggaaagggactgcgcaacattctgcgctaaaaagttcgcagatcacctacataaatttcatgaaaatgataacggagcagctgcaggggacctgtggcaatag

SEQ ID NO: 270207 - DNA, 1902 bp, Artificial Sequence
  derived and/or modified sequence
atgaagatcagcgcctggctgatgtgtgcccggggcaaggacctgaggaagcaggtggcccccctgctgaagagcttccagggcgagattgatgccctgagcaagaggagcaaggaggccgaggccgccttcctgaatgtgtacaagaggctgattgatgtgcctgaccctgtgcctgccctggacctgggccagcagctgcagctgaaggtgcagaggctgcatgacattgaaacagagaaccagaagctgcgggagaccctggaggagtacaacaaggagtttgctgaggtgaagaaccaggaggtgaccatcaaggccctgaaggagaagatccgggagtatgagcagaccctgaagaaccaggccgagaccatcgccctggagaaggagcagaagctgcagaatgactttgctgagaaggagaggaagctgcaggagacccagatgagcaccaccagcaagctggaggaggccgagcacaaggtgcagagcctgcagacagccctggagaagaccaggacagagctgtttgacctgaagaccaagtatgatgaggagaccacagccaaggcagatgaaattgagatgatcatgacagacctggagcgggccaaccagagagctgaggtggcccagcgggaggccgagaccctgcgggagcagctgagcagcgccaaccacagcctgcagctggccagccagatccagaaggccccagatgtggagcaggccatcgaggtgctgaccaggagcagcctggaggtggagctggccgccaaggagcgggagatcgcccagctggtggaggatgtgcagaggctgcaggccagcctgaccaagctgcgggagaacagcgccagccagatcagccagctggagcagcagctgagcgccaagaacagcaccctgaagcagctggaggagaagctgaagggccaggccgactatgaggaggtgaagaaggagctgaacatcctgaagtccatggagtttgcccccagcgagggcgccggcacccaggatgctgccaagcccctggaggtgctgctgctggagaagaacagaagcctgcagagtgaaaatgctgccctgcgcatcagcaacagcgacctgagcggccgctgtgccgagctgcaggtgcgcatcacagaggccgtggccacagccacagagcagcgggagctgattgcccggctggagcaggacctgagcatcatccagagcatccagaggccagatgctgagggcgctgctgagcaccggctggagaagatccctgagcccatcaaggaggccacagccctcttctacggccctgctgccccagccagcggggccctgcctgagggccaggtggacagcctgctgagcatcatcagcagccagcgggagcgcttccgggccaggaaccaggagctggaggctgaaaatcggctggcccagcacaccctgcaggccctgcagagcgagctggacagcctgcgggctgacaacatcaagctgtttgagaagatcaagttcctgcagagctacccaggccggggcagcggcagtgatgacacagagctgcgctacagcagccagtatgaggagcggctggaccccttcagcagcttcagcaagcgggagcggcagaggaagtacctgagcctgagcccctgggacaaggccaccctgtccatgggccgcctggtgctgagcaacaagatggcccggaccatcggcttcttctacaccctcttcctgcactgcctggtgttcctggtgctgtacaagctggcctggagcgagagcatggagcgggactgtgccaccttctgtgccaagaagtttgctgaccacctgcacaagttccatgaaaatgacaacggggctgctgctggggacctgtggcagtag

SEQ ID NO: 270208 - DNA, 2079 bp, Artificial Sequence
  derived and/or modified sequence
atgtctgctggcactggaaaaggaggcccccagacccctgtggagagccccacagccagcagcaagctgccccaggcccactggctgtgcagccctggcatcaagcgggagctggatgccacagccaccgtgctggccaaccggcaggatgagagcgagcagagcaggaagaggctcatcgagcagagccgggagttcaagaagaacaccccagaggacctgaggaagcaggtggcccccctgctgaagagcttccagggcgagattgatgccctgagcaagaggagcaaggaggccgaggccgccttcctgaatgtgtacaagaggctgattgatgtgcctgaccctgtgcctgccctggacctgggccagcagctgcagctgaaggtgcagaggctgcatgacatcgagacagagaaccagaagctgcgggagaccctggaggagtacaacaaggagtttgctgaggtgaagaaccaggaggtgaccatcaaggccctgaaggagaagatccgggagtatgagcagaccctgaagaaccaggccgagaccatcgccctggagaaggagcagaagctgcagaatgactttgctgagaaggagaggaagctgcaggagacccagatgagcaccaccagcaagctggaggaggccgagcacaaggtgcagagcctgcagacagccctggagaagaccaggacagagctgtttgacctgaagaccaagtatgatgaggagaccacagccaaggcagatgaaattgagatgatcatgacagacctggagcgggccaaccagagagctgaggtggcccagcgggaggccgagaccctgcgggagcagctgagcagcgccaaccacagcctgcagctggccagccagatccagaaggccccagatgtggagcaggccatcgaggtgctgaccaggagcagcctggaggtggagctggccgccaaggagcgggagatcgcccagctggtggaggatgtgcagaggctgcaggccagcctgaccaagctgagagaaaattctgccagccagatcagccagctggagcagcagctgagcgccaagaacagcaccctgaagcagctggaggagaagctgaagggccaggccgactatgaggaggtgaagaaggagctgaacatcctgaagtccatggagtttgcccccagcgagggcgccggcacccaggatgctgccaagcccctggaggtgctgctgctggagaagaacagaagcctgcagagtgaaaatgctgccctgcgcatcagcaacagcgacctgagcggccgctgtgccgagctgcaggtgcgcatcacagaagctgtggccacagccacagagcagcgggagctgattgcccggctggagcaggacctgagcatcatccagagcatccagaggccagatgctgagggcgctgctgagcaccggctggagaagatccctgagcccatcaaggaggccacagccctcttctacggccctgctgccccagccagcggggccctgcctgagggccaggtggacagcctgctgagcatcatcagcagccagcgggagcgcttccgggccaggaaccaggagctggaggccgagaaccggctggcccagcacaccctgcaggccctgcagagcgagctggacagcctgcgggctgacaacatcaagctgtttgagaagatcaagttcctgcagagctacccaggccggggcagcggcagtgatgacacagagctgcgctacagcagccagtatgaggagcggctggaccccttcagcagcttcagcaagcgggagcggcagaggaagtacctgagcctgagcccctgggacaaggccaccctgtccatgggccgcctggtgctgagcaacaagatggcccggaccatcggcttcttctacaccctcttcctgcactgcctggtgttcctggtgctgtacaagctggcctggagcgagagcatggagcgggactgtgccaccttctgtgccaagaagtttgctgaccacctgcacaagttccatgaaaatgacaatggagctgctgctggggacctgtggcagtag

SEQ ID NO: 270209 - DNA, 1902 bp, Artificial Sequence
  derived and/or modified sequence
atgaagatcagcgcctggctgatgtgcgcccggggcaaggacctgaggaagcaggtggcaccactgctgaagtccttccagggagaaatagacgctctcagcaaacgaagcaaagaagcagaagcggctttcctgaacgtgtataaaagactgatcgacgtgcctgaccccgtcccagccctggatctgggccagcagctccagctcaaggtgcaacggctgcacgacattgagactgaaaaccagaaactacgcgagacactggaggagtacaacaaggaattcgccgaggtaaagaaccaggaggtgaccataaaggcactgaaagagaagattcgagagtatgagcaaacactgaagaaccaggctgagacgatagccttggagaaggagcagaaattacagaacgatttcgcggagaaagagcggaagctccaggaaactcaaatgtctaccacgtctaagctggaagaggctgagcataaggtccagagcctgcagacagcactcgaaaagacaaggactgagctgttcgacctcaaaaccaagtatgacgaggaaaccacagcaaaggccgacgagattgaaatgattatgactgaccttgagcgagccaatcagcgggccgaggtggcacaacgcgaggctgagaccctgagggagcagctgtccagtgctaaccactcccttcagcttgcctcccagatacaaaaggcccccgacgtagaacaggctatcgaggtactgacaaggagctcgctcgaggtggagctcgccgccaaggaacgcgagatagcccaactggttgaggatgtccagagactgcaagcttcactgactaagctacgcgagaattcggcttctcagatctcccagctggaacagcagctgtctgccaagaactccacactgaagcagctggaagagaaattaaagggacaggctgactacgaggaggtgaagaaagagctgaacattctcaaaagcatggaattcgcccctagcgagggtgctggcacacaggacgccgcaaaaccacttgaggtgttgctgttagaaaagaaccgctccctgcagtctgaaaacgccgctctcaggatctcaaacagcgatctctccggcagatgcgcagagctgcaggtgaggatcacagaagccgtggccaccgccactgaacagagggagctgattgcccgcctggaacaggacctcagcatcattcagtccatacagcgacctgacgctgaaggggccgccgaacaccgacttgagaagatccccgaacctatcaaagaagctactgctctcttctacggccctgctgcccccgcctccggggctttgcccgagggccaggtggattccttgttgtccattatttcttcccagcgagagagattcagagctcgaaaccaggagcttgaggccgagaaccgactggcacagcacacacttcaggcgctacagtccgagctggactccctgcgggccgataacatcaaactttttgaaaagatcaaatttctccagagctaccccggtcgcgggagtggcagcgatgatacggaactgaggtactcatcccagtacgaggagcgtctggaccctttcagcagtttctcgaaaagagaacggcagcgcaaatatttgagtctgagcccatgggacaaggctacactgagcatggggcgactcgtgctatctaataagatggcgagaaccattggtttcttctacacattatttctccattgcctggtgtttctggtcctctataagcttgcctggagtgagagcatggagagagactgcgcgacgttctgcgcgaaaaaatttgctgaccacctgcacaagttccatgagaacgacaacggcgccgcggccggcgacttatggcaatag

SEQ ID NO: 270210 - DNA, 2079 bp, Artificial Sequence
  derived and/or modified sequence
atgagcgccggcaccggcaagggcggcccccagacccccgtggagagcccaaccgcgtcttcgaagttaccacaagcccactggctgtgttctcccggcataaaacgggaactggatgcaactgctactgttctagccaacagacaagacgaatcagaacagagtagaaaaaggcttatagagcagagtcgagaatttaagaagaatactccagaggacctcagaaagcaggtcgctcccctgctgaagtccttccaaggcgaaatcgatgctcttagtaagagatccaaggaggctgaagcggcattcctgaacgtctacaagcggctgatcgatgtgcccgaccctgtgcccgctttagatctcggccagcagttgcagctgaaagttcaacgtttgcacgatatcgagaccgaaaaccagaaactgcgggaaaccttagaagaatacaacaaggaattcgcggaggtgaagaatcaagaagtaaccattaaggccctgaaagaaaaaatcagggaatatgaacaaacccttaagaaccaggcggagactattgccctagagaaggagcagaagttgcaaaacgattttgcagaaaaggagcgcaaactgcaagaaacacagatgtccaccaccagcaaactcgaggaggccgaacacaaggtccagtccctccagacagcactagaaaagaccagaaccgaactgttcgatctgaaaaccaagtatgatgaggagaccactgccaaagccgacgagatcgagatgattatgaccgaccttgaacgtgctaatcaacgggctgaagtagctcaaagagaggctgaaaccctccgggaacagctttcttccgctaatcatagcctccagctggctagtcagatacagaaggcacctgatgttgagcaggcaatagaggtgctgactcggagttctcttgaggtggaactcgcagccaaggagcgggaaatcgctcagctcgtagaagacgtccagcggctccaggccagcctgacaaagctgcgcgaaaattccgctagccaaatttcgcagctggaacagcagctgtcggctaaaaacagcactctgaagcagcttgaagaaaaactcaagggccaagcagactacgaggaggttaaaaaggagctgaacatcttaaaatctatggagtttgcccccagtgaaggagccggaacccaggatgcggccaaaccactcgaggttctgctgctggaaaagaaccgcagtcttcagtcggagaatgcagctctcaggatttcaaatagcgacctttccggccgatgtgccgagctccaagtccgcatcaccgaggccgttgctactgccaccgagcagagagaactgatagcccgactggaacaggatctcagtatcattcagagtatacaaagaccagacgccgagggagcggcagagcacagactagagaaaattccagagcctataaaggaagctactgcgctcttctacggcccagcagcaccagcttccggggcacttcccgagggccaggtggatagtctgttgagtattatttcttcccagagggagcgctttcgggctagaaatcaggaattagaggccgagaacagactggcccaacacaccctccaagcactgcagagcgagctggatagcctgcgggcagataatattaagctgttcgaaaaaataaaattcctacagtcctatccgggccgcgggagcggttctgatgatacagagctcaggtattcctctcaatatgaggaacgtctggaccccttttccagtttctcaaagagggaaagacaaagaaaatacctgtccctcagtccctgggataaagcaactttatccatgggtaggctcgtgttgtctaacaaaatggccagaactatcggttttttttacaccttgttcttgcattgtctggtcttcttagtgttatacaagctcgcctggagtgagtccatggaaagagactgcgccaccttttgtgctaagaagttcgctgaccacctccataagtttcacgagaacgacaatggcgctgcagctggagacctgtggcagtag

SEQ ID NO: 270211 - DNA, 1902 bp, Artificial Sequence
  derived and/or modified sequence
atgaagatctcagcgtggttaatgtgcgcgagagggaaggatctgcgcaagcaggtggcaccactcctcaagagctttcaaggtgagatcgacgcgctgtcgaaacgaagcaaagaggcggaggcagctttcctgaacgtgtataagcggttgatagatgtcccagaccctgtgcccgctctcgatctaggtcagcagctgcagctcaaggtgcagagactccacgatatcgagactgagaaccaaaagttacgggaaacgctcgaagaatataacaaagagttcgctgaggttaaaaaccaggaggtgactataaaagccctgaaagagaaaattagagaatatgagcagacactgaaaaatcaggccgagacaatcgccttggaaaaggaacaaaagctgcagaatgattttgccgagaaggaacgaaagctgcaggagactcagatgagcacaacttccaaactggaggaagcggaacacaaggtccaaagtctccagactgcccttgaaaagactaggacagagctgtttgatttgaagacaaagtacgatgaggaaacaaccgcgaaggccgacgagatagaaatgatcatgacggacctggagcgggcaaaccagcgcgctgaggttgcccagcgagaggctgaaactctaagggaacagctgagttcggccaaccactcactgcagctggcgagccaaatccagaaggccccagacgttgagcaggcaatagaggtgcttaccagatcgtccttggaggttgagctagcggctaaagagagggagatcgcacagttggtggaagacgtgcaacgtcttcaggcgagccttaccaagttacgggaaaactcggcctctcagatctcccagctggagcaacaactgagcgctaaaaactccaccctgaagcagctcgaggagaagctcaagggtcaggccgattacgaagaagttaagaaggagctgaacatcctgaagagtatggagtttgcaccaagtgaaggggcaggaactcaggacgctgctaagccattggaggtacttctgctcgaaaagaaccgatcactccaatccgaaaacgccgcactccgaatctccaattctgacctttccggacgttgtgccgaactgcaggtgcgaatcacagaggccgtcgcaaccgccaccgagcagagggagcttatcgctcgcctcgagcaggatctcagtattatccagagtatacagcgaccggacgccgagggcgctgctgagcacaggctggagaaaatccccgagccgataaaagaagctaccgccctgttttacggaccggcagctcctgctagcggagcattgcccgaaggccaggtagactcccttttgagcatcatcagttcccagagggagaggttccgagcccgtaaccaggagctggaagccgagaaccgactggcacagcataccctgcaggctttgcagtctgagttagactccctgcgggctgacaatatcaagttgtttgaaaagatcaaatttctccagagctatccaggtcggggtagcggatcggatgacacagaacttcggtattcatcccagtacgaggagaggctggatccgttttcatccttctccaaaagagaaagacagcggaaatacctgtcattgtccccatgggacaaggccacgctgtctatggggcgtctagtacttagcaacaagatggctcgaacaattgggttcttctataccttgtttctgcattgtttggtgtttttggtgctgtacaagcttgcttggtcagaaagtatggagagggattgcgcaacattctgcgccaagaagtttgcagatcacttacataagtttcacgagaacgacaacggggcagctgcgggtgatttgtggcaatag

SEQ ID NO: 270212 - DNA, 2079 bp, Artificial Sequence
  derived and/or modified sequence
atgagtgccggtacaggaaagggtgggccacaaactccagtggaaagtcctacggcatcctctaaattaccacaggcccactggctttgcagcccgggaatcaaaagggaactggatgctactgcaacagtgctggctaatcgccaggatgagagtgagcaatcccgtaaaagattgatcgagcagtctcgcgagttcaagaaaaatacgcccgaagacctgcggaaacaagttgctccgctgctcaagagtttccaaggggagatagatgccctgtccaagcggagcaaggaggccgaagccgcattcctgaatgtctataaacggctgatcgacgtcccagatcccgtgcctgcgctcgatctgggccagcaattgcagctgaaggtacagcggttgcacgatatcgaaaccgagaaccagaagcttcgcgagaccctggaggagtacaacaaggaattcgccgaagtgaagaatcaagaggtgactattaaggccctaaaggaaaagatcagggagtatgaacaaaccctgaagaatcaggcagaaactattgctctcgaaaaggagcaaaagctgcaaaatgattttgccgaaaaggaaagaaagctacaagagacacagatgagcaccacctccaagctcgaggaggcggagcataaggttcagagtctgcagacagctttggagaaaacgaggaccgagctgtttgatctgaagacaaaatatgacgaggagacgaccgcaaaggctgacgagattgagatgatcatgacggatttggagcgggcaaaccagcgggctgaagtcgctcagagagaggccgagaccctgagagaacagctcagttccgccaatcactccctccagctggcttctcaaattcagaaagctccggatgtagagcaggccatagaggtcttaacgagaagttcactagaagtggaacttgcagcaaaagagagggagattgcacagctcgtcgaggacgtgcagcggctgcaggcatcattgacgaaacttcgcgagaactcggcctcacagatctctcagttagagcagcagctgtctgcgaagaactccacactcaagcagctagaagagaagctgaaaggccaggccgattacgaggaggtgaagaaggaactcaatatcctcaagtcaatggagtttgccccttccgagggggcagggacgcaggacgcagcaaagcctctggaggtactgctgctggagaagaatagatctctgcaatctgaaaacgcagctttacgtatcagcaattccgacttgagcgggcgttgcgcagaattgcaggtgagaattaccgaggctgtggcaactgcaacagaacagagagaactcattgcccgtcttgagcaggacctgtctatcatccagagcatccagaggccagacgccgagggcgcagctgaacacaggctggagaagatacctgagccaattaaggaggccacggctctgttctacggcccagccgcacccgcatccggggctctcccagaaggtcaagttgactctctcctgtctataatcagtagccagagagaacgctttcgtgccaggaaccaggaactggaagcagagaaccgcttggctcaacatactctccaggcccttcagtccgaactggactccttaagggctgacaatatcaagttatttgagaagattaagtttcttcaaagttatcccggtcgcggaagcgggtccgatgacaccgaactaaggtactcctcccagtatgaggagcgccttgatcccttctcatcattcagcaaacgagagaggcagcgcaagtacctgagcctctctccctgggataaggcaacactttctatgggccgactggtcctctcgaacaaaatggctcgaaccatagggttcttttatacactatttcttcattgcctggtgttcctggtgctgtataaattggcatggtcggagtccatggaacgagactgtgccacattttgcgcaaagaagttcgctgaccacctgcacaaatttcacgagaacgacaatggggctgcagcgggagacctgtggcaatag

SEQ ID NO: 270213 - protein, 157 aa, Artificial Sequence
  derived and/or modified sequence
MVFPPNTQHKFTSGRVAFQLLQVGVDSPAAGTRHNSAGPAHLHRALSTASSMQRLPAATRATLILSLAFASLHSACSAASSSNSSSLTAHHPDPGTLEQCLNVDFCPQAARCCRTGVDEYGWIAAAVGWSLWFLTLILLCVDKLMKLTPDEPKDLQA

SEQ ID NO: 270214 - DNA, 474 bp, Artificial Sequence
  derived and/or modified sequence
atggtgttcccccccaacacccagcacaagttcaccagcggcagagtggccttccagctgctgcaggtgggcgtggacagccccgccgccggcaccagacacaacagcgccggccccgcccacctgcacagagccctgagcaccgccagcagcatgcagagactgcccgccgccaccagagccaccctgatcctgagcctggccttcgccagcctgcacagcgcctgcagcgccgccagcagcagcaacagcagcagcctgaccgcccaccaccccgaccccggcaccctggagcagtgcctgaacgtggacttctgcccccaggccgccagatgctgcagaaccggcgtggacgagtacggctggatcgccgccgccgtgggctggagcctgtggttcctgaccctgatcctgctgtgcgtggacaagctgatgaagctgacccccgacgagcccaaggacctgcaggcctag

SEQ ID NO: 270215 - DNA, 474 bp, Artificial Sequence
  derived and/or modified sequence
atggtgtttcctcctaacacacaacataagttcacttccggacgtgtggctttccagctgcttcaggtgggcgtggacagtcctgccgccggaaccaggcataattccgctgggcctgcccatctccaccgcgccctgtcgacggcgtcctcgatgcagagactgccagcagccacccgcgccaccttgatactctcccttgcttttgcctctctgcactcagcttgcagtgcagcgagttcgagtaactcttcctctttgacagcccaccaccctgatcctggtaccctggagcagtgtctaaatgtggatttctgcccccaggccgcccgatgctgcagaactggagtcgacgaatatggctggatcgcagcagccgtcggatggtccctctggtttttaaccctaattttattgtgtgtggataagctcatgaaactgactccagatgaacctaaagatttacaggcatag

SEQ ID NO: 270216 - DNA, 474 bp, Artificial Sequence
  derived and/or modified sequence
atggtgttcccccccaacacccagcacaagttcaccagcggccgggtggccttccagctgctgcaggtgggcgtggacagccctgctgctggcaccaggcacaacagcgctggccctgcccacctgcaccgggccctgagcacagccagctccatgcagaggctgcctgctgccacccgggccaccctcatcctgagcctggcctttgccagcctgcacagcgcctgcagcgctgccagcagcagcaacagcagcagcctgacagcccaccacccagaccccggcaccctggagcagtgcctgaatgtggacttctgcccccaggccgcccgctgctgcaggactggagtggatgaatatggctggattgctgctgctgtgggctggagcctgtggttcctgaccctcatcctgctgtgtgtggacaagctgatgaagctgaccccagatgagcccaaggacctgcaggcctag

SEQ ID NO: 270217 - DNA, 474 bp, Artificial Sequence
  derived and/or modified sequence
atggtgttcccccccaacacccagcacaagttcaccagcggccgggtggcttttcaactcttacaggttggcgttgactctcctgcagcaggtacacgccataactcagctggacccgctcaccttcaccgggctttgagcaccgctagttccatgcagagattgcctgccgcaacgcgggccacccttatcctatcactggcgtttgcaagcttgcactccgcatgctctgcggcgagctccagcaactcctcatctctgaccgcccaccatcccgatcctgggacactagagcaatgtctcaacgtcgacttttgccctcaggcagcccggtgttgtagaactggggtggatgaatatggatggatagcggcggctgtggggtggtccctttggtttctcaccttgatcctcctctgtgtggacaagttaatgaaacttacacccgatgaacccaaagacttgcaagcttag

SEQ ID NO: 270218 - DNA, 474 bp, Artificial Sequence
  derived and/or modified sequence
atggtgttcccccctaacacacagcataagttcactagtgggagggtggcctttcagctcttacaggtcggagtggacagcccggcagccggtacaaggcacaacagcgcaggaccagctcacctgcacagagccctgtcgacggccagcagtatgcagcgacttccagctgcgactcgggctactctgattctgagtctggctttcgcaagccttcacagcgcctgcagtgctgcctctagctccaacagctcttcgctgaccgcccatcaccctgaccccggtactctggaacagtgcttgaatgttgacttttgccctcaagcagcaaggtgttgccggactggcgtggacgaatacgggtggatagctgcagccgtagggtggtccctgtggttcctcaccttgattttgctttgcgtcgataagctcatgaagctgacgccagacgagcccaaggaccttcaagcctag

SEQ ID NO: 270219 - DNA, 1155 bp, Artificial Sequence
  derived and/or modified sequence
ccatggtgtttcccccaaacacccagcataagttcacctctggcagagttgctttccagctcctgcaggtgggagtcgactcacctgcagcaggcactcggcacaactccgcaggaccggctcacctgcaccgggcactcagcacagcctccagcatgcagcgcctccccgctgccacccgggccaccctgatcctcagcctggcctttgcctccctccactcggcttgctcggcagcaagcagcagcaacagctcaagcttgaccgctcaccacccagaccctgggaccctggagcagtgcctcaacgtggacttctgcccacaagcagcccggtgctgccgcacaggagtggacgagtacggctggatcgcggcagctgttggctggagcctctggttcctcaccctcatcctgctctgtgtggacaaactgatgaagctgactccagatgagcccaaggacttgcaagcgtgagacccaggctcggtgcacaaaatggtgatcgccaccaatttgtggctaatggggaaggggagtaaggctaacatggtttctattatttaagtcattttcacctttaagcttcagttacttttacaagggaaagaagaaagagcgggagaaccaaataaggcaagccagtgctgcccttgcatgtcactcccaagggcccctgggctgtgcccaggtaactcctctctcaagatagtccctctgtaatgtatcctgttttaacctttcttctaggcaccaagggaggtgcacaagaaactataagacttagtctcatcatcaacattttcagaagcaagtgcataaccttctcaccaaaaccaggttatctgcttctgtccctggcttgagtcctgggcttaactgtcatttcagaatctgagaatcagtcaggtatggtggctcatgcctgtaatcccagcactttgggaggcagaggtgggcagatcactcaaggtcaggagttccagatcagcctggccaacatggtgaaaccctgtctctactaaaaatacaaaaattagccaggtgtggtggtgcacacctgtaatcccagctacttgggaggccgaggcaggagaatctcttgaacctcggaggcggaggttgcagtgagccaagatcatgccactgcactcca

SEQ ID NO: 270220 - DNA, 4167 bp, Artificial Sequence
  derived and/or modified sequence
atggtgtttcccccaaacacccagcataagttcacctctggcagagttgctttccagctcctgcaggtgggagtcgactcacctgcagcaggcactcggcacaactccgcaggaccggctcacctgcaccgggcactcagcacagcctccagcatgcagcgcctccccgctgccacccgggccaccctgatcctcagcctggcctttgcctccctccactcggcttgctcggcagaagcaagcagcagcaacagctcaagcttgaccgctcaccacccagaccctgggaccctggagcagtgcctcaacgtggacttctgcccacaagcagcccggtgctgccgcacaggagtggacgagtacggctggatcgcggcagctgttggctggagcctctggttcctcaccctcatcctgctctgtgtggacaaactgatgaagctgactccagatgagcccaaggacttgcaagcgtgagacccaggctcggtgcacaaaatggtgatcgccaccaatttgtggctaatggggaaggggagtaaggctaacatggtttctattatttaagtcattttcacctttaagcttcagttacttttacaagggaaagaagaaagagcgggagaaccaaataaggcaagccagtgctgcccttgcatgtcactcccaagggcccctgggctgtgcccaggtaactcctctctcaagatagtccctctgtaatgtatcctgttttaacctttcttctaggcaccaagggaggtgcacaagaaactataagacttagtctcatcatcaacattttcagaagcaagtgcataaccttctcaccaaaaccaggttatctgcttctgtccctggcttgagtcctgggcttaactgtcatttcagaatctgagaatcagtcaggtatggtggctcatgcctgtaatcccagcactttgggaggcagaggtgggcagatcactcaaggtcaggagttccagatcagcctggccaacatggtgaaaccctgtctctactaaaaatacaaaaattagccaggtgtggtggtgcacacctgtaatcccagctacttgggaggccgaggcaggagaatctcttgaacctcggaggcggaggttgcagtgagccaagatcatgccactgcactccagcctgggcggcagagcaagactctgtatcagaaaaaaaaaaaaaaaaaagaatgtgaggatcaggtgggcatggtggctcatgcctgtaatcccagcactttgagagactgagacaggaggatcactttagcccaggaattcgagaccagcctgggcaagatggcaagaccttgtttctgtttaaaaactttttaaagttaaaaataaaaatgtgagaatccccttgacactcccaccatcttcacccccacctcaggtccttctccagctctccttctggcttcatcctgtcttccacggctctcctgtcccacctattctccctgccggtgcccaagttttagccttcactgccttcccctagaacacgccagggatattgcattctgtcctcactgtcttgaggatcttcctccccggctcatcactccccatgggcagctgccagggtaggcgctgtcaccttctgttgacaacagtcagtagctcctaaggactaaaactgttcagcccagcattcagctctttggaggagtccatctgtcccccagcacatccaggagtaaggattccgactggtccactcctcatcctggtgtcttcagcttctctgctgccatgttctttgctgggatggctgcttcccaactccacctccagaatcaaggatattcctccaagcccagctcgaatgcttgatctgcctggagccttcctggtcatccttgggtgacctggagctggtgctgttagagcacttctgctctgccctgatgtgcagttgttgtgaatgggccactccatagtttatccttcctcacacccctggggcatagtaccctattcaagtttgtccaatgagtgcatgggtgaattaatgaatgaatgaacaaatgagtctttgccctagacaacttaaggtcctcactctgcattaggagcctccatttttctccagatggttgaaataaccagcctctgaaggagccaatggtttggtcactgctctctcagcaaattacagtcactgtcacttagcatggagagtggacgttgcacatcactgtgaaaccttgcagaggaggagagggcaggttcatcagaagaaagaaaggacaaaatgactccttatgaagcattttgtgccttctgtgagaaaacatgtatttagatcagataaactctagtcaaaatacaaaaaggaaaaatgaaagacctctgaaataggaacaatctcttgaagaggcaaatgactcaaaactgctcagtggctctttcagaaaatctaagtaaagttccctgacaacagaaactgaagagattgcctggttcatcttgtagtcttccaaaacagcagataatttctgaatctcagatgttgaatcagtgcaacgggatggatttcttgttcctaagtgttaaatgatcacatacataaaagagtctgagcctgagcaacataatgagaccctgtctctacaaaaaaaaaaaaaagattagccaggcgtggtggtgcacactgatagtcccagctactcaggaggctgagggaggcggatcacttgagctagagagttcaaagctgcagtgagccatgtttgtgccactgcactccagcctgggcaacaaagtgagaccctgtctggaaaaaaaaaaaaaaaaagcgtctgcataattcctggtgcattttgtggatatacaatatgagtatgtgttccatgttttcagaaattcaaaggaagcgtttccacaatatgtgacggtttatttcccaagagatgaaaagattcattaaggtgcatgctttgatttaacatctgcaaacatttaaaaaatataacagtgtgtgacgtagcagtgagagtactatctttttttaaaaagggaaattaagatttatttctggccaatgtgaacagaaataagtcactttatctcactgagcaccaattttacacgtggaaaatagaagaattggaccaaatcagcagtttcaagctgagttgcaaaagttcatggaaccatttcagtcgcttcatggaatcggggtaggcatgaggcccgttgttctttcaacctgagccgcatggctcttgtgtctttaaaccttgtggtaggatttttttttttttctgctttaataagtgaagggtcagggcaccagttggtgtctgagatgccctccagtctggggaaccccgtagatgcttagactactttgaactgaagtatgtgcagtctgccatctcacattaaaatgtaggcattttgtcaattgcttttctttcatctgcacaagaggaaggagagaacgaatcaatacaaccactcttttccttgagactgcaaagaaaatggttctatagtttgatggttctacttcccagatgctacctctcagatttattctcaacagaaaattttttgattacagcagaccagatctttatctgtcaataagttaaaaaagataatctgggctggatgtggtggctcactcctgtaattccagcacttcgggaggccaagacaggaggattgcttgagcccaggaatttgagaccagcctgggcaacatggcgaaaccccacctctacaaaaaaatacaaaaaaattatttgggactggtggcgcatgcctgtggtcccagctactcgggaggctgaggtgggaagatcatttgagcccaggaggttgaggctgcagtgagctatgatcttgccactgcactccagcctgggtgacagagtgagaccttgcctcaaaaagaaaaaaataaagaaaagaaaatctgaaagggaaagcaggcatcaacttccagggatctaataacttcctaacttaaagcaacagaacttacctaacttttggacttttcattttaaaactttgcctctagcagtggacactgtcctcaacacagctacagtttatgtaacacagagtccatattatatggggcatgtctgtatcaaaatgtcatatgtagaaataaagtattaaatattaa

SEQ ID NO: 270221 - DNA, 1995 bp, Artificial Sequence
  derived and/or modified sequence
atgcccctgagagacaagtactgccagaccgaccaccaccaccacggctgctgcgagcccgtgtacatcctggagcccggcgacccccccctgctgcagcagcccctgcagaccagcaagagcggcatccagcagatcatcgagtgcttcagaagcggcaccaagcagctgaagcacatcctgctgaaggacgtggacaccatcttcgagtgcaagctgtgcagaagcctgttcagaggcctgcccaacctgatcacccacaagaagttctactgcccccccagcctgcagatggacgacaacctgcccgacgtgaacgacaagcagagccaggccatcaacgacctgctggaggccatctaccccagcgtggacaagagagagtacatcatcaagctggagcccatcgagaccaaccagaacgccgtgttccagtacatcagcagaaccgacaaccccatcgaggtgaccgagagcagcagcacccccgagcagaccgaggtgcagatccaggagaccagcaccgagcagagcaagaccgtgcccgtgaccgacaccgaggtggagaccgtggagcccccccccgtggagatcgtgaccgacgaggtggcccccaccagcgacgagcagccccaggagagccaggccgacctggagaccagcgacaacagcgacttcggccaccagctgatctgctgcctgtgcagaaaggagttcaacagcagaagaggcgtgagaagacacatcagaaaggtgcacaagaagaagatggaggagctgaagaagtacatcgagaccagaaagaaccccaaccagagcagcaagggcagaagcaagaacgtgctggtgcccctgagcagaagctgccccgtgtgctgcaagagcttcgccaccaaggccaacgtgagaagacacttcgacgaggtgcacagaggcctgagaagagacagcatcacccccgacatcgccaccaagcccggccagcccctgttcctggacagcatcagccccaagaagagcttcaagaccagaaagcagaagagcagcagcaaggccgagtacaacctgaccgcctgcaagtgcctgctgtgcaagagaaagtacagcagccagatcatgctgaagagacacatgcagatcgtgcacaagatcaccctgagcggcaccaacagcaagagagagaagggccccaacaacaccgccaacagcagcgagatcaaggtgaaggtggagcccgccgacagcgtggagagcagcccccccagcatcacccacagcccccagaacgagctgaagggcaccaaccacagcaacgagaagaagaacacccccgccgcccagaagaacaaggtgaagcaggacagcgagagccccaagagcaccagccccagcgccgccggcggccagcagaagaccagaaagcccaagctgagcgccggcttcgacttcaagcagctgtactgcaagctgtgcaagagacagttcaccagcaagcagaacctgaccaagcacatcgagctgcacaccgacggcaacaacatctacgtgaagttctacaagtgccccctgtgcacctacgagaccagaagaaagagagacgtgatcagacacatcaccgtggtgcacaagaagagcagcagatacctgggcaagatcaccgccagcctggagatcagagccatcaagaagcccatcgacttcgtgctgaacaaggtggccaagagaggccccagcagagacgaggccaagcacagcgacagcaagcacgacggcaccagcaacagccccagcaagaagtacgaggtggccgacgtgggcatcgaggtgaaggtgaccaagaacttcagcctgcacagatgcaacaagtgcggcaaggccttcgccaagaagacctacctggagcaccacaagaagacccacaaggccaacgccagcaacagccccgagggcaacaagaccaagggcagaagcaccagaagcaaggccctggtgtag

SEQ ID NO: 270222 - DNA, 729 bp, Artificial Sequence
  derived and/or modified sequence
atgcccctgagagacaagtactgccagaccgaccaccaccaccacggctgctgcgagcccgtgtacatcctggagcccggcgacccccccctgctgcagcagcccctgcagaccagcaagagcggcatccagcagatcatcgagtgcttcagaagcggcaccaagcagctgaagcacatcctgctgaaggacgtggacaccatcttcgagtgcaagctgtgcagaagcctgttcagaggcctgcccaacctgatcacccacaagaagttctactgcccccccagcctgcagatggacgacaacctgcccgacgtgaacgacaagcagagccaggccatcaacgacctgctggaggccatctaccccagcgtggacaagagagagtacatcatcaagctggagcccatcgagaccaaccagaacgccgtgttccagtacatcagcagaaccgacaaccccatcgaggtgaccgagagcagcagcacccccgagcagaccgaggtgcagatccaggagaccagcaccgagcagagcaagaccgtgcccgtgaccgacaccgaggtggagaccgtggagcccccccccgtggagatcgtgaccgacgaggtggcccccaccagcgacgagcagccccaggagagccaggccgacctggagaccagcgacaacagcgacttcggccaccagctgatctgctgcctgtgcagaaaggagttcaacagcagatag

SEQ ID NO: 270223 - DNA, 393 bp, Artificial Sequence
  derived and/or modified sequence
atgcccctgagagacaagtactgccagaccgaccaccaccaccacggctgctgcgagcccgtgtacatcctggagcccggcgacccccccctgctgcagcagcccctgcagaccagcaagagcggcatccagcagatcatcgagtgcttcagaagcggcaccaagcagctgaagcacatcctgctgaaggacgtggacaccatcttcgagtgcaagctgtgcagaagcctgttcagaggcctgcccaacctgatcacccacaagaagttctactgcccccccagcctgcagatggacgacaacctgcccgacgtgaacgacaagcagagccaggccatcaacgacctgctggaggccatctaccccagcgtggacaagagagagtacatctag

SEQ ID NO: 270224 - DNA, 297 bp, Artificial Sequence
  derived and/or modified sequence
atgcccctgagagacaagtactgccagaccgaccaccaccaccacggctgctgcgagcccgtgtacatcctggagcccggcgacccccccctgctgcagcagcccctgcagaccagcaagagcggcatccagcagatcatcgagtgcttcagaagcggcaccaagcagctgaagcacatcctgctgaaggacgtggacaccatcttcgagtgcaagctgtgcagaagcctgttcagaggcctgcccaacctgatcacccacaagaagttctactgcccccccagcctgcagatgtag

SEQ ID NO: 270225 - DNA, 1995 bp, Artificial Sequence
  derived and/or modified sequence
atgccactgagggacaaatactgccagaccgatcaccatcaccacggatgctgtgagcccgtttatatcctcgagcccggtgatcccccactgcttcagcagcctctgcagaccagtaaatccggaatccagcaaatcatagaatgcttccgcagtggcaccaagcaattgaaacatattctcttgaaggatgtcgacacaatcttcgagtgtaaactctgccgctccttgttccgcggactgcccaacctgattactcacaaaaagttttattgcccgcctagtttacagatggatgataatctgccggacgtgaacgacaaacagtcccaggcaataaatgacctcctggaggctatctacccaagcgtggataagagagagtacatcatcaaactcgagccaatcgaaacaaaccagaatgctgtgtttcagtatatttccagaacagataatcctattgaggtgacagaaagtagttccacgccggagcagaccgaggtccagattcaggaaacctctaccgaacaaagcaagaccgtccccgtgactgatactgaggttgaaactgtcgaaccaccgccagtagagattgtgactgacgaggtggcgccaacatccgacgagcagccgcaggaatcccaggccgacttagagacttcggataactcggatttcgggcatcagctgatctgttgcctctgtcgtaaagagttcaatagtagacgaggcgtccggagacacatccgaaaagtgcacaaaaaaaaaatggaagagctaaaaaagtacatagagacaagaaaaaaccctaaccaatcctctaagggtcgttccaagaacgtgcttgtaccattatcgcgatcctgccccgtatgctgtaaatcattcgcgactaaggccaacgtccgcagacattttgatgaagtccatcgaggtctgaggcgcgacagtatcaccccagatatcgctaccaagccaggacagccactttttctggactctatttccccgaaaaagtcttttaaaacaaggaaacaaaaatccagctctaaagcagagtacaacctgactgcatgtaaatgccttctttgcaagcggaagtattcgtcacaaatcatgctgaaaagacacatgcagatcgtacacaaaataactctgtccggcacgaatagtaaaagggagaaaggacccaacaatactgctaattcatctgaaatcaaggtcaaggtggaaccagccgattccgtggaaagctcacctccttctattacccattctccccagaatgagctcaagggcacaaatcatagcaacgagaaaaagaacactcccgctgctcagaaaaataaggtgaagcaggattctgaaagcccaaagagcacatctccttcggccgcgggaggtcaacaaaaaaccagaaaaccaaagctgtccgctggtttcgactttaagcagctatattgtaagctctgcaaacggcagttcacatccaagcagaacctaaccaagcatattgaacttcacaccgacgggaacaacatctacgtcaagttctacaagtgccctctgtgtacctatgaaacgcgtcgcaaacgggacgtgatcagacatattacagtggtgcacaagaagagctcacggtatctgggaaagatcactgcttccctcgagattagggcaatcaaaaagcctattgacttcgtcctgaataaagtagccaagcgtggccctagccgggatgaggcaaaacattcagactctaagcatgatgggacttctaacagccctagtaaaaaatatgaagtggctgatgttggaatcgaggtgaaggttaccaaaaattttagcctgcaccgttgcaacaagtgtgggaaagcgttcgccaaaaagacgtacttagaacaccacaagaagacacacaaggctaatgccagtaattcgccagagggtaacaagacaaaaggcagaagcacccggagtaaggctctggtgtag

SEQ ID NO: 270226 - DNA, 1995 bp, Artificial Sequence
  derived and/or modified sequence
atgcccctgagggataagtactgccagactgatcatcatcatcacggatgttgcgagcccgtgtatatcctggaacctggcgatcctccactcttacagcaacccctgcaaacaagcaaaagcggcatccagcagattatagagtgcttccgctctggcacgaagcagctgaaacatatcctgctgaaggacgtggacaccatcttcgaatgcaagctgtgccggagcctgtttcgcggactccctaacctgatcactcataaaaaattttattgtcctccatccctgcagatggatgacaacttgccggacgtcaatgacaagcagagccaggctatcaacgatttgcttgaagctatctatccaagtgtggacaagcgcgaatacatcatcaagctggaacccatcgagactaaccagaatgcagttttccaatatatttctagaacagacaaccctatcgaggttacggaatcctcgagcacacctgaacagactgaagtccaaatccaagagaccagcacagagcagtcgaaaactgtgccagttaccgatactgaggtggagacagttgaacctccacccgtggagattgtgacagacgaggttgccccaaccagcgatgaacagcctcaggaatcacaggctgacttagagacgtctgacaattcggattttgggcaccagctaatttgctgcctctgtagaaaagagttcaactccaggagaggagttcggcgccacattcggaaggtgcacaagaagaagatggaggaattaaaaaagtatatcgagaccaggaaaaaccctaatcagtcctcgaagggtcgatccaaaaatgtcttagtgcctctttcccgctcttgtccggtctgttgcaaaagtttcgccaccaaagctaacgtccggcggcacttcgacgaagtgcacagaggactgcgccgtgacagtattacacctgatatcgccacaaagcccggccagccactgttcctcgacagcatttcccccaaaaaaagcttcaaaactcggaagcagaaaagtagttctaaagcagagtacaacctcacagcttgtaaatgtcttctgtgcaaaagaaaatatagtagccagatcatgctgaagcgccacatgcagatcgttcacaagatcactctgtccgggacaaattccaaaagagagaaggggcctaacaacaccgcaaacagttctgagatcaaggtgaaagttgagccagcagattccgtggaatcatccccccctagcattacccatagtccacagaacgagctcaaagggaccaatcatagtaatgaaaagaagaatactcccgcagctcaaaagaataaagtgaaacaggactctgagtccccgaagtccacttccccctccgcggccggcgggcagcaaaagactaggaagccaaagctctctgcgggctttgactttaagcagctctactgtaaactttgcaagaggcagttcacatcaaagcaaaacctgactaagcacattgagctgcataccgatgggaacaatatctatgtgaaattttataagtgtccgctgtgcacctatgagactagacgtaaaagggatgtgatccgacatatcacagttgttcataagaagtccagtagatatctcggcaaaataacagcatctttggagatcagggcaatcaagaaaccaattgatttcgttctgaacaaagtcgccaagagaggccccagcagagacgaagccaagcactccgatagcaagcacgatgggacttctaactctccaagcaaaaaatacgaagttgccgatgtgggtatcgaagtgaaggtgaccaaaaattttagcctccatcggtgcaacaagtgtggtaaagcttttgcaaaaaaaacttatcttgaacaccataaaaaaacccacaaggctaatgcttcaaatagtcctgaagggaacaagactaagggtcggtccacgcgctctaaggcactcgtgtag

SEQ ID NO: 270227 - DNA, 1995 bp, Artificial Sequence
  derived and/or modified sequence
atgccattacgcgataaatattgccagacagatcaccatcatcatggttgctgcgaacctgtctatattcttgagcctggtgaccccccccttttacagcagccactccagacgtcaaagtcgggtatccagcagattatcgagtgcttccggtctggtacaaagcaactgaagcatattctattgaaagatgtggacactatcttcgaatgcaagttgtgccgctccctttttcgcgggctgccaaacctgatcactcacaaaaaattctattgccccccctcactgcagatggatgacaatctgcccgacgtcaacgacaagcagtctcaggcaataaatgatttactagaagccatatatccttcagtggacaaacgcgaatatattattaagctagaaccaatcgagacaaatcagaatgcagtgtttcagtatattagcaggacagataatccgatcgaggtgacagagtcaagcagcacccccgaacagacagaagttcagattcaagagacctctacggagcagtcaaagactgtcccagtcaccgatactgaggtcgaaactgttgaaccaccacccgttgaaatcgtcacggatgaggtcgcaccaacttcagacgagcaacctcaggagagccaggcagatctcgagactagtgacaactctgactttggtcatcagttaatttgttgcctgtgccggaaggaatttaacagccggaggggtgtgcggaggcacattagaaaggtacataagaagaaaatggaagaattaaagaaatatatcgaaaccagaaagaatccgaatcagagttccaagggccggagcaagaatgtactggtgccgttgagccgcagttgccctgtgtgctgtaagtccttcgccacaaaggctaatgtgcggcgccacttcgacgaagtgcatcgagggctccgccgggattccatcacccccgatatcgcgactaagcctgggcaaccactgtttctggattccatttcccctaagaagtcgtttaagacaagaaaacagaagtcatcttctaaagccgagtacaacctcaccgcgtgtaagtgtctgctgtgcaaacgcaagtactcttcccaaatcatgctcaagcgtcacatgcagatagtgcataagataacactgtccggtactaactccaaacgggaaaaaggacctaacaacaccgctaacagcagtgagataaaggtgaaggtagaaccagctgactctgtggaatcctctccacccagtatcacacacagcccccaaaacgagctgaagggaactaaccactccaacgagaagaagaatacgccggccgctcaaaaaaacaaggtgaagcaggactccgaatccccaaagtccacaagcccttctgccgccgggggacagcagaaaactagaaagcccaaactcagcgctggcttcgatttcaaacaactgtactgcaaattatgcaagcgtcagtttacatctaagcagaatctcaccaaacacatcgaattgcatacagacggaaacaacatttacgtcaagttttacaagtgccctttgtgtacctacgagactcggcggaagcgcgacgtgatccggcacattacagtagttcacaagaagtcttctaggtacctgggaaaaattacggcttctctggaaatacgggctatcaagaagcctatcgatttcgtgctgaataaggttgccaagcgcggaccatccagagacgaggcaaaacacagtgattcgaaacacgatggtacctctaactccccttctaaaaagtacgaggtggccgatgtggggatcgaagttaaggtgaccaaaaacttcagtctgcatcggtgcaataaatgtggtaaagcgtttgctaaaaaaacatatctcgagcaccacaagaaaactcataaggctaacgccagcaattccccagagggaaataagactaaaggacgatctactcggtcgaaagcccttgtctag

SEQ ID NO: 270228 - DNA, 729 bp, Artificial Sequence
  derived and/or modified sequence
atgcctctgagagataagtactgtcagacggaccaccaccaccatgggtgctgtgaaccagtgtatatcctggaacccggagatccccccttgctgcagcaacctctgcagacatccaaatcagggattcagcagattatcgaatgcttccggagcggtacaaagcaactgaagcacattctgctcaaggacgtcgatacaatttttgaatgtaagctgtgcaggtccctgtttcgggggttgccaaatcttatcactcacaagaagttttactgtcctccctcactgcagatggatgacaatcttcccgacgtgaatgataaacaaagtcaagccattaacgatctgctggaggccatttaccctagcgtggataaaagagagtacattatcaagttggagcctattgaaacaaaccagaatgctgtatttcagtatatatctaggaccgataaccctattgaggtcacagaaagctcttccactcctgagcaaactgaggtgcagatacaagagacttccacagaacagtctaagaccgtgccggttaccgacacagaggtagagactgtcgagccaccacccgtcgaaatcgtgaccgatgaggtcgcccctacaagcgatgagcagcctcaggaatcgcaagctgacctggaaacaagtgacaactccgattttggacaccaactcatctgctgcctgtgtcgcaaggagtttaatagccggtag

SEQ ID NO: 270229 - DNA, 393 bp, Artificial Sequence
  derived and/or modified sequence
atgccgctgcgagacaaatactgccagaccgaccaccaccatcatggctgttgtgaacctgtgtacatcttggaaccaggtgatccccctctgcttcagcagcctctgcagacgtcaaagtctggtatccaacagattatcgagtgcttcaggagtggcacaaagcaactaaagcacatcctgttaaaggacgtggacacgattttcgaatgtaaactgtgccgctcacttttcaggggactgccaaatttaatcactcacaagaagttctattgcccacccagtctccagatggacgataacctccccgatgtgaacgataaacagtcccaggccattaatgacctccttgaggctatctacccctctgtcgacaaacgtgagtacatttag

SEQ ID NO: 270230 - DNA, 297 bp, Artificial Sequence
  derived and/or modified sequence
atgcctcttagggataagtattgtcaaacagatcatcatcaccatggctgttgtgaacctgtgtacattttagaaccaggagatccccccctcctccagcagcctcttcagaccagcaaatcaggtattcaacagatcattgagtgcttccggtcaggcaccaaacagttaaaacacatcctactgaaagatgtcgatactatctttgagtgtaagctatgtagaagccttttccgagggctacctaaccttataacacataaaaaattctactgtcctccttctctgcagatgtag

SEQ ID NO: 270231 - DNA, 1995 bp, Artificial Sequence
  derived and/or modified sequence
atgcccctgcgggacaagtactgccagacagaccaccaccaccacggctgctgtgagcctgtgtacatcctggagcccggggacccccccctgctgcagcagcccctgcagaccagcaagagcggcatccagcagatcatcgagtgcttccgcagcggcaccaagcagctgaagcacatcctgctgaaggatgtggacaccatctttgagtgcaagctgtgccgcagcctcttccggggcctgcccaacctgatcacccacaagaagttctactgcccccccagcctgcagatggatgacaacctgcctgatgtgaatgacaagcagagccaggccatcaatgacctgctggaggccatctaccccagcgtggacaagcgggagtacatcatcaagctggagcccatcgagaccaaccagaatgctgtgttccagtacatcagcaggacagacaaccccatcgaggtgacagagagcagcagcaccccagagcagacagaggtgcagatccaggagaccagcacagagcagagcaagacagtgcctgtgacagacacagaggtggagaccgtggagcccccacctgtggagatcgtgacagatgaggtggcccccaccagtgatgagcagccccaggagagccaggccgacctggagaccagtgacaacagcgactttggccaccagctgatctgctgcctgtgcaggaaggagttcaacagccggcggggcgtgcggcggcacatcaggaaggtgcacaagaagaagatggaggagctgaagaagtacatcgagaccaggaagaaccccaaccagagcagcaagggccgcagcaagaatgtgctggtgcccctgagccgcagctgccctgtgtgctgcaagagctttgccaccaaggccaacgtgagaagacactttgatgaggtgcaccggggcctgcggcgggacagcatcaccccagacatcgccaccaagccaggccagcccctcttcctggacagcatcagccccaagaagagcttcaagaccaggaagcagaagagcagcagcaaggccgagtacaacctgacagcctgcaagtgcctgctgtgcaagaggaagtacagcagccagatcatgctgaagaggcacatgcagatcgtgcacaagatcaccctgagcggcaccaacagcaagcgggagaagggccccaacaacacagccaacagcagcgagatcaaggtgaaggtggagcctgctgacagcgtggagagcagcccccccagcatcacccacagcccccagaatgagctgaagggcaccaaccacagcaatgagaagaagaacaccccagctgcccagaagaacaaggtgaagcaggacagcgagagccccaagagcaccagccccagcgctgctgggggccagcagaagaccaggaagcccaagctgtctgctggctttgacttcaagcagctgtactgcaagctgtgcaagaggcagttcaccagcaagcagaacctgaccaagcacatcgagctgcacacagatggcaacaacatctacgtgaagttctacaagtgccccctgtgcacctatgagaccaggaggaagagagatgtgatccgccacatcaccgtggtgcacaagaagagcagccgctacctgggcaagatcacagccagcctggagatccgggccatcaagaagcccatcgactttgtgctgaacaaggtggccaagaggggccccagcagagatgaggccaagcacagcgacagcaagcatgatggcaccagcaacagccccagcaagaagtatgaggtggctgatgtgggcatcgaggtgaaggtgaccaagaacttcagcctgcaccgctgcaacaagtgtgggaaggcctttgccaagaagacctacctggagcaccacaagaagacccacaaggccaatgccagcaacagccctgagggcaacaagaccaagggccgcagcaccaggagcaaggccctggtgtag

SEQ ID NO: 270232 - DNA, 729 bp, Artificial Sequence
  derived and/or modified sequence
atgcccctgcgggacaagtactgccagacagaccaccaccaccacggctgctgtgagcctgtgtacatcctggagcccggggacccccccctgctgcagcagcccctgcagaccagcaagagcggcatccagcagatcatcgagtgcttccgcagcggcaccaagcagctgaagcacatcctgctgaaggatgtggacaccatctttgagtgcaagctgtgccgcagcctcttccggggcctgcccaacctgatcacccacaagaagttctactgcccccccagcctgcagatggatgacaacctgcctgatgtgaatgacaagcagagccaggccatcaatgacctgctggaggccatctaccccagcgtggacaagcgggagtacatcatcaagctggagcccatcgagaccaaccagaatgctgtgttccagtacatcagcaggacagacaaccccatcgaggtgacagagagcagcagcaccccagagcagacagaggtgcagatccaggagaccagcacagagcagagcaagacagtgcctgtgacagacacagaggtggagaccgtggagcccccacctgtggagatcgtgacagatgaggtggcccccaccagtgatgagcagccccaggagagccaggccgacctggagaccagtgacaacagcgactttggccaccagctgatctgctgcctgtgcaggaaggagttcaacagcaggtag

SEQ ID NO: 270233 - DNA, 393 bp, Artificial Sequence
  derived and/or modified sequence
atgcccctgcgggacaagtactgccagacagaccaccaccaccacggctgctgtgagcctgtgtacatcctggagcccggggacccccccctgctgcagcagcccctgcagaccagcaagagcggcatccagcagatcatcgagtgcttccgcagcggcaccaagcagctgaagcacatcctgctgaaggatgtggacaccatctttgagtgcaagctgtgccgcagcctcttccggggcctgcccaacctgatcacccacaagaagttctactgcccccccagcctgcagatggatgacaacctgcctgatgtgaatgacaagcagagccaggccatcaatgacctgctggaggccatctaccccagcgtggacaagcgggagtacatctag

SEQ ID NO: 270234 - DNA, 297 bp, Artificial Sequence
  derived and/or modified sequence
atgcccctgcgggacaagtactgccagacagaccaccaccaccacggctgctgtgagcctgtgtacatcctggagcccggggacccccccctgctgcagcagcccctgcagaccagcaagagcggcatccagcagatcatcgagtgcttccgcagcggcaccaagcagctgaagcacatcctgctgaaggatgtggacaccatctttgagtgcaagctgtgccgcagcctcttccggggcctgcccaacctgatcacccacaagaagttctactgcccccccagcctgcagatgtag

SEQ ID NO: 270235 - DNA, 1995 bp, Artificial Sequence
  derived and/or modified sequence
atgcccctgcgggacaagtactgccagaccgaccaccaccaccacggctgctgcgaaccagtgtacatactggaaccaggggacccaccactgctgcagcaaccactgcagacctcgaagtccggaatccagcagatcatagagtgcttcagatctggcaccaagcagctcaaacacatcctgctcaaagacgttgatactatattcgagtgcaagctgtgtaggtcattgttccggggtctccccaaccttatcactcacaagaaattctactgcccccctagcctccagatggacgataacctgcccgacgtgaacgataagcagagccaggcaattaatgacctccttgaggccatatatccatccgtggacaagcgggaatacattattaaactcgagccgattgagacaaatcagaatgccgtctttcagtacataagcaggaccgacaaccctattgaagtcaccgagtcatcctctaccccagaacagaccgaagtgcagatacaggagacctccacggaacagagtaaaaccgtccctgtcacggacaccgaggtagaaacagtggagccccctccagtggagatcgtcactgacgaagttgcccccacgtccgatgagcagccacaggaatcacaggccgacctggagacctcagacaactcagatttcggccaccaactaatatgttgtctgtgtagaaaggagtttaacagccgacggggcgtgcgaaggcacatccgcaaggtacacaagaaaaaaatggaggagcttaagaaatatatagaaaccagaaagaatccaaatcaatcgagcaaaggacgcagtaagaatgttttggtcccgctgagtagatcttgtccagtctgctgtaagtcatttgcaacaaaagctaacgtcagacggcatttcgacgaggtccatcggggcctccggagggatagtataacccctgacattgccactaaacccggacagcccctgttcctggatagtatatcaccaaaaaagtccttcaaaacaagaaagcagaagtcctcatcaaaagccgagtataacttgacagcgtgtaagtgtttgttatgcaagagaaagtattcaagtcagatcatgctaaaacggcatatgcaaattgtccacaaaattaccttgtccggtacaaattccaaacgtgagaagggcccgaataacacagccaattcatccgagataaaggtcaaggtcgaaccagccgatagcgttgaaagctccccccctagtattacccatagccctcagaatgaattgaagggaacaaatcattccaacgaaaaaaaaaatacccccgccgcgcagaagaacaaagtcaagcaggattctgagtctcctaagagtacgtctccgagtgcagccggcggccagcaaaagacacggaaaccaaaactgtccgcgggcttcgattttaagcagctgtattgtaaactttgcaagagacagtttacttcgaaacagaaccttactaagcatatcgaactccatactgacggcaataatatatacgtgaagttttacaagtgcccactatgcacatatgagacacgccgcaaaagagatgttattagacacatcaccgttgtgcataagaagagctcccgctatctaggtaagattactgccagtctggaaatccgggccataaaaaagcccatcgactttgtgctgaataaggtggcaaaacgcggaccaagtcgcgatgaagccaagcacagtgactccaaacatgatgggacatcaaactctccttccaaaaagtacgaggttgccgacgttgggatcgaggtcaaggtgaccaaaaatttttcactccatcgctgcaataaatgcggtaaggcgttcgcgaaaaaaacttacctcgagcaccacaagaagacccataaggccaatgcctctaattctccggagggcaataaaaccaaagggaggagtacccggagcaaagcgctggtttag

SEQ ID NO: 270236 - DNA, 1995 bp, Artificial Sequence
  derived and/or modified sequence
atgcccctgcgggacaagtactgccagaccgaccaccaccaccacgggtgttgtgagcccgtgtacatcctggagcccggtgaccctcccctgcttcagcagccgttgcagacttcaaaatcagggattcaacagatcattgaatgtttccggagcgggactaaacagttgaaacacattttactgaaggatgtagacacaatttttgagtgtaaattgtgccggtcattgtttcgagggctccctaaccttatcacacacaagaaattttattgtcctccaagtctccagatggatgacaacttaccggacgtcaacgacaagcagtcacaggctattaatgacttgctggaagcgatttacccatccgtggacaagcgagagtacattatcaagctggagcctatcgagacgaaccaaaatgccgtttttcagtatatcagtcgcaccgacaatcctatcgaagttacggagtcaagctccactccagagcaaacggaagttcagatacaggaaaccagcacagagcagtcaaagaccgtgcctgtgaccgataccgaggtggagacagtggagccccctcctgtcgagatcgtgacagacgaggtagctcccacttccgacgagcagcctcaggagtcgcaagctgacttggagacttctgataactcagacttcgggcaccaactcatatgctgcttatgtaggaaggaatttaactcccgacgcggggttcgtcgacatatacggaaagttcataagaaaaaaatggaagaactcaaaaagtatatcgaaacgcgaaaaaatcccaatcagagttcgaaaggacggtccaagaatgtgctggtgcccctgtcaagatcctgtcccgtgtgctgcaaaagtttcgcgactaaggccaacgttcgtcggcatttcgacgaagttcatcgaggcctgaggcgtgacagtatcacccctgacattgccactaaaccaggtcagcctctgtttcttgactctatttctccaaaaaaaagtttcaagaccaggaaacagaaatcttcttctaaagctgaatataacctgaccgcctgtaagtgtctcttgtgcaagaggaaatatagctctcagatcatgctgaagcgacacatgcagatcgtgcataagatcactctgagtggcaccaattccaaacgagaaaagggccccaacaatacagccaatagtagcgagattaaagtcaaagtggagcctgcagatagcgtagagtcaagcccccccagtatcacccacagtccccaaaacgagttaaaagggactaaccactcaaatgagaagaaaaacactccggctgcccagaagaacaaggtaaagcaggactccgaatcacctaagtcaactagcccatcagctgccggaggccagcaaaagacccggaagcctaagttatcggctgggtttgattttaagcagctgtattgcaagttgtgcaaacggcaatttacttccaagcagaacctcactaagcacatcgagctgcatacggacggaaataacatctatgtgaaattctataaatgccccttatgcacctacgagacgagaagaaaacgggatgtgatcagacacatcaccgtggttcacaaaaaatcctctcgctatttggggaagatcacagcaagcctcgagattcgggcaattaagaagcctatcgattttgtccttaacaaagtggcgaaacgcggccccagccgtgatgaggctaagcattctgattctaaacatgatggcacatcaaattctccatccaagaaatatgaagtggccgatgtggggatagaagtgaaagtaacaaaaaatttcagtctacaccgctgtaacaaatgcggtaaggctttcgccaaaaagacctatctggaacaccataaaaagactcataaggcaaatgcctcaaatagcccagagggcaacaagaccaaggggcgtagtacgcgctctaaggcacttgtgtag

SEQ ID NO: 270237 - DNA, 1995 bp, Artificial Sequence
  derived and/or modified sequence
atgcccctgcgggacaagtactgccagaccgaccaccaccaccacgggtgttgtgaaccagtgtacatcttggaacctggcgatccccctctgctacagcagcctttgcagactagtaagtctggaatccagcagatcatcgagtgtttccgctctggaaccaaacagctgaagcatatcctcctgaaagacgtggacactatctttgagtgtaaactgtgccgatccttattccgcggcctgccaaatctcattacacacaaaaagttttactgtcccccttcactacagatggatgataatctaccggacgtgaatgataagcagtctcaggctataaatgatcttctggaggcgatatacccctccgtcgacaagagggagtatatcataaagttggaacctatcgagactaatcagaacgccgtctttcagtatattagtcgcacagataatcctattgaggtgaccgaatcttcctccaccccggagcagaccgaagtgcagattcaggagaccagcacagagcaatcaaagaccgtccccgtcacagatacggaggttgagaccgtggagccacctccagtggaaattgtgacggatgaggtggctcccaccagcgatgagcagccgcaggagtcacaggcagatctcgaaacttccgacaatagcgatttcggccatcagcttatatgctgtctttgccgaaaggagttcaattctcgtcgcggggtacgacggcatatcagaaaggtgcataagaagaagatggaggaactaaaaaagtacattgagacgcggaaaaatcccaaccagtccagtaaagggaggtctaaaaacgttctggtcccgctgtccagatcctgtcccgtgtgttgtaagtccttcgccaccaaggcgaatgtccggcgccatttcgacgaggtccatcggggcctgagacgtgactccatcacacctgatatcgctacaaaaccaggacagccgttgttcttggattctatcagtcctaagaagtcctttaagactaggaaacaaaaaagttcctcgaaggcagaatacaaccttaccgcctgcaaatgtttgctgtgtaaacgcaagtactcctcacagatcatgttaaaacgccacatgcagatcgtccataaaatcactctgagcggaactaattccaagagagagaaaggaccaaacaatacagcgaattccagtgaaattaaggttaaagtggagccggctgactcagtcgagtcctcccctccctcaattacccactcgccccagaatgaactgaaaggcactaatcatagcaacgagaaaaagaacacacctgctgcacagaagaacaaggtgaagcaagactccgagagcccgaagtccactagtccttcagctgccggcggacagcagaagaccaggaagcccaaactgagcgcaggcttcgacttcaaacagctgtactgcaaactctgtaagcgccagttcacatctaaacaaaacctgacaaagcacatcgagttgcacaccgatggaaataacatttacgtgaagttctacaaatgccccctttgtacttacgaaacccggcggaagcgggatgtaatccgccatattaccgtggtacacaagaaatcgagtcgctacctgggcaaaatcaccgcttctcttgagatccgggctatcaagaaacctattgactttgtgttgaacaaggtcgcaaagcggggaccatctcgtgacgaggccaagcatagtgatagcaaacatgatggaaccagtaatagtccctccaaaaaatacgaggtagccgacgtggggatcgaggtcaaagtgaccaaaaatttttccctccaccgttgcaacaaatgtggcaaagcatttgctaagaaaacctacctggaacatcataagaagacacataaggccaatgctagtaactcccctgaggggaataaaacgaaagggcgcagtacaaggagtaaagccctggtgtag

SEQ ID NO: 270238 - DNA, 729 bp, Artificial Sequence
  derived and/or modified sequence
atgcccctgcgggacaagtactgccagaccgaccaccaccaccacggatgctgcgagcccgtctacattctcgaacccggggatcctcccctcctgcagcaaccactgcaaacttccaaaagcggtatccaacagatcattgagtgtttcaggtccggcactaagcagctcaagcatatcctgctaaaggatgtcgatactatctttgaatgcaagttatgccgatcgcttttccgcggcttaccaaatctgattacgcataaaaaattctattgcccacctagtctgcagatggatgataatctgcccgatgtgaatgataagcagtcccaggccatcaacgacttgctggaagccatctaccccagcgtggacaagagagagtacatcattaaattggaaccgattgagactaatcagaatgccgtctttcagtatatctctcgaaccgataatccaatcgaagtgaccgagtcgagctctacacccgagcaaacagaggtgcagattcaggagacgtcaactgagcagtcgaaaaccgtgcctgtcacggataccgaagtggagactgtggagcccccccccgtggagattgtcactgacgaagttgctcccacctcagacgaacaacctcaggaatcccaggccgacttggagacatccgacaactctgactttggacaccagctgatttgttgcctttgtcgcaaggagtttaactcacgatag

SEQ ID NO: 270239 - DNA, 393 bp, Artificial Sequence
  derived and/or modified sequence
atgcccctgcgggacaagtactgccagaccgaccaccaccaccacgggtgctgtgaaccggtctatatactggagccgggcgacccacccctcctgcagcagccactccagaccagcaagtctggcatccaacaaatcattgaatgttttagaagcggaacgaagcagctgaaacatattctactgaaagacgtggacactatctttgaatgtaagttatgcaggtcccttttcagggggcttccaaatctcataacccataaaaagttttactgccctccttccctgcagatggatgataacctccctgacgtgaacgacaagcagtctcaagccattaacgatttgctggaggccatctatccgagtgtcgacaaacgagaatacatttag

SEQ ID NO: 270240 - DNA, 297 bp, Artificial Sequence
  derived and/or modified sequence
atgcccctgcgggacaagtactgccagaccgaccaccaccaccacggatgctgcgagcctgtatacattctcgaacctggcgatccccctcttctgcaacaaccactgcagacgagtaagagcggaatccagcagatcatcgagtgcttcagatccggcaccaagcagctgaagcatattctgctgaaggacgtggacaccatctttgaatgcaaactgtgtcggagcctttttcgtggcctgcctaaccttattacgcataagaagttttactgtcccccatccctgcaaatgtag

SEQ ID NO: 270241 - DNA, 1995 bp, Artificial Sequence
  derived and/or modified sequence
atgccacttcgcgataagtactgccaaactgatcaccaccaccacggctgctgcgagccagtgtatattctagagccaggcgatccgccactgctacagcagccgctgcagacgagcaagagtgggattcagcagatcatcgagtgttttaggagcggaacaaagcagctaaagcacatcctgctcaaggatgttgacaccatctttgagtgcaaattgtgcaggtcactctttagaggactgcccaacttaatcacccacaagaagttttactgtccccctagtctccagatggatgacaacctgcctgatgtaaatgataaacagagtcaggcgataaatgacctgctggaggctatctatccaagtgtggacaaaagagaatacattattaaactggaacccatagaaactaaccagaacgcagtattccagtatatcagcaggacggacaatccaatcgaggtcaccgagagctctagtactcccgagcagactgaggtgcagatacaggaaacatcgacggagcagtctaaaactgttccggtgactgacacagaggttgaaacagttgaaccgccaccagtggaaatcgtcaccgacgaggttgccccaaccagcgatgagcagcctcaggaaagccaagcggatctggagacatccgataatagtgattttggacaccagctgatttgttgtctgtgccgcaaggagtttaacagtaggcggggagtgagaaggcatattaggaaggtccacaagaagaagatggaagaattgaagaaatacattgaaacacgcaaaaacccaaaccagtcaagcaagggcaggagcaagaacgttctcgtgccccttagccgctcttgccctgtttgttgcaagagttttgcaaccaaagccaacgtgcgcagacattttgatgaagtgcacagaggcctaaggcgtgactccattactcctgacatcgccacaaagcccggacagcctctgttcttggactccatcagtcctaagaaaagtttcaagaccaggaagcaaaaaagctccagcaaggccgaatacaatctgaccgcttgcaagtgcctgttgtgtaagagaaagtactcatcgcaaataatgctcaagcggcacatgcagattgtccacaaaatcacgctctccggaacgaactccaagcgcgagaaggggcctaacaatacggcaaattctagtgaaattaaggtgaaagtggaaccggctgatagcgtcgagtcctctccaccctcaatcactcattcaccacaaaatgagctgaaaggcacgaaccattcaaacgagaagaaaaacacacccgctgcccagaagaataaggtgaaacaggatagcgaaagccccaaatctaccagtcccagtgccgctggcggacagcaaaagaccaggaagcctaagttgtccgctggattcgacttcaagcagttgtactgcaagttgtgtaaaagacagtttacatccaagcagaatcttacaaagcacatcgagctgcatacagatggaaataatatctacgtgaaattctacaagtgccccctgtgcacttacgaaaccagaaggaaaagggatgtaatcagacacattacagtagtgcacaagaaatcgagccgatatctgggcaaaatcaccgccagtttagaaataagggcaataaagaagccaatagatttcgtgctgaacaaggtggctaagcggggacccagccgcgacgaagctaagcattcagactccaagcatgacggaactagcaattcaccgagtaaaaagtacgaggtcgcagatgtaggtatagaggtcaaggtgaccaagaacttttcactccaccgatgcaataagtgcggcaaggcattcgccaaaaaaacctatttagagcatcataagaagactcataaggcgaatgcatctaactcacctgaaggcaataaaaccaaaggcaggtcgacgagatctaaagccttagtatag

SEQ ID NO: 270242 - DNA, 1995 bp, Artificial Sequence
  derived and/or modified sequence
atgcctctgcgggacaaatactgtcagaccgatcaccatcatcatgggtgctgcgaaccagtctacattctagagcctggtgatccgccactactgcaacagccattgcagactagtaaaagcgggatccagcagataattgagtgctttcggtccggaacaaagcagctcaaacatatacttctgaaggacgtggacactattttcgaatgcaaactttgccggagtttgtttcggggactgcccaacctgatcacccacaagaaattctactgtccaccatctctgcaaatggacgataatctgcccgatgtgaacgacaaacaatcacaagcaatcaatgatctgctggaggcaatttaccccagcgtggacaagagagaatatattatcaaacttgaaccaatcgagacaaaccagaatgcagtgttccagtatatatctagaaccgataatccaatagaggtgacagagtcctcctcgacgccagagcagacggaagtccaaattcaggagacctctacagagcaatccaaaactgtaccagtgacagacacagaagtggagacagtggagcctccgcctgttgaaatcgtcaccgacgaagtggctccaacatccgacgaacagccgcaggagagtcaggctgacctggaaaccagtgacaactccgattttgggcatcagctgatttgctgcctctgccggaaggaatttaatagccggagaggggtgaggagacatatcaggaaagtacataagaagaagatggaggagttgaagaagtatatcgagacccgtaaaaatcccaatcaaagctcgaaggggagaagcaaaaacgtgttggtcccgctatctcgctcctgccctgtttgctgcaaatcgttcgccactaaggcaaatgtgcgtaggcatttcgatgaggtgcaccgcggattgcgccgtgattctattaccccggacattgctactaagccaggccagcccttatttttggacagcatttctccaaagaaaagttttaagactaggaaacagaagtccagcagtaaagctgaatacaatttgaccgcatgtaaatgtcttctgtgcaaacggaaatattcatcacagattatgctgaaaaggcacatgcagatcgtacataaaattaccttaagcggcactaatagtaagcgggagaaagggcctaacaacactgctaactcctctgagattaaggtgaaagttgaacctgccgactcggttgagtcaagccctccgagtatcacccattcgcctcagaacgaactgaagggaactaaccacagtaacgaaaagaaaaatacccccgctgcacagaagaataaagtgaaacaagacagtgaatcccctaaatccaccagcccttcagcggctggaggccagcaaaagacgcgaaagcctaagctctcagctggattcgacttcaaacagttatattgcaaactctgtaagcggcaattcacttcaaagcagaacttgacaaagcacatcgaattacacaccgatggtaacaacatttatgtgaagttctacaagtgcccgctctgtacatacgagacccgaaggaagagggacgtgattcggcatataactgtggtccacaagaaatctagtcggtatttgggcaagattaccgctagcctggaaatccgagcaatcaaaaaacctattgattttgtgcttaacaaagtggctaaacgtggtccaagcagggacgaggccaaacatagcgacagcaagcacgatggcacttcaaatagcccatcaaagaaatacgaggtggcggatgtcggcatcgaggttaaagttaccaaaaactttagcctgcaccgttgcaacaagtgcggcaaggcctttgcaaaaaaaacctacctcgagcaccataaaaagacccacaaggctaatgcctccaactcaccggagggaaacaaaactaagggtcgctccactcgatccaaggccctagtatag

SEQ ID NO: 270243 - DNA, 1995 bp, Artificial Sequence
  derived and/or modified sequence
atgcctctgagggataagtactgccaaaccgatcaccatcatcatggctgctgcgagcccgtgtatatcctggagcctggagatcccccactgctgcaacagccactgcaaaccagtaagtccgggatccaacagatcattgaatgtttcagatccggaaccaagcagctcaaacacatccttctgaaagacgtggacacgatttttgagtgcaagttgtgcagatctctgtttcgaggcctgcctaacctgatcacccacaaaaagttttattgtccaccctcattgcaaatggacgataatctcccggatgtgaatgacaagcagagccaagccattaacgacctcctagaagctatctatccgtccgtggataagagagaatacataattaaactggagccgatcgaaacaaaccagaatgccgtgttccagtacatcagcagaaccgacaatccaatcgaggtgactgagagctcaagcaccccggaacagactgaagtccagatccaggaaacaagtaccgaacagtccaagacggtgccagtgactgatacagaggttgagacggtcgagccgccaccagtagagatcgtgaccgacgaagttgcgcctacttctgacgaacagccccaggaatctcaagccgacctcgagacatccgacaattctgatttcggacaccaactcatttgttgtctttgcagaaaagaattcaattctaggcggggagtgcgaaggcatatcagaaaggtccacaaaaaaaagatggaagagttgaagaagtacattgagacaagaaaaaacccaaaccagagctcaaaggggagatctaagaacgtcttagtcccccttagtcggagctgcccagtctgttgcaaaagtttcgccacaaaggccaatgttaggcgtcactttgacgaggtccacagggggctgcgacgtgactccattacccccgatatcgccaccaagcccggacagccactttttttagactcgatcagccccaaaaagtcgttcaagacccgaaaacagaagagcagcagtaaagctgagtataatctgaccgcttgtaaatgcttactttgtaagcgtaaatattcatctcagataatgctaaagcgccacatgcagattgtgcataagatcactctttccgggacgaactccaagcgtgagaaggggccaaataacaccgcaaattccagtgagattaaggtgaaagttgaacccgcagactcagttgagtcctctccacctagtattacccatagtccccagaacgaactcaaaggcactaatcatagcaacgagaagaaaaatacaccggctgctcagaaaaataaagtgaagcaagattcggaatccccaaagtctacaagtcccagtgcagcgggagggcagcagaaaacaagaaagccaaagctttccgcagggtttgactttaaacagctttactgcaaactgtgtaagaggcagtttacatcaaagcagaacctgacaaaacatatcgagctacacactgacggcaataacatatacgtcaaattctacaagtgcccactctgtacctacgagacgagaaggaagcgtgatgtgatacgtcacataacggtcgtccacaagaaatcttcccggtacctggggaaaatcaccgcaagcctggaaattcgggctatcaaaaagccaatcgactttgtgctcaataaggtagccaagaggggcccttcaagggatgaagccaagcattcagatagcaaacatgacgggacttcaaattcaccatcgaaaaagtacgaggtcgcagatgttggtatagaggtgaaggttacaaagaatttcagtctccacaggtgcaacaaatgtggtaaggcatttgccaagaaaacgtacctggagcatcacaaaaaaacccacaaggcgaacgcgtccaacagtcctgaaggcaataagaccaagggacgaagcaccagatctaaggctctcgtgtag

SEQ ID NO: 270244 - DNA, 729 bp, Artificial Sequence
  derived and/or modified sequence
atgccactgagggataaatattgtcagacagaccaccatcatcacgggtgttgcgaaccagtgtatatattggagcctggggatccccctctcctccaacagcccctgcagaccagcaagtccggcatccagcagatcatcgagtgctttagatccggcactaagcagctgaaacatatcctgttgaaagacgtcgacaccattttcgagtgtaaactgtgtcggtcactgtttcgtgggctacccaaccttattacccataagaaattctactgcccgccatcgctgcaaatggatgataatctccccgatgtgaacgacaagcaaagccaggcaatcaacgacctgctggaggccatttatcctagtgttgataagcgagagtacattattaagttggagccaatcgagactaaccagaacgccgtgttccaatacattagtcgcacagataacccgattgaggtcaccgagtcgtcttctactccagagcagactgaggtgcagattcaagagacctccaccgagcaaagtaagacagtccccgtaacggacacagaggtcgagactgtcgagcccccacctgtagagattgtgacagacgaagttgcgccaacctccgatgagcagccacaggagtcacaagccgaccttgagacctcagataattctgactttggccaccagttaatttgttgtctctgtcgcaaagagtttaacagccgctag

SEQ ID NO: 270245 - DNA, 393 bp, Artificial Sequence
  derived and/or modified sequence
atgcctctgcgcgataagtattgtcagacagaccaccaccatcacggctgctgcgagcctgtttatattctggagccaggcgacccaccgttattacaacagcctctacagacctccaagtctggcattcagcagatcatcgaatgttttagaagcggcacaaagcaactgaagcacattctattaaaagacgttgatacaatatttgagtgtaaactgtgtaggtctctgttccgcggactgcccaacttgattacacacaaaaagttctactgtcctccgagtttgcagatggatgataacctgcctgatgtgaacgataaacagtcccaggcgatcaacgacttgttagaagcaatttacccttccgtcgacaaacgagaatatatatag

SEQ ID NO: 270246 - DNA, 297 bp, Artificial Sequence
  derived and/or modified sequence
atgcccctgcgcgacaaatactgccaaactgatcatcaccaccatggctgctgcgagcccgtttatattcttgaacctggcgatcccccactgttgcaacagcctctccagacctcaaagtcaggcattcagcagattattgaatgttttaggtctggtactaaacaactgaagcatatccttctgaaggacgtcgacaccattttcgagtgtaagttatgcagaagtcttttccgcggtctgcccaacttgattacacataaaaaattctactgccctccaagcctgcagatgtag

SEQ ID NO: 270247 - DNA, 4203 bp, Artificial Sequence
  derived and/or modified sequence
tgtcgctgccggagagtctctgcttcccccttcctacgcgctccgcggcggtagctcgggctctccggaggagggggcgacagagtaaaagagaggctgacttaataaagtttcctgaaacaacaactaccaccgaaaaggcccaaggttgggggagacccccatttttctccgcccctctcctaaagcctgagggaccgttgcaggtggagcggcgctggtgggacccgggttgcggcggcagccgttgccccggcgagggaagcctcaggtcctgcccgctccggttccggctccttcggtggtggcggcggcagctgctgccgggcggttcctcctgtcaactgcctccgcccgcgcgcctcccgcctagccacacagcgcggaggacgccgtgagccgccgccgcagtcgtctcggcccgcggagggacgtggtgagctgtggcgcttccgcgtcagcgccggcggggactctttgggagcgcgtcgggcccgagtccgggttcccccgcgtggtcagcggaggctgcgccaggtggggcccgcagccgcctcccacgccaggctgtccccgcggccgcccggcctgccttccttccttccgcccgcccgccggcccgccctaagagttgaccacgccgcaatgaagagcttcttacagtgaaagcaaagtaggtcgagtccactgaaaatgcctttaagggacaaatactgtcagactgaccaccatcatcacggatgctgtgaaccagtttatatcctggaacctggagatcctcctttgttacagcaaccactacagacatccaaatctggtattcaacaaataattgagtgctttcgatcaggaactaaacaacttaagcatattttattaaaagatgtggacactatttttgaatgtaagttatgccgcagtctcttcagaggattaccaaatttaattacccataaaaaattctactgcccaccaagtctccagatggatgacaaccttcctgatgtaaatgataaacaaagccaagccataaatgatctcctagaagccatatatccaagtgtggacaaacgagaatatattattaagctagaacccatagaaactaatcaaaatgcagtatttcaatatatttcgaggactgataatcctattgaagtcacagagtcaagcagtactcctgaacaaaccgaagttcagatacaggaaactagcactgaacagtcaaaaacagtaccggttacagatacagaggtggaaactgtagagccccctcctgttgagattgttacagatgaagttgcacctacatctgatgaacaacctcaggagtcgcaggctgacttggaaacttctgacaattctgattttggtcaccagttgatatgttgtctttgtagaaaagaattcaattctagacgaggtgttcgccgtcacattcgaaaagtacacaagaaaaagatggaagaactaaaaaagtacattgaaacacgaaagaatccaaaccaatcctctaaaggacgcagtaagaatgttctagttccattaagtaggagttgtccagtatgttgtaaatcatttgctacaaaagcgaatgtaaggaggcattttgatgaagttcatagaggactaaggagggattcaattactcctgatatagcaacaaagcctgggcaacctttgttcctggattctatttctcctaaaaaatcttttaagactcgaaaacaaaagtcttcttcaaaggctgaatacaatttaactgcatgcaaatgcctcctttgcaagaggaaatatagttcacaaataatgcttaaaagacatatgcaaattgtccacaagataactctttctggaacaaactctaaaagagaaaaaggccctaataatactgccaacagttcagaaataaaagttaaagttgaaccagcagattctgtagaatcttcacccccttccattacccattctccacagaatgaattaaagggaacaaatcattcaaatgaaaaaaagaacacaccggcagcacagaaaaataaagttaaacaagactctgaaagccctaaatcaactagtccgtcggctgcaggtggccagcaaaaaaccagaaaaccaaaactttcagctggctttgactttaagcaactttactgtaaactttgtaaacgtcagtttacttccaaacagaacttgactaaacacatcgagttgcacacagatggaaataacatttatgttaaattctacaagtgtcctctttgcacttatgaaactcgtcggaaacgtgatgtgatacgacatataactgtggttcataaaaagtcatctcgttatcttgggaaaataacagccagtttagagatcagagctataaaaaagcctattgattttgttctaaataaagtggcaaaaagaggcccttcgagggatgaagcaaaacatagtgattcaaaacatgatggcacttctaactctcctagtaaaaagtatgaagtagctgacgtcggtattgaagtaaaagtcacaaaaaacttttctcttcacagatgcaataaatgtggaaaggcatttgccaaaaagacttaccttgaacatcataagaaaactcataaggcaaatgcttccaattcacctgaaggaaacaaaaccaaaggccgaagtacaagatctaaggctcttgtctgataacttcaagtgatgtacgaaaaggtttggagttcatttttgtggaaagactttaaattggtgttagaaccactaaacatcttcaaatggtactatgaggaaaaaaagaaaaacatttttctaaatattcaactataactgctgttttctgactaaaataaccatctaaccacttgtttctaaggcactgcctattccagcactttcaagtagctgtgatattacatgttgtcatcacagtccatcagctatccacccttgaccttgtgcatttggtcgacagtttctacaaaaatgttacaaattttgttttctaaacaatttgttgattaagtgatcaacaacctgaagaaaatatcaatttttaattgacaaagactttatatcttagtgattttagttttgtttctctttatttggcaacattttcatctgaattgtatagatatatgattttctagtgagtgtatgttaggaacaaaagacaaaatagtatcaacacattataaatatttagcttactaaatatttgtaattatttttacatccatttatttctagcttgttctccagcacttcagtgtttgaaagtttcatcctaaaatatatactacaggaaagctgcagttcattttcatgcatggatcattacatttttcacttgtaaatgtaggtttttatgaaaattaaacattcccctatttttctttaaattttatacaaagcactttaatgatagatgcaaccttatttttcagttcctatttttttaaagaccacacatttactaatgttaatatgaaggtaataaatagcttactgatattttatggatgcagacaatccatgcacaaccacttcttatgatactagtttatttccttaaatattgctacaaaaggaagatgcgggtgtaagccctgatttttttttctcccaagaaaaatcttaaaggaccactttagataatatttgattcctactgtaaaatttagaaaatgatgaattcttgtccatttttgtaatcaagattttaggaaaaacagaagtacatctatctttatgaaattttgggcaggtttttgtgtatcaatattttgtacttttagggaatattttattttttagttatttgtgtcaaattataattataaaaggtacagcagaaaatataccatgtttttatataggttcacacctgtacttaggagggaccctgtccatctatatactttttgtataaaattttaaaatgttaaagatccacaaggtcttaataaaatgattctatagctagaaaaacatttaccttcccagtgctttgcactaaaatatactgtgaaaggaaactagaaagactgtaactattgctggaaatgttctatattgaatgtacatgctcttgttggaaaaatgtactatatgtgatggaaataaaccagaatcgaagttatttcagctaaatgtgcttcagcaaaggtgcattggttgaaacttaaatgttttattatcaaa

SEQ ID NO: 270248 - DNA, 2375 bp, Artificial Sequence
  derived and/or modified sequence
cggttcctcctgtcaactgcctccgcccgcgcgcctcccgcctagccacacagcgcggaggacgccgtgagccgccgccgcagtcgtctcggcccgcggagggacgtgccacgccgcaatgaagagcttcttacagtgaaagcaaagtaggtcgagtccactgaaaatgcctttaagggacaaatactgtcagactgaccaccatcatcacggatgctgtgaaccagtttatatcctggaacctggagatcctcctttgttacagcaaccactacagacatccaaatctggtattcaacaaataattgagtgctttcgatcaggaactaaacaacttaagcatattttattaaaagatgtggacactatttttgaatgtaagttatgccgcagtctcttcagaggattaccaaatttaattacccataaaaaattctactgcccaccaagtctccagatggatgacaaccttcctgatgtaaatgataaacaaagccaagccataaatgatctcctagaagccatatatccaagtgtggacaaacgagaatatattattaagctagaacccatagaaactaatcaaaatgcagtatttcaatatatttcgaggactgataatcctattgaagtcacagagtcaagcagtactcctgaacaaaccgaagttcagatacaggaaactagcactgaacagtcaaaaacagtaccggttacagatacagaggtggaaactgtagagccccctcctgttgagattgttacagatgaagttgcacctacatctgatgaacaacctcaggagtcgcaggctgacttggaaacttctgacaattctgattttggtcaccagttgatatgttgtctttgtagaaaagaattcaattctagacgaggtgttcgccgtcacattcgaaaagtacacaagaaaaagatggaagaactaaaaaagtacattgaaacacgaaagaatccaaaccaatcctctaaaggacgcagtaagaatgttctagttccattaagtaggagttgtccagtatgttgtaaatcatttgctacaaaagcgaatgtaaggaggcattttgatgaagttcatagaggactaaggagggattcaattactcctgatatagcaacaaagcctgggcaacctttgttcctggattctatttctcctaaaaaatcttttaagactcgaaaacaaaagtcttcttcaaaggctgaatacaatttaactgcatgcaaatgcctcctttgcaagaggaaatatagttcacaaataatgcttaaaagacatatgcaaattgtccacaagataactctttctggaacaaactctaaaagagaaaaaggccctaataatactgccaacagttcagaaataaaagttaaagttgaaccagcagattctgtagaatcttcacccccttccattacccattctccacagaatgaattaaagggaacaaatcattcaaatgaaaaaaagaacacaccggcagcacagaaaaataaagttaaacaagactctgaaagccctaaatcaactagtccgtcggctgcaggtggccagcaaaaaaccagaaaaccaaaactttcagctggctttgactttaagcaactttactgtaaactttgtaaacgtcagtttacttccaaacagaacttgactaaacacatcgagttgcacacagatggaaataacatttatgttaaattctacaagtgtcctctttgcacttatgaaactcgtcggaaacgtgatgtgatacgacatataactgtggttcataaaaagtcatctcgttatcttgggaaaataacagccagtttagagatcagagctataaaaaagcctattgattttgttctaaataaagtggcaaaaagaggcccttcgagggatgaagcaaaacatagtgattcaaaacatgatggcacttctaactctcctagtaaaaagtatgaagtagctgacgtcggtattgaagtaaaagtcacaaaaaacttttctcttcacagatgcaataaatgtggaaaggcatttgccaaaaagacttaccttgaacatcataagaaaactcataaggcaaatgcttccaattcacctgaaggaaacaaaaccaaaggccgaagtacaagatctaaggctcttgtctgataacttcaagtgatgtacgaaaaggtttggagttcatttttgtggaaagactttaaattggtgttagaaccactaaacatcttcaaatggtactatgaggaaaaaaagaaaaacatttttctaaatattcaactataactgctgttttctgactaaaataaccatctaaccacttgtttctaaggcactgcctattccagcactttcaagtagc

SEQ ID NO: 270249 - DNA, 4358 bp, Artificial Sequence
  derived and/or modified sequence
cgctgccggagagtctctgcttcccccttcctacgcgctccgcggcggtagctcgggctctccggaggagggggcgacagagtaaaagagaggctgacttaataaagtttcctgaaacaacaactaccaccgaaaaggcccaaggttgggggagacccccatttttctccgcccctctcctaaagcctgagggaccgttgcaggtggagcggcgctggtgggacccgggttgcggcggcagccgttgccccggcgagggaagcctcaggtcctgcccgctccggttccggctccttcggtggtggcggcggcagctgctgccgggcggttcctcctgtcaactgcctccgcccgcgcgcctcccgcctagccacacagcgcggaggacgccgtgagccgccgccgcagtcgtctcggcccgcggagggacgtggtgagctgtggcgcttccgcgtcagcgccggcggggactctttgggagcgcgtcgggcccgagtccgggttcccccgcgtggtcagcggaggctgcgccagccacgccgcaatgaagagcttcttacagtgaaagcaaagtaggtcgagtccactgaaaatgcctttaagggacaaatactgtcagactgaccaccatcatcacggatgctgtgaaccagtttatatcctggaacctggagatcctcctttgttacagcaaccactacagacatccaaatctggtattcaacaaataattgagtgctttcgatcaggaactaaacaacttaagcatattttattaaaagatgtggacactatttttgaatgtaagttatgccgcagtctcttcagaggattaccaaatttaattacccataaaaaattctactgcccaccaagtctccagatggatgacaaccttcctgatgtaaatgataaacaaagccaagccataaatgatctcctagaagccatatatccaagtgtggacaaacgagaatatattattaagctagaacccatagaaactaatcaaaatgcagtatttcaatatatttcgaggactgataatcctattgaagtcacagagtcaagcagtactcctgaacaaaccgaagttcagatacaggaaactagcactgaacagtcaaaaacagtaccggttacagatacagaggtggaaactgtagagccccctcctgttgagattgttacagatgaagttgcacctacatctgatgaacaacctcaggagtcgcaggctgacttggaaacttctgacaattctgattttggtcaccagttgatatgttgtctttgtagaaaagaattcaattctagacgaggtgttcgccgtcacattcgaaaagtacacaagaaaaagatggaagaactaaaaaagtacattgaaacacgaaagaatccaaaccaatcctctaaaggacgcagtaagaatgttctagttccattaagtaggagttgtccagtatgttgtaaatcatttgctacaaaagcgaatgtaaggaggcattttgatgaagttcatagaggactaaggagggattcaattactcctgatatagcaacaaagcctgggcaacctttgttcctggattctatttctcctaaaaaatcttttaagactcgaaaacaaaagtcttcttcaaaggctgaatacaatttaactgcatgcaaatgcctcctttgcaagaggaaatatagttcacaaataatgcttaaaagacatatgcaaattgtccacaagataactctttctggaacaaactctaaaagagaaaaaggccctaataatactgccaacagttcagaaataaaagttaaagttgaaccagcagattctgtagaatcttcacccccttccattacccattctccacagaatgaattaaagggaacaaatcattcaaatgaaaaaaagaacacaccggcagcacagaaaaataaagttaaacaagactctgaaagccctaaatcaactagtccgtcggctgcaggtggccagcaaaaaaccagaaaaccaaaactttcagctggctttgactttaagcaactttactgtaaactttgtaaacgtcagtttacttccaaacagaacttgactaaacacatcgagttgcacacagatggaaataacatttatgttaaattctacaagtgtcctctttgcacttatgaaactcgtcggaaacgtgatgtgatacgacatataactgtggttcataaaaagtcatctcgttatcttgggaaaataacagccagtttagagatcagagctataaaaaagcctattgattttgttctaaataaagtggcaaaaagaggcccttcgagggatgaagcaaaacatagtgattcaaaacatgatggcacttctaactctcctagtaaaaagtatgaagtagctgacgtcggtattgaagtaaaagtcacaaaaaacttttctcttcacagatgcaataaatgtggaaaggcatttgccaaaaagacttaccttgaacatcataagaaaactcataaggcaaatgcttccaattcacctgaaggaaacaaaaccaaaggccgaagtacaagatctaaggctcttgtctgataacttcaagtgatgtacgaaaaggtttggagttcatttttgtggaaagactttaaattggtgttagaaccactaaacatcttcaaatggtactatgaggaaaaaaagaaaaacatttttctaaatattcaactataactgctgttttctgactaaaataaccatctaaccacttgtttctaaggcactgcctattccagcactttcaagtagctgtgatattacatgttgtcatcacagtccatcagctatccacccttgaccttgtgcatttggtcgacagtttctacaaaaatgttacaaattttgttttctaaacaatttgttgattaagtgatcaacaacctgaagaaaatatcaatttttaattgacaaagactttatatcttagtgattttagttttgtttctctttatttggcaacattttcatctgaattgtatagatatatgattttctagtgagtgtatgttaggaacaaaagacaaaatagtatcaacacattataaatatttagcttactaaatatttgtaattatttttacatccatttatttctagcttgttctccagcacttcagtgtttgaaagtttcatcctaaaatatatactacaggaaagctgcagttcattttcatgcatggatcattacatttttcacttgtaaatgtaggtttttatgaaaattaaacattcccctatttttctttaaattttatacaaagcactttaatgatagatgcaaccttatttttcagttcctatttttttaaagaccacacatttactaatgttaatatgaaggtaataaatagcttactgatattttatggatgcagacaatccatgcacaaccacttcttatgatactagtttatttccttaaatattgctacaaaaggaagatgcgggtgtaagccctgatttttttttctcccaagaaaaatcttaaaggaccactttagataatatttgattcctactgtaaaatttagaaaatgatgaattcttgtccatttttgtaatcaagattttaggaaaaacagaagtacatctatctttatgaaattttgggcaggtttttgtgtatcaatattttgtacttttagggaatattttattttttagttatttgtgtcaaattataattataaaaggtacagcagaaaatataccatgtttttatataggttcacacctgtacttaggagggaccctgtccatctatatactttttgtataaaattttaaaatgttaaagatccacaaggtcttaataaaatgattctatagctagaaaaacatttaccttcccagtgctttgcactaaaatatactgtgaaaggaaactagaaagactgtaactattgctggaaatgttctatattgaatgtacatgctcttgttggaaaaatgtactatatgtgatggaaataaaccagaatcgaagttatttcagctaaatgtgcttcagcaaaggtgcattggttgaaacttaaatgttttattatcaaatttaaacttattcagtgactatgagcagctacacttgaattatattctgatagttttatttctaagaaatagagtaataatttctctttaatttaaaaacagatttactttcccacatattgaaaatttgtacttatagatctaactttaataactaatagtataatatatttagggaactaaatgtgtaggtggtatttcatttataagccatcttcattagttgcacattattaaacctatatgtttgactttt

SEQ ID NO: 270250 - DNA, 955 bp, Artificial Sequence
  derived and/or modified sequence
gtccggggtcagtcagtcgctccctgtcgctgccggagagtctctgcttcccccttcctacgcgctccgcggcggtagctcgggctctccggaggagggggcgacagagtaaaagagaggctgacttaataaagtttcctgaaacaacaactaccaccgaaaaggcccaagccacgccgcaatgaagagcttcttacagtgaaagcaaagtaggtcgagtccactgaaaatgcctttaagggacaaatactgtcagactgaccaccatcatcacggatgctgtgaaccagtttatatcctggaacctggagatcctcctttgttacagcaaccactacagacatccaaatctggtattcaacaaataattgagtgctttcgatcaggaactaaacaacttaagcatattttattaaaagatgtggacactatttttgaatgtaagttatgccgcagtctcttcagaggattaccaaatttaattacccataaaaaattctactgcccaccaagtctccagatggatgacaaccttcctgatgtaaatgataaacaaagccaagccataaatgatctcctagaagccatatatccaagtgtggacaaacgagaatatattattaagctagaacccatagaaactaatcaaaatgcagtatttcaatatatttcgaggactgataatcctattgaagtcacagagtcaagcagtactcctgaacaaaccgaagttcagatacaggaaactagcactgaacagtcaaaaacagtaccggttacagatacagaggtggaaactgtagagccccctcctgttgagattgttacagatgaagttgcacctacatctgatgaacaacctcaggagtcgcaggctgacttggaaacttctgacaattctgattttggtcaccagttgatatgttgtctttgtagaaaagaattcaattctaga

SEQ ID NO: 270251 - DNA, 502 bp, Artificial Sequence
  derived and/or modified sequence
cggccgcccggcctgccttccttccttccgcccgcccgccggcccgccctaagaccacgccgcaatgaagagcttcttacagtgaaagcaaagtaggtcgagtccactgaaaatgcctttaagggacaaatactgtcagactgaccaccatcatcacggatgctgtgaaccagtttatatcctggaacctggagatcctcctttgttacagcaaccactacagacatccaaatctggtattcaacaaataattgagtgctttcgatcaggaactaaacaacttaagcatattttattaaaagatgtggacactatttttgaatgtaagttatgccgcagtctcttcagaggattaccaaatttaattacccataaaaaattctactgcccaccaagtctccagatggatgacaaccttcctgatgtaaatgataaacaaagccaagccataaatgatctcctagaagccatatatccaagtgtggacaaacgagaatatatt

SEQ ID NO: 270252 - DNA, 410 bp, Artificial Sequence
  derived and/or modified sequence
tcaagcaagccacctgaaaaagatcacaagctgaaaaaagataaggtgtatgtaaaccacgccgcaatgaagagcttcttacagtgaaagcaaagtaggtcgagtccactgaaaatgcctttaagggacaaatactgtcagactgaccaccatcatcacggatgctgtgaaccagtttatatcctggaacctggagatcctcctttgttacagcaaccactacagacatccaaatctggtattcaacaaataattgagtgctttcgatcaggaactaaacaacttaagcatattttattaaaagatgtggacactatttttgaatgtaagttatgccgcagtctcttcagaggattaccaaatttaattacccataaaaaattctactgcccaccaagtctccagatgga

SEQ ID NO: 270253 - protein, 179 aa, Artificial Sequence
  derived and/or modified sequence
MKEGDPAIYAERAGYDKLWHPACFVCSTCHELLVDMIYFWKNEKLYCGRHYCDSEKPRCAGCDELIFSNEYTQAENQNWHLKHFCCFDCDSILAGEIYVMVNDKPVCKPCYVKNHAVVCQGCHNAIDPEVQRVTYNNFSWHASTECFLCSCCSKCLIGQKFMPVEGMVFCSVECKKRMS

SEQ ID NO: 270254 - DNA, 540 bp, Artificial Sequence
  derived and/or modified sequence
atgaaggagggcgaccccgccatctacgccgagagagccggctacgacaagctgtggcaccccgcctgcttcgtgtgcagcacctgccacgagctgctggtggacatgatctacttctggaagaacgagaagctgtactgcggcagacactactgcgacagcgagaagcccagatgcgccggctgcgacgagctgatcttcagcaacgagtacacccaggccgagaaccagaactggcacctgaagcacttctgctgcttcgactgcgacagcatcctggccggcgagatctacgtgatggtgaacgacaagcccgtgtgcaagccctgctacgtgaagaaccacgccgtggtgtgccagggctgccacaacgccatcgaccccgaggtgcagagagtgacctacaacaacttcagctggcacgccagcaccgagtgcttcctgtgcagctgctgcagcaagtgcctgatcggccagaagttcatgcccgtggagggcatggtgttctgcagcgtggagtgcaagaagagaatgagctag

SEQ ID NO: 270255 - DNA, 540 bp, Artificial Sequence
  derived and/or modified sequence
atgaaggaaggtgaccctgctatctacgcagagagggccgggtacgacaagctgtggcatcccgcttgttttgtttgcagcacgtgccacgaactgctcgtggacatgatctatttttggaagaatgagaagttgtactgcgggagacactactgcgactcagaaaaacctagatgcgccggttgtgacgaactcatcttcagcaatgagtatacacaggcagagaatcaaaattggcacctcaaacatttctgttgtttcgactgtgactctatacttgcaggcgaaatctacgtcatggtaaatgataagcccgtttgcaaaccctgttacgtaaagaatcatgctgttgtatgccaggggtgccataacgcaattgaccctgaagtccagagggtcacgtataacaatttctcatggcacgcatctacagagtgctttctgtgttcttgttgcagtaagtgcttaattggacaaaaattcatgcccgtcgagggaatggttttctgcagtgttgaatgtaagaaacggatgagttag

SEQ ID NO: 270256 - DNA, 540 bp, Artificial Sequence
  derived and/or modified sequence
atgaaggagggggaccctgccatctatgcagagagagctggctatgacaagctgtggcacccagcctgctttgtgtgcagcacctgccacgagctgctggtggacatgatctacttctggaagaatgagaagctgtactgcggccgccactactgtgacagcgagaagccccgctgtgccggctgtgatgagctgatcttcagcaatgagtacacccaggccgagaaccagaactggcacctgaagcacttctgctgctttgactgtgacagcatcctggccggggagatctacgtgatggtgaatgacaagcctgtgtgcaagccctgctacgtgaagaaccacgctgtggtgtgccagggctgccacaatgccatcgaccctgaggtgcagagggtgacctacaacaacttctcctggcacgccagcacagagtgcttcctgtgcagctgctgcagcaagtgcctgattggccagaagttcatgcctgtggagggcatggtgttctgcagcgtggagtgcaagaagaggatgtcctag

SEQ ID NO: 270257 - DNA, 540 bp, Artificial Sequence
  derived and/or modified sequence
atgaaggagggcgaccccgccatctacgccgagcgggccggctacgataaactctggcatcctgcttgcttcgtctgctctacatgtcacgagcttttagtggatatgatctacttttggaaaaatgaaaagctttactgtggacgtcattattgtgacagcgagaagcccagatgcgctggatgcgacgaacttatattttcaaatgaatacactcaggctgagaaccagaactggcacctcaagcacttttgttgtttcgattgcgattccattctcgctggagagatctatgtcatggtgaacgacaagcccgtttgtaagccctgctacgttaagaaccacgcggtcgtgtgtcaggggtgccataacgccatcgatcccgaagtgcaacgagtgacttacaataatttcagctggcacgccagtactgagtgctttttgtgtagttgctgttcaaaatgcttgataggccaaaaatttatgcctgtggaggggatggtgttttgttccgtcgaatgcaagaaaagaatgtcgtag

SEQ ID NO: 270258 - DNA, 540 bp, Artificial Sequence
  derived and/or modified sequence
atgaaagaaggagatcctgccatttatgccgagcgcgcaggctacgataagttatggcacccagcctgctttgtatgtagcacctgccacgaattgctggtggacatgatctatttttggaaaaatgaaaagctctactgtggcaggcactattgcgacagcgagaaacccaggtgtgccggatgcgatgagctcatcttttcaaacgaatacacgcaggccgagaaccagaactggcatttgaagcatttttgctgttttgactgcgactccattctggcaggagagatctatgtaatggtgaacgacaagcctgtctgcaaaccatgttatgtgaagaatcatgccgtcgtgtgccagggctgccacaacgctatagatccggaggtgcagcgggttacctataacaacttcagctggcacgcatcaaccgagtgttttctctgcagctgttgttccaagtgtctgatcggacaaaagttcatgcctgtggaagggatggttttctgctccgtggagtgcaaaaaaaggatgtcctag

SEQ ID NO: 270259 - DNA, 1022 bp, Artificial Sequence
  derived and/or modified sequence
actgggcggcggaagttcgacggcgccgggcgagtggctgttgagcggcgccgcgggagttccgcaggtttcccgtgttcgcagcggagccggaggccagctgaacccggccgtgggatcccggataggaggaggaggggacccataggacgcgttaacatggacctggaaaacaaagtgaagaagatgggcttaggtcacgagcaaggatttggagccccttgtttaaaatgcaaagaaaaatgtgaaggattcgaactgcacttctggagtcctgctattgctgcaaactgagtatgaaagaaggtgacccagccatctatgccgaaagggctggctatgataaactgtggcacccagcttgttttgtctgcagcacctgccatgaactcctggttgacatgatttatttttggaagaatgagaagctatactgtggcagacattactgtgacagcgagaaaccccgatgtgctggctgtgacgagctgatattcagcaatgagtatacccaggcagaaaaccagaattggcacctgaaacacttctgctgctttgactgtgatagcattctagctggggagatatacgtgatggtcaatgacaagcccgtgtgcaagccctgctatgtgaagaatcacgctgtggtgtgtcaaggatgccacaatgccatcgacccagaagtgcagcgggtgacctataacaatttcagctggcatgcatccacagagtgctttctgtgctcttgctgcagcaaatgcctcattgggcagaagttcatgccagtagaagggatggttttctgttcagtggaatgtaagaagaggatgtcttaggaggagggcacccagaagtatcgagccatagctatccaaagtggtctgcatttctactgtaaaatgcaatttgaaaaaaataaaacgcaaaaaaagaaactgtaaaggaaaccaagagattttgtttaatttttttggccattttttcttcatcaattttttttcggtctcaacttttaaacttgg

SEQ ID NO: 270260 - protein, 600 aa, Artificial Sequence
  derived and/or modified sequence
MARGSAVAWAALGPLLWGCALGLQGGMLYPQESPSRECKELDGLWSFRADFSDNRRRGFEEQWYRRPLWESGPTVDMPVPSSFNDISQDWRLRHFVGWVWYEREVILPERWTQDLRTRVVLRIGSAHSYAIVWVNGVDTLEHEGGYLPFEADISNLVQVGPLPSRLRITIAINNTLTPTTLPPGTIQYLTDTSKYPKGYFVQNTYFDFFNYAGLQRSVLLYTTPTTYIDDITVTTSVEQDSGLVNYQISVKGSNLFKLEVRLLDAENKVVANGTGTQGQLKVPGVSLWWPYLMHERPAYLYSLEIRGKGFDWPLLVKDFNLLRWLGANAFRTSHYPYAEEVMQMCDRYGIVVIDECPGVGLALPQFFNNVSLHHHMQVMEEVVRRDKNHPAVVMWSVANEPASHLESAGYYLKMVIAHTKSLDPSRPVTFVSNSNYAADKGAPYVDVICLNSYYSWYHDYGHLELIQLQLATQFENWYKKYQKPIIQSEYGAETIAGFHQDPPLMFTEEYQKSLLEQYHLGLDQKRRKYVVGELIWNFADFMTEQSPTRVLGNKKGIFTRQRQPKSAAFLLRERYWKIANETRYPHSVAKSQCLENSLFT

SEQ ID NO: 270261 - DNA, 1803 bp, Artificial Sequence
  derived and/or modified sequence
atggctcgggggagcgccgtggcatgggccgccctcgggcccctcctgtggggctgtgcattgggcttgcaaggcggtatgctttacccacaggagtctccctcccgggaatgtaaagaactcgatggactttggtctttccgagccgatttctccgacaatcggcgcaggggttttgaagaacagtggtacaggcggcctctctgggagtcaggacctaccgtggacatgcccgtcccctccagctttaacgacatatcccaggactggaggctgaggcattttgtggggtgggtgtggtacgagcgtgaggtgatcctgccagagcggtggacccaagaccttcgtaccagggtggtactgcggatagggtcagcccattcatatgccatcgtctgggtaaacggagttgacactctggagcatgagggcgggtacctcccctttgaggctgacatttccaacctggtgcaagtagggccattacctagcaggctgaggatcaccatcgccatcaataacacactgacgcctactaccctgccccccggcactattcagtatttgaccgacactagcaagtatcccaaaggctactttgtgcaaaacacctacttcgactttttcaattatgccggtctgcagaggtccgtacttctttacaccactccgaccacctacatcgatgacattactgtgactacctcggttgagcaggacagcggcctggtgaactaccaaatcagcgttaaaggttccaatttatttaagcttgaggttcggctgctcgatgcagagaacaaagtagtggcgaacgggaccggcacacagggccagctcaaggtgcccggtgtatccctgtggtggccttatctgatgcatgaaaggcccgcttatctgtacagcctcgaaattcgcggaaaggggtttgactggccacttctggtgaaggacttcaatctcctgcggtggttgggcgctaatgctttccggacatcccactacccctatgcagaggaggtgatgcagatgtgcgatcgctatggcattgtggtgatagacgaatgtcctggggtcggactggctttgccccagttcttcaacaacgtctccctgcaccaccatatgcaagtcatggaggaggtggtgcggcgtgataaaaaccatcccgccgtggtcatgtggagcgtggccaacgagcctgctagccatctagaatccgctgggtattatctgaagatggttatcgcccacaccaaatccctggacccttcgaggccggtgacatttgtgtcgaattccaactatgccgctgacaagggtgctccgtacgtggacgtgatttgtctcaacagttactattcttggtaccatgactatgggcacttagagctgatacaactccagcttgctactcagtttgagaactggtataagaagtaccagaaaccaatcattcagtcagagtacggggctgaaacaatcgctggattccaccaggaccctccactcatgttcactgaagaatatcagaagagtcttttggaacagtatcatctcggactggaccagaaaagaaggaagtatgtcgtgggcgaacttatttggaactttgccgactttatgaccgagcagagtcccacccgggtgcttggaaacaaaaaagggatattcacgcggcagaggcaaccaaaatcagccgcattcctgctgcgggagcggtactggaagatcgcaaatgaaacccgctatccgcatagcgtggctaagagccagtgtctggagaatagcctctttacctag

SEQ ID NO: 270262 - DNA, 2027 bp, Artificial Sequence
  derived and/or modified sequence
acggtggccgagcgggggaccgggaagcatggcccgggggtcggcggttgcctgggcggcgctcgggccgttgttgtggggctgcgcgctggggctgcagggcgggatgctgtacccccaggagagcccgtcgcgggagtgcaaggagctggacggcctctggagcttccgcgccgacttctctgacaaccgacgccggggcttcgaggagcagtggtaccggcggccgctgtgggagtcaggccccaccgtggacatgccagttccctccagcttcaatgacatcagccaggactggcgtctgcggcattttgtcggctgggtgtggtacgaacgggaggtgatcctgccggagcgatggacccaggacctgcgcacaagagtggtgctgaggattggcagtgcccattcctatgccatcgtgtgggtgaatggggtcgacacgctagagcatgaggggggctacctccccttcgaggccgacatcagcaacctggtccaggtggggcccctgccctcccggctccgaatcactatcgccatcaacaacacactcacccccaccaccctgccaccagggaccatccaatacctgactgacacctccaagtatcccaagggttactttgtccagaacacatattttgactttttcaactacgctggactgcagcggtctgtacttctgtacacgacacccaccacctacatcgatgacatcaccgtcaccaccagcgtggagcaagacagtgggctggtgaattaccagatctctgtcaagggcagtaacctgttcaagttggaagtgcgtcttttggatgcagaaaacaaagtcgtggcgaatgggactgggacccagggccaacttaaggtgccaggtgtcagcctctggtggccgtacctgatgcacgaacgccctgcctatctgtattcattggagatccgagggaagggcttcgactggccgctgctggtgaaggacttcaacctgcttcgctggcttggtgccaacgctttccgtaccagccactacccctatgcagaggaagtgatgcagatgtgtgaccgctatgggattgtggtcatcgatgagtgtcccggcgtgggcctggcgctgccgcagttcttcaacaacgtttctctgcatcaccacatgcaggtgatggaagaagtggtgcgtagggacaagaaccaccccgcggtcgtgatgtggtctgtggccaacgagcctgcgtcccacctagaatctgctggctactacttgaagatggtgatcgctcacaccaaatccttggacccctcccggcctgtgacctttgtgagcaactctaactatgcagcagacaagggggctccgtatgtggatgtgatctgtttgaacagctactactcttggtatcacgactacgggcacctggagttgattcagctgcagctggccacccagtttgagaactggtataagaagtatcagaagcccattattcagagcgagtatggagcagaaacgattgcagggtttcaccaggatccacctctgatgttcactgaagagtaccagaaaagtctgctagagcagtaccatctgggtctggatcaaaaacgcagaaaatacgtggttggagagctcatttggaattttgccgatttcatgactgaacagtcaccgacgagagtgctggggaataaaaaggggatcttcactcggcagagacaaccaaaaagtgcagcgttccttttgcgagagagatactggaagattgccaatgaaaccaggtatccccactcagtagccaagtcacaatgtttggaaaacagcctgtttacttgagcaagactgataccacctgcgtgtcccttcctccccgagtcagggcgacttccacagcagcagaacaagtgcctcctggactgttcacggcagaccagaacgtttctggcctgggttttgtggtcatctattctagcagggaacactaaaggtggaaataaaagattttctattatggaaataaagagttggcatg

SEQ ID NO: 270263 - DNA, 1803 bp, Artificial Sequence
  derived and/or modified sequence
atggcccggggcagcgctgtggcctgggccgccctgggccccctgctgtggggctgtgccctgggcctgcagggcggcatgctgtacccccaggagagccccagccgggagtgcaaggagctggatggcctgtggagcttccgggctgacttcagtgacaacagaagaagaggatttgaggagcagtggtacagaagacccctgtgggagagcggccccaccgtggacatgcctgtgcccagcagcttcaatgacatcagccaggactggaggctgcggcactttgtgggctgggtgtggtatgagcgggaggtgatcctgcctgagcgctggacccaggacctgcggaccagggtggtgctgagaattggcagcgcccacagctatgccatcgtgtgggtgaatggagtggacaccctggagcacgagggcggctacctgccctttgaagctgacatcagcaacctggtgcaggtgggccccctgcccagccggctgcgcatcaccatcgccatcaacaacaccctgacccccaccaccctgcccccaggcaccatccagtacctgacagacaccagcaagtaccccaagggctactttgtgcagaacacctactttgacttcttcaactatgccggcctgcagaggtctgtgctgctgtacaccacccccaccacctacattgatgacatcaccgtgaccacctctgtggagcaggacagcggcctggtgaactaccagatctctgtgaagggcagcaacctcttcaagctggaggtgcggctgctggatgctgagaacaaggtggtggccaacggcaccggcacccagggccagctgaaggtgcctggggtgtccctgtggtggccctacctgatgcatgagaggcctgcctacctgtacagcctggagatccggggcaagggctttgactggcccctgctggtgaaggacttcaacctgctgcgctggctgggcgccaatgccttccgcaccagccactacccctatgcagaggaggtgatgcagatgtgtgacagatatggcatcgtggtgattgatgaatgtcctggggtgggcctggccctgccccagttcttcaacaacgtgtccctgcaccaccacatgcaggtgatggaggaggtggtgcggcgggacaagaaccaccctgctgtggtgatgtggagcgtggccaatgaaccagccagccacctggagagcgctggctactacctgaagatggtgattgcccacaccaagagcctggaccccagcaggcctgtgacctttgtgagcaacagcaactatgctgctgacaagggggccccctacgtggatgtgatctgcctgaacagctactacagctggtaccatgactatggccacctggagctgatccagctgcagctggccacccagtttgagaactggtacaagaagtaccagaagcccatcatccagagtgaatatggagctgagaccatcgccggcttccaccaggacccccccctgatgttcacagaggagtaccagaagagcctgctggagcagtaccacctgggcctggaccagaagaggaggaaatatgtggtgggggagctgatctggaactttgctgacttcatgacagagcagagccccaccagggtgctgggcaacaagaagggcatcttcacccggcagaggcagcccaagtctgctgccttcctgctgcgggagcgctactggaagatcgccaatgagacccgctacccccacagcgtggccaagagccagtgcctggagaacagcctcttcacctag

SEQ ID NO: 270264 - DNA, 1803 bp, Artificial Sequence
  derived and/or modified sequence
atggcccggggcagcgccgtggcctgggccgccctgggccccctgttgtggggctgcgctctaggcttacagggtggaatgctttacccccaagaaagtccatccagggagtgcaaggagctggacggcctctggagtttccgagccgatttctcagataaccggcggcgcgggtttgaagagcagtggtaccggaggcctctgtgggagagcggccccaccgtagacatgcccgtcccctcttccttcaatgatatttctcaagactggcgtttacgtcacttcgtcgggtgggtctggtacgagcgggaagttatcctccccgagcgctggacacaggaccttcgtactcgggtagtcctcaggatcggcagcgctcatagctacgcgatcgtgtgggtgaacggcgtcgacactctggaacacgaaggcggctaccttccgtttgaagcagatatttcaaacctggtacaggtaggccctctcccttctcgcctccgcataacgattgccattaacaataccttaacgccgaccactctgcctccaggaaccattcagtacctgaccgatacgtctaagtatcccaagggatacttcgttcagaacacttacttcgacttcttcaattacgcaggattgcagagaagcgtgctgctgtataccacacccaccacctacatcgacgacatcactgtgaccacctctgtcgagcaggacagtggcctggttaattatcagatcagtgtcaagggctctaatctttttaaactggaggtgcgcctgttagacgccgaaaataaggtggtagcaaacggaacaggcacccaagggcagctcaaggtgcccggggtctcactctggtggccttacctgatgcatgaacgtcctgcctatctgtactcgcttgagatacggggcaaaggctttgattggcctctgctggtcaaggacttcaatctactgcggtggcttggcgcgaatgcatttagaacatctcactatccttatgctgaggaggttatgcagatgtgtgatagatacggcatcgtcgtaatcgacgaatgtcccggcgtgggccttgcccttcctcagtttttcaacaatgttagtctgcatcaccatatgcaggttatggaagaggtcgtgaggagagacaagaaccatccagccgttgtcatgtggtctgttgccaatgaacccgcctcacacctcgaatcagcgggttattacctgaagatggtcatcgcacatacaaagagtttagatccgtccaggcccgtaaccttcgtgtctaatagcaactacgccgctgataagggggcgccctatgtggacgtcatctgccttaactcctattactcctggtaccacgactatggccacttggagctcatacagctgcaactcgccacccagtttgagaattggtataagaagtaccagaagcccatcatacagagcgagtacggcgccgagactatcgccgggttccatcaagaccctcctctgatgttcaccgaggaataccagaagagccttctggaacaataccatctgggactcgaccagaagcgacgcaaatatgtggtgggagagctgatctggaatttcgccgacttcatgacagagcaaagccctacacgcgtactggggaacaaaaaagggatttttacaagacagagacagccaaaatcagccgccttcctgctcagagagcggtattggaagatcgcaaacgaaaccaggtatccacacagcgtggcgaagtcacaatgtctcgagaattctctttttacctag

SEQ ID NO: 270265 - DNA, 1803 bp, Artificial Sequence
  derived and/or modified sequence
atggctaggggatcagccgtcgcttgggcggctctgggacccctgttatggggctgtgcactgggcctccagggtggtatgctgtatcctcaagagtctcctagtcgcgagtgtaaagaactcgatgggctatggtctttccgagccgacttcagtgacaatcgccgacgcggatttgaagagcagtggtaccggcgacctctctgggaatctggtccaacagtggacatgccagtgccttctagtttcaacgatatttctcaggattggcgtctcagacacttcgtaggttgggtctggtacgagagggaggttattttgcccgagcggtggactcaggacttacgcacaagggtagtgttgcgcatcggatccgcgcatagctacgccattgtgtgggtgaacggagtggatactcttgaacacgaaggtggctatctgcctttcgaggctgatattagtaaccttgtgcaggtggggcctctgccaagtcgcttgagaatcaccattgctatcaacaacacactgactccgacgactctccccccaggtacgattcagtatctaaccgacaccagcaagtatccaaagggatactttgtccagaatacttacttcgatttcttcaactatgccggtctacagcggagtgtcctcctctacaccactccaacaacatacatcgacgacattacagtcactacctctgtggaacaggatagtggcctcgtcaattaccagatttccgtcaagggctcaaacctctttaaactggaggtgaggctcctggacgccgagaacaaggtggtcgcaaatgggacaggtacacagggacaactgaaggtgcctggtgtttccttgtggtggccctacctgatgcacgagcgcccagcctatctgtacagcctggaaattagagggaaaggctttgattggcccttactcgtcaaggactttaatctcctgaggtggctcggcgctaacgcctttcgtacgtctcactatccctatgctgaggaggtgatgcagatgtgcgatcggtacggtattgttgtaatagacgagtgtcccggagtcgggctagcactgccccagttctttaataacgtctctctgcatcatcatatgcaagttatggaagaggtggttagacgagataaaaatcatcccgctgttgtcatgtggagcgtggccaatgagcccgcatctcaccttgagtctgcaggatactacctcaaaatggtgatcgcccacacaaagagccttgacccctcacgccctgtcaccttcgtctctaatagcaattatgccgcagataagggtgcaccctatgtggacgtgatctgcctgaatagctactattcttggtatcacgattacggtcatttggaacttatacagttacagctggcaacgcagtttgagaactggtataaaaaatatcagaagccaatcatacaaagcgagtacggtgctgagaccattgcaggcttccaccaggatccaccattaatgtttaccgaagaataccaaaagtctctgttggagcaatatcaccttggattagaccagaaacgacgaaaatatgttgtcggcgaactgatatggaattttgctgactttatgacggagcagtcccccacacgggttctgggcaacaaaaaggggatctttacaaggcagagacagccaaagagcgcagcctttctgttgcgggagcggtactggaaaattgcaaacgagactagatacccacactcggtagcaaagagccaatgcctggagaactccctctttacttag

SEQ ID NO: 270266 - DNA, 1803 bp, Artificial Sequence
  derived and/or modified sequence
atggccagaggcagcgccgtggcctgggccgccctgggccccctgctgtggggctgcgccctgggcctgcagggcggcatgctgtacccccaggagagccccagcagagagtgcaaggagctggacggcctgtggagcttcagagccgacttcagcgacaacagaagaagaggcttcgaggagcagtggtacagaagacccctgtgggagagcggccccaccgtggacatgcccgtgcccagcagcttcaacgacatcagccaggactggagactgagacacttcgtgggctgggtgtggtacgagagagaggtgatcctgcccgagagatggacccaggacctgagaaccagagtggtgctgagaatcggcagcgcccacagctacgccatcgtgtgggtgaacggcgtggacaccctggagcacgagggcggctacctgcccttcgaggccgacatcagcaacctggtgcaggtgggccccctgcccagcagactgagaatcaccatcgccatcaacaacaccctgacccccaccaccctgccccccggcaccatccagtacctgaccgacaccagcaagtaccccaagggctacttcgtgcagaacacctacttcgacttcttcaactacgccggcctgcagagaagcgtgctgctgtacaccacccccaccacctacatcgacgacatcaccgtgaccaccagcgtggagcaggacagcggcctggtgaactaccagatcagcgtgaagggcagcaacctgttcaagctggaggtgagactgctggacgccgagaacaaggtggtggccaacggcaccggcacccagggccagctgaaggtgcccggcgtgagcctgtggtggccctacctgatgcacgagagacccgcctacctgtacagcctggagatcagaggcaagggcttcgactggcccctgctggtgaaggacttcaacctgctgagatggctgggcgccaacgccttcagaaccagccactacccctacgccgaggaggtgatgcagatgtgcgacagatacggcatcgtggtgatcgacgagtgccccggcgtgggcctggccctgccccagttcttcaacaacgtgagcctgcaccaccacatgcaggtgatggaggaggtggtgagaagagacaagaaccaccccgccgtggtgatgtggagcgtggccaacgagcccgccagccacctggagagcgccggctactacctgaagatggtgatcgcccacaccaagagcctggaccccagcagacccgtgaccttcgtgagcaacagcaactacgccgccgacaagggcgccccctacgtggacgtgatctgcctgaacagctactacagctggtaccacgactacggccacctggagctgatccagctgcagctggccacccagttcgagaactggtacaagaagtaccagaagcccatcatccagagcgagtacggcgccgagaccatcgccggcttccaccaggacccccccctgatgttcaccgaggagtaccagaagagcctgctggagcagtaccacctgggcctggaccagaagagaagaaagtacgtggtgggcgagctgatctggaacttcgccgacttcatgaccgagcagagccccaccagagtgctgggcaacaagaagggcatcttcaccagacagagacagcccaagagcgccgccttcctgctgagagagagatactggaagatcgccaacgagaccagatacccccacagcgtggccaagagccagtgcctggagaacagcctgttcacctag

SEQ ID NO: 270267 - protein, 155 aa, Artificial Sequence
  derived and/or modified sequence
MVMAAKKGPGPGGGVSGGKAEAEAASEVWCRRVRELGGCSQAGNRHCFECAQRGVTYVDITVGSFVCTTCSGLLRGLNPPHRVKSISMTTFTEPEVVFLQSRGNEVCRKIWLGLFDARTSLVPDSRDPQKVKEFLQEKYEKKRWPDTFPRRLCQL

SEQ ID NO: 270268 - protein, 344 aa, Artificial Sequence
  derived and/or modified sequence
MGVATTLQPPTTSKTLQKQHLEAVGAYQYVLTFLFMGPFFSLLVFVLLFTSLWPFSVFYLVWLYVDWDTPNQGGRRSEWIRNRAIWRQLRDYYPVKLVKTAELPPDRNYVLGAHPHGIMCTGFLCNFSTESNGFSQLFPGLRPWLAVLAGLFYLPVYRDYIMSFGLCPVSRQSLDFILSQPQLGQAVVIMVGGAHEALYSVPGEHCLTLQKRKGFVRLALRHGASLVPVYSFGENDIFRLKAFATGSWQHWCQLTFKKLMGFSPCIFWGRGLFSATSWGLLPFAVPITTVGECPPPGGRPPAAAWASGIPRPPVSLSLQWAAPSPSPSASTPPRRKSITITPST

SEQ ID NO: 270269 - DNA, 1035 bp, Artificial Sequence
  derived and/or modified sequence
atgggcgtggccaccaccctgcagccccccaccaccagcaagaccctgcagaagcagcacctggaggccgtgggcgcctaccagtacgtgctgaccttcctgttcatgggccccttcttcagcctgctggtgttcgtgctgctgttcaccagcctgtggcccttcagcgtgttctacctggtgtggctgtacgtggactgggacacccccaaccagggcggcagaagaagcgagtggatcagaaacagagccatctggagacagctgagagactactaccccgtgaagctggtgaagaccgccgagctgccccccgacagaaactacgtgctgggcgcccacccccacggcatcatgtgcaccggcttcctgtgcaacttcagcaccgagagcaacggcttcagccagctgttccccggcctgagaccctggctggccgtgctggccggcctgttctacctgcccgtgtacagagactacatcatgagcttcggcctgtgccccgtgagcagacagagcctggacttcatcctgagccagccccagctgggccaggccgtggtgatcatggtgggcggcgcccacgaggccctgtacagcgtgcccggcgagcactgcctgaccctgcagaagagaaagggcttcgtgagactggccctgagacacggcgccagcctggtgcccgtgtacagcttcggcgagaacgacatcttcagactgaaggccttcgccaccggcagctggcagcactggtgccagctgaccttcaagaagctgatgggcttcagcccctgcatcttctggggcagaggcctgttcagcgccaccagctggggcctgctgcccttcgccgtgcccatcaccaccgtgggcgagtgccccccccccggcggcagaccccccgccgccgcctgggccagcggcatccccagaccccccgtgagcctgagcctgcagtgggccgcccccagccccagccccagcgccagcaccccccccagaagaaagagcatcaccatcacccccagcacctag

SEQ ID NO: 270270 - DNA, 1035 bp, Artificial Sequence
  derived and/or modified sequence
atgggagtggctaccactcttcagcctccaactactagcaaaaccctgcagaagcaacatctcgaggccgtgggcgcttaccagtatgtcctcacgttcctcttcatgggacctttcttctcattgcttgtcttcgtgctgctgttcacttccttgtggccgttttcggtcttctacctcgtgtggctgtatgtcgattgggatactccaaatcagggagggcgtcgttccgaatggatccgcaacagggcaatctggagacaactcagggattattatcctgtgaaacttgtaaaaactgccgaactcccccccgatagaaactatgtgctcggagctcatcctcacggaattatgtgcaccggtttcctgtgtaattttagcacagaaagcaacggctttagtcaactgttcccgggattgcgcccctggttggccgtcctggccggcctgttttacctgcctgtgtacagagattacatcatgtcatttggcctgtgcccagtctctaggcagtcactggattttatcttgtcgcaaccccaactcgggcaggccgtagttatcatggtgggcggcgcccacgaggccctctactctgtgcctggcgaacactgtctcactctgcagaaaagaaaaggcttcgtgcgcttggccctccgccatggagcctccctggtgccagtctattctttcggcgagaacgatatcttccgactgaaggcttttgctaccggctcttggcaacactggtgccaactgacattcaagaagctcatggggtttagtccctgcatcttttggggcagaggattgttcagtgccacctcctgggggttactgccctttgccgtccccatcacaactgttggggagtgtccacctcctggtggacggccgcctgctgcagcctgggcttctggaattcctaggcctccggtgagtctcagcctgcagtgggcagcaccatccccaagcccatccgcttcaacccccccacgacgaaaatctatcaccatcaccccatcaacatag

SEQ ID NO: 270271 - DNA, 1035 bp, Artificial Sequence
  derived and/or modified sequence
atgggcgtggccaccaccctgcagccccccaccaccagcaagaccctgcagaagcagcacctggaggccgtgggcgcctaccagtatgtgctgaccttcctgttcatgggccccttcttcagcctgctggtgtttgtgctgctcttcaccagcctgtggcccttcagcgtcttctacctggtgtggctgtatgtggactgggacacccccaaccagggcggcagaagaagtgagtggatccggaacagagccatctggaggcagctgcgggactactaccctgtgaagctggtgaagacagctgagctgcccccagacagaaattatgtgctgggcgcccacccccacggcatcatgtgcaccggcttcctgtgcaacttcagcacagagagcaatggcttcagccagctgtttcctggcctgcggccctggctggccgtgctggccggcctcttctacctgcctgtgtacagagactacatcatgagctttggcctgtgccctgtgtcccggcagagcctggacttcatcctgagccagccccagctgggccaggccgtggtgatcatggtgggcggggcccacgaggccctgtacagcgtgcctggagagcactgcctgaccctgcagaagaggaaaggatttgtgcggctggccctgcggcacggggccagcctggtgcctgtgtacagctttggagaaaatgacatcttccggctgaaggcctttgccaccggctcctggcagcactggtgccagctgaccttcaagaagctgatgggcttcagcccctgcatcttctggggccggggcctcttcagcgccacctcctggggcctgctgccctttgctgtgcccatcaccaccgtgggggagtgccccccacctgggggccggcccccagctgctgcctgggccagcggcatcccccggccccctgtgtccctgagcctgcagtgggccgcccccagccccagccccagcgccagcaccccacccaggaggaagagcatcaccatcacccccagcacctag

SEQ ID NO: 270272 - DNA, 1219 bp, Artificial Sequence
  derived and/or modified sequence
gccttcatcgtttgtcctccgggttctgggatcctgctggaagaggggagcttctgcaatgggagttgccacaaccctgcagcccccaaccacttccaaaaccttgcagaagcagcatctagaagcagtgggcgcctaccaatatgtgctcactttcctcttcatgggccctttcttctcccttcttgtctttgtcctcctcttcacgtcactctggcccttctctgttttttacttggtgtggctctatgtggactgggacacacccaaccaaggtggaaggcgttcggagtggataaggaaccgggcaatttggagacaactaagggattattatcctgtcaagctggtgaaaacagcagagctgcccccggatcggaactacgtgctgggcgcccaccctcatgggatcatgtgtacaggcttcctctgtaatttctccaccgagagcaatggcttctcccagctcttcccggggctccggccctggttagccgtgctggctggcctcttctacctcccggtctatcgcgactacatcatgtcctttggactctgtccggtgagccgccagagcctggacttcatcctgtcccagccccagctcgggcaggccgtggtcatcatggtggggggtgcgcacgaggccctgtattcagtccccggggagcactgccttacgctccagaagcgcaaaggcttcgtgcgcctggcgctgaggcacggggcgtccctggtgcccgtgtactcctttggggagaatgacatctttagacttaaggcttttgccacaggctcctggcagcattggtgccagctcaccttcaagaagctcatgggcttctctccttgcatcttctggggtcgcggtctcttctcagccacctcctggggcctgctgccctttgctgtgcccatcaccactgtgggtgagtgcccacctccggggggacggccaccagcagctgcgtgggcatcagggatccctcgcccacctgtctccctctccctgcagtgggccgccccatccccgtcccccagcgcctccaccccaccgaggaggaagtcaatcactatcacgccctctacatgacggccctggagcagctcttcgaggagcacaaggaaagctgtggggtccccgcttccacctgcctcaccttcatctaggcctggccgcggcctttcgctgagcccctgagcccaaggcactgagacc

SEQ ID NO: 270273 - DNA, 1035 bp, Artificial Sequence
  derived and/or modified sequence
atgggcgtggccaccaccctgcagccccccaccaccagcaagaccctccagaagcaacatttggaagccgtaggcgcttatcaatatgtgcttaccttcctgtttatgggaccattcttctctctgctagtcttcgtgctcctatttacttcattatggccattctctgtgttttatctggtgtggctctacgttgactgggataccccgaaccagggcggccgaagatccgaatggatccgtaatcgagcaatttggcgacagctgcgcgactattacccagtgaagctcgtaaagactgctgaactcccacccgacaggaattatgtgctaggcgcgcatccacatggaatcatgtgcactggttttttgtgcaacttctccaccgagtccaacggcttctctcagttgttccctggcctcaggccctggctggctgtcctcgccggactattttacctcccagtctaccgtgactatatcatgtcctttgggctgtgccccgtctcgagacagtcattggacttcatcctgtctcaacctcagctcggccaggcagtggtaatcatggttggcggagctcatgaagctttgtattctgttcccggagagcactgtctgactcttcagaaaagaaaaggcttcgtgcgtctggctctgagacacggagcctcacttgtaccggtctactcctttggtgaaaatgatatattcaggctgaaagcctttgctacagggagctggcagcactggtgccagcttacattcaagaagttaatgggtttcagcccatgcatcttctggggtcgtggcctgtttagcgccacttcttggggtctcctgccctttgccgtgccaatcacaacggtgggcgagtgccccccccccggtggcagaccaccggctgctgcctgggcaagcggcattcctagaccaccagtgagtttgtcacttcagtgggccgcccctagcccttccccaagtgcctccacccccccacggcgaaagagtataaccataacacccagcacttag

SEQ ID NO: 270274 - DNA, 1035 bp, Artificial Sequence
  derived and/or modified sequence
atgggagtcgccaccacactccaaccacctaccacttccaaaaccttacaaaagcagcatctggaggccgtcggggcttatcagtacgtcctcacttttctctttatggggcctttcttctctcttctcgtattcgtcctcctgtttacctcactgtggcccttttccgtgttctatctcgtgtggctgtacgtagactgggacactccaaatcagggaggccgaagaagcgagtggattaggaaccgggctatctggcggcaactccgggactactacccagtaaagttggtaaagaccgctgaactgccacccgaccggaactacgtgttgggcgcacatccacatgggattatgtgtaccggttttctgtgtaacttctcgactgagagtaatggcttttctcagttattcccgggattgcgtccatggcttgcggtgttggcgggactattttacctgcccgtatatcgtgattacattatgtcttttgggctgtgcccagtgagtcgccagtccctcgacttcatcctgagccagcctcaactggggcaagcagtcgtcattatggtgggcggtgctcatgaagccctgtattcagtgcccggagaacattgcctgacactacagaagcggaaggggttcgtgagactggccctgcgacatggggcttctctggttccagtgtattccttcggcgagaacgatattttccgtctgaaagcgttcgcaaccggaagttggcagcattggtgccagctgacttttaaaaaactcatggggttctcaccttgtatcttctggggacggggattattcagtgccacttcctggggcctgctgccttttgccgtgcccattacgacggtgggggaatgcccccctcccggaggacgtcctcctgccgcagcttgggcatctgggattccacgaccaccagtgtctttaagtctccagtgggcagctccttcacccagccccagcgcatctacaccacctcggagaaaaagcataactattaccccctcaacgtag

SEQ ID NO: 270275 - DNA, 945 bp, Artificial Sequence
  derived and/or modified sequence
atggaggagagctgggaggccgcccccggcggccaggccggcgccgagctgcccatggagcccgtgggcagcctggtgcccaccctggagcagccccaggtgcccgccaaggtgagacagcccgagggccccgagagcagccccagccccgccggcgccgtggagaaggccgccggcgccggcctggagcccagcagcaagaagaagccccccagccccagacccggcagccccagagtgccccccctgagcctgggctacggcgtgtgccccgagccccccagccccggccccgccctggtgaagctgcccagaaacggcgaggcccccggcgccgagcccgcccccagcgcctgggcccccatggagctgcaggtggacgtgagagtgaagcccgtgggcgccgccggcggcagcagcacccccagccccagacccagcaccagattcctgaaggtgcccgtgcccgagagccccgccttcagcagacacgccgaccccgcccaccagctgctgctgagagcccccagccagggcggcacctggggcagaagaagccccctggccgccgccagaaccgagagcggctgcgacgccgagggcagagccagccccgccgagggcagcgccggcagccccggcagccccacctgctgcagatgcaaggagctgggcctggagaaggaggacgccgccctgctgcccagagccggcctggacggcgacgagaagctgcccagagccgtgaccctgaccgacagcctgagaaccgccagaaccatctggatcagcaccgtgggcccctggagaaaggccagatggtggctgcagaccgccgccctgcaggaccccggcagcgtgcccagaggccccagcgacctgggcagcgcctggagcagcgcctgccaggccgacgccgccccccccaccggcgaggccagctag

SEQ ID NO: 270276 - DNA, 945 bp, Artificial Sequence
  derived and/or modified sequence
atggaagagagttgggaggctgctcccggcggtcaggctggagccgagttgccgatggagccagtgggttccttggtgcccacactcgaacagccccaggttcctgctaaggtgagacaaccagaggggccggagtctagcccctccccggctggagccgtggagaaggcagccggcgctggactggaacctagtagcaaaaaaaaaccaccgagccctcgccctgggtcaccacgcgtacccccactctcattaggctacggtgtgtgtccagaacctccaagtccggggccggcgcttgttaaattgccacgaaacggggaggcgcctggtgctgagcctgctcctagcgcttgggctccgatggaattacaagtcgatgtgcgggtgaagcctgttggcgccgcaggtggcagttctacgccgtcaccccgtccatccaccaggttcttgaaggtcccagttccagagtctcctgccttcagccggcatgctgaccccgcacatcagctcctgcttcgcgcgcctagtcaagggggcacttggggcaggcgcagtcctctcgccgccgccagaacagagtctgggtgtgacgcggaggggcgggcttctccagccgagggctccgcaggatcacccggctcacccacctgttgccgctgtaaggaactgggacttgagaaagaagatgcagcgctgctccctcgcgctgggcttgatggggatgaaaagcttccaagagccgtaacactgactgactctttgaggaccgctaggacgatctggatatccaccgtggggccttggaggaaggcaagatggtggctgcaaactgcagcgctgcaggacccaggcagcgtgccgcgcggaccctcagatctagggtccgcctggtcttctgcgtgtcaggctgacgcagctcctccaaccggggaagcttcatag

SEQ ID NO: 270277 - DNA, 1148 bp, Artificial Sequence
  derived and/or modified sequence
ccgggtggcggggcgcgcgggatggaggagtcttgggaggctgcgcccggaggccaagccggggcagagctcccaatggagcccgtgggaagcctggtccccacgctggagcagccgcaggtgcccgcgaaggtgcgacaacctgaaggtcccgaaagcagcccaagtccggccggggccgtggagaaggcggcgggcgcaggcctggagccctcgagcaagaaaaagccgccttcgcctcgccccgggtccccgcgcgtgccgccgctcagcctgggctacggggtctgccccgagccgccgtcaccgggccctgccttggtcaagctgccccggaatggcgaggcgcccggggctgagcctgcgcccagcgcctgggcgcccatggagctgcaggtagatgtgcgcgtgaagcccgtgggcgcggccggtggcagcagcacgccatcgcccaggccctccacgcgcttcctcaaggtgccggtgcccgagtcccctgccttctcccgccacgcggacccggcgcaccagctcctgctgcgcgcaccatcccagggcggcacgtggggccgccgctcgccgctggctgcagcccggacggagagcggctgcgacgcagagggccgggccagccccgcggaaggaagcgccggctccccgggctcccccacgtgctgccgctgcaaggagctggggctggagaaggaggatgcggcgctgttgccccgcgcggggttggacggcgacgagaagctgccccgggccgtaacgcttacggactccctgaggacggcgaggacaatctggatatcaactgtggggccctggaggaaggcacgctggtggctgcaaactgcagcactccaagaccctgggtctgtgccaaggggacccagtgatctgggctctgcctggtcctcagcctgccaggcagatgcagcaccccctacaggggaggccagttgagagcttgggcagcctcttcctggacccagttatccaggtcttcatgctctgctcaagggggccacatgagcgagcctaggagctggacttcaacccaggaagatgcatccgagggaaaggagattttctatggcctcaggcctgagtgccaatattagtctccagcttctgtggatgatcgg

SEQ ID NO: 270278 - DNA, 945 bp, Artificial Sequence
  derived and/or modified sequence
atggaggagagctgggaggccgcccctgggggccaggccggggctgagctgcccatggagcctgtgggcagcctggtgcccaccctggagcagccccaggtgcctgccaaggtgcggcagcctgagggccctgagagcagccccagccctgctggagctgtggagaaggccgccggggccggcctggagcccagcagcaagaagaagccacccagccccaggcctggcagcccccgggtgccccccctgagcctgggctatggagtgtgcccagagccccccagccctggccctgccctggtgaagctgcccagaaatggagaggcccctggagctgagcccgcccccagcgcctgggcccccatggagctgcaggtggatgtgcgggtgaagcctgtgggcgccgccggcggcagcagcacccccagcccccggcccagcacccgcttcctgaaggtgcctgtgcctgagagccctgccttcagcagacatgctgaccctgcccaccagctgctgctgcgggcccccagccagggcggcacctggggccgccgcagccccctggccgccgccaggacagaaagtggctgtgatgctgagggccgggccagccctgctgagggcagcgctggcagccctggcagccccacctgctgccgctgcaaggagctgggcctggagaaggaggatgctgccctgctgcccagggctggcctggatggagatgagaagctgcccagggctgtgaccctgacagacagcctgaggacagcccggaccatctggatcagcacagtgggcccctggaggaaggcccgctggtggctgcagacagctgccctgcaggaccccggctctgtgccccggggccccagcgacctgggcagcgcctggagcagcgcctgccaggctgatgctgccccacccaccggggaggccagctag

SEQ ID NO: 270279 - DNA, 945 bp, Artificial Sequence
  derived and/or modified sequence
atggaggagagctgggaggccgcccccggcggccaggccggcgccgaactccccatggaaccggtcgggagtttagttcctaccctcgagcagccacaggtgccagctaaagtccgccagcccgaagggccggagtccagcccttcgccagccggagctgtcgagaaagctgccggcgccgggttagagccgtcctcaaaaaagaaaccccctagcccaaggcctgggtctccaagggtcccaccactgtctctgggctacggggtttgtcctgagccaccttccccggggccggccttagtgaaactcccacgtaacggggaagcacccggggctgagccagctccatcagcatgggccccgatggagctccaagtggacgtgcgcgtaaaacccgttggggccgccggaggctcatcaactcctagcccaaggccttccactaggttccttaaagtgcccgtgcccgagtctcccgcattttctagacatgctgaccctgcacaccagctgcttctcagggcacccagccagggaggcacatggggaagaaggtcgcccctggccgcagcccgcacagagtccggttgtgatgccgaagggagagcaagccctgcagaaggcagcgccggatcccctggtagtcctacctgttgccgctgtaaggagctgggcctcgagaaggaggacgctgcgctgctccctagggccggattggacggtgatgaaaagctcccacgcgccgtcacgttaacagactccttgcgcaccgctcgcaccatctggatctcaaccgtgggtccatggcgcaaagctcgttggtggcttcagacagctgctttgcaggaccctgggagcgtgccacgcggaccaagcgacttgggctccgcctggagttccgcgtgtcaggccgatgccgccccaccaactggagaggcatcttag

SEQ ID NO: 270280 - DNA, 945 bp, Artificial Sequence
  derived and/or modified sequence
atggaagagtcttgggaagcagcaccaggcggacaggccggtgcagaactccctatggaaccggtcggcagtcttgtaccaacactggagcagccacaagtgccagccaaggtgaggcagcccgagggaccagagtcttccccctcacctgccggagctgtggaaaaggccgctggcgctggcctggagccttcctcgaaaaagaaacccccttcccctaggcctggcagcccacgtgtgcccccactttctctggggtatggtgtttgtcctgaacccccttctcctggcccagcactggtgaaattgccacgcaacggagaggccccaggcgctgaacccgcaccgtctgcctgggcgcctatggagctacaggtcgacgtcagagtgaaacccgtaggcgctgcaggaggtagtagtacaccatcgccacgtccctcaactagattcctgaaagtacctgtcccagagtcccctgcattcagccgacacgctgaccctgctcaccaacttctgcttagggcgccaagccaagggggtacatggggacggagatcgcctttagccgcagcacggactgaaagcggatgtgatgccgagggcagggcatcgcctgcggaagggagcgctggtagcccgggaagcccaacatgttgcagatgtaaagagctgggactcgagaaagaggacgcggctctgctcccacgagccggactcgacggggacgaaaagctgccccgagcagtgactctgactgactctctcaggacagcaagaacaatctggatatccaccgtggggccttggagaaaagccaggtggtggttgcaaaccgcggcactgcaggatcccggatccgttccacgcggtccctctgatttgggctctgcttggagctccgcttgtcaggcagatgctgcaccgccaacaggcgaggcctcgtag

SEQ ID NO: 270281 - DNA, 474 bp, Artificial Sequence
  derived and/or modified sequence
atggctccacaggctcagcccctgccactactgggaaagtgtaaggcgtccaacgctccaactcccagacctccacggaggcccacttggaagagaaagtccggcaaggtttctactaccgtaccgcagccccagaccgtgcccggcagttggccaagagagcgagagcgaaaacgggagcgggatcgcattaacagcctgctgctgcagattatagggcactctaagcaagcccttcctggacccggagagccggcccagcggttaacaccggccccagcagatccaggtggcagaggagaacaaggcggcgtagccgcccagggcgcaggcctcgctgcaggcaggaggagtgccgtgggaccatcaaaactctgtaatctcgttagcgcgtcgggcgcactggccgttttctccattacggggatgtgtcctggcagggatgtgtccgacgggctgagaatggggcagtag

SEQ ID NO: 270282 - DNA, 585 bp, Artificial Sequence
  derived and/or modified sequence
atgcccgctccacgattcctatactctctacgcaactacgagccaatgaaacctcttttctttattaactaccctgttagtgacatggaattgccggtacgctcgtccacagtgactcttcttcctgccccactgcctcgcagaggcagcgtgaagacgttcctggcccctagcaagtcatactttccggaagaggaaagagccctcttaaagagcagccacgctttttgtaccgggctctggccatggagaagggactttcagctgccacagtgccaccttgccttgggcctgctcccaggggagcgctctgtgaggctcccgagatttttagccgtgttgaaagaactgtcagcgaccgcctcttttacgcttgcttcagaagccatcccattcctgtctagctttccatttccatggaatctccttctaccttccgttttccaggccctcccacagaagtggcaattcaaggcggacttcctcctcgagtgtactctgtccgtgaaggaagcattccaccaagagtgcggagccggtgtgtctctcgcaaatggcctgaataaagggctgcggacaggatag

SEQ ID NO: 270283 - protein, 279 aa, Artificial Sequence
  derived and/or modified sequence
MCGRFLRRLLAEESRRSTPVGRLLLPVLLGFRLVLLAASGPGVYGDEQSEFVCHTQQPGCKAACFDAFHPLSPLRFWVFQVILVAVPSALYMGFTLYHVIWHWELSGKGKEEETLIQGREGNTDVPGAGSLRLLWAYVAQLGARLVLEGAALGLQYHLYGFQMPSSFACRREPCLGSITCNLSRPSEKTIFLKTMFGVSGFCLLFTFLELVLLGLGRWWRTWKHKSSSSKYFLTSESTRRHKKATDSLPVVETKEQFQEAVPGRSLAQEKQRPVGPRDA

SEQ ID NO: 270284 - protein, 232 aa, Artificial Sequence
  derived and/or modified sequence
MPGAAAAAAAAAAAMLPAQEAAKLYHTNYVRNSRAIGVLWAIFTICFAIVNVVCFIQPYWIGDGVDTPQAGYFGLFHYCIGNGFSRELTCRGSFTDFSTLPSGAFKAASFFIGLSMMLIIACIICFTLFFFCNTATVYKICAWMQLTSGDCLVLFDLHFPDGWDSDEVKRMCGEKTDKYTLGACSVRWAYILAIIGILDALILSFLAFVLGNRQDSLMAEELKAENKDDGNA

SEQ ID NO: 270285 - DNA, 699 bp, Artificial Sequence
  derived and/or modified sequence
atgccaggtgcagcagccgctgccgcagccgctgctgcagccatgcttcccgcacaggaagccgcaaaactctaccacacgaattacgtcaggaactcgagagcgattggcgttctgtgggccatctttaccatctgtttcgccatcgttaacgtggtgtgtttcatccagccttattggatcggagatggtgttgataccccccaggccggttactttggtctctttcattactgtatcggaaacggattttctagggagctgacttgtcgaggcagctttaccgatttcagtacactccccagtggggccttcaaagccgcttctttcttcatcggcttatctatgatgctgataatcgcctgtattatttgcttcactctgttcttcttctgtaacaccgctactgtatataaaatttgtgcctggatgcagctgacttcaggcgactgtcttgtcctgtttgacctccattttcctgatggttgggatagtgatgaagtcaagcggatgtgtggagagaaaacagacaagtataccttaggagcttgttcggtgaggtgggcgtacattttggccatcatcggcatcctggatgccttaatcttaagttttttggctttcgtcctgggtaatcgccaggacagcctgatggcagaagaacttaaggctgaaaacaaggacgacgggaacgcctag

SEQ ID NO: 270286 - DNA, 699 bp, Artificial Sequence
  derived and/or modified sequence
atgcctggagctgctgctgctgctgctgctgctgctgctgccatgctgcctgcccaggaggccgccaagctgtaccacaccaactacgtgaggaacagccgggccatcggcgtgctgtgggccatcttcaccatctgctttgccatcgtgaatgtggtgtgcttcatccagccctactggattggagatggagtggacaccccccaggccggctacttcggcctcttccactactgcattggaaatggcttcagccgggagctgacctgccggggcagcttcacagacttcagcaccctgcccagcggggccttcaaggccgccagcttcttcatcggcctgtccatgatgctgatcatcgcctgcatcatctgcttcaccctcttcttcttctgcaacacagccaccgtgtacaagatctgtgcctggatgcagctgaccagcggggactgcctggtgctgtttgacctgcacttcccagatggctgggacagtgatgaggtgaagaggatgtgtggggagaagacagacaagtacaccctgggcgcctgcagcgtgcgctgggcctacatcctggccatcatcggcatcctggatgccctgatcctgtccttcctggcctttgtgctgggcaaccggcaggacagcctgatggccgaggagctgaaggccgagaacaaggatgatggaaatgcctag

SEQ ID NO: 270287 - DNA, 1379 bp, Artificial Sequence
  derived and/or modified sequence
gtgagtgtgtctcctgcgcgctgagaggcggggggaggcggaggaccaggaggaggaggaggaggaggaggagggggagaatgcccggagccgccgccgctgccgccgccgccgccgccgcgatgctcccggctcaggaggctgccaagctgtaccacaccaactatgtgcggaactcgcgggccatcggcgtgctgtgggccatcttcaccatctgctttgccatcgtcaacgtggtgtgcttcatccagccctactggataggcgacggcgtggacaccccgcaagccggctatttcgggctcttccactactgcatcggcaacggcttctcccgggagctgacctgcaggggcagcttcacggacttctccacgctgccctcgggcgccttcaaagccgcctccttctttatcggcctctccatgatgctcatcattgcctgcatcatttgctttaccctcttcttcttctgcaacacggccactgtgtacaagatatgtgcctggatgcagctcacctccggtgactgccttgtgctttttgatttgcatttccctgatggctgggactcagatgaagtaaaacggatgtgtggagaaaagacagacaagtacactcttggggcttgctcagtccgctgggcatacatcctggctattattggaattttggatgccctgatcctctcatttctagcatttgtgcttggtaatcgacaagacagcttgatggcagaggaactgaaggcagaaaacaaagatgatggaaatgcttaaggcaaactaaggtagtgtgagaccacaccatttctgctaagccaatattctctagaatgagcacaaaacaaatcgaataacagctaaacaaatcgaataacagctaaacgaatcgaataacagcttttgtacatcaacatcaagaaggaatacgcctgagagagatcagagtatatagatgaatatgaacaagaatggaacattcacttgtcaacgcactttctaaatctagatcagcagagatgggagtgattttctggaaagagatgtgatcatggattaaacaccagctcattggaaactcattggatgagatcagaaaacgttcatgaaaaatcatattcaggaaataaggaagaggaatataaatgctctagagttaacatgtaaaatatatacgtactgaggtttgtaaactgtcctttttaaatcaaactgaaaacaaaaagctttaacctttcaacagaatttttaaaaaggcagttagttctaaattattcctatctcaatagccaagaggctgatcaagcgtcatttattgaggaagcatcttagaaaatgcctctgaatgttttcataggagccgtgacctttggttct

SEQ ID NO: 270288 - DNA, 699 bp, Artificial Sequence
  derived and/or modified sequence
atgcccggcgccgccgccgccgccgccgccgccgccgccgccatgctgccggcccaagaggcagctaagctgtaccacacaaactacgtgcgaaactcccgcgcaattggggtgttgtgggcgatatttaccatctgttttgccatcgtgaacgtggtgtgcttcatacagccgtattggatcggcgatggtgtggacaccccccaggccgggtatttcgggctctttcactactgcatcggaaatggcttcagtcgagagctgacatgtagggggtccttcaccgattttagcaccctcccttcgggcgcttttaaggctgccagcttcttcataggtctctcaatgatgttaatcatcgcctgtatcatttgtttcaccctgttcttcttctgcaataccgccactgtttacaaaatttgtgcgtggatgcaattaacatctggggattgcctggtgctgtttgacctgcatttccccgacggatgggactcagatgaagtgaagcgcatgtgcggggagaaaaccgataagtacactcttggagcctgttctgtgcggtgggcctatatcctggccattattgggatcttagacgccctgattctgtcatttctggcttttgtgctgggaaaccgacaggactccctaatggcagaagaattaaaagctgaaaacaaggatgacgggaatgcttag

SEQ ID NO: 270289 - DNA, 699 bp, Artificial Sequence
  derived and/or modified sequence
atgcctggggctgccgcagccgcagccgctgccgctgccgcaatgctgcccgcacaggaggctgcaaaactgtatcacactaattacgtaagaaactcacgcgctattggtgtgctctgggctattttcaccatttgctttgcaatcgtcaatgtggtgtgtttcatccagccatactggatcggagacggagtcgacacaccccaggccggatatttcgggctgttccactactgcatcggcaacgggttttctcgagagcttacatgtcggggaagcttcacagactttagcaccttaccgtcgggggcttttaaggcagccagtttcttcatcggcttgtccatgatgctgataatagcctgcatcatttgtttcacactatttttcttttgcaatacagccactgtttataaaatttgtgcgtggatgcaactgacctctggcgactgtcttgtactgttcgatctgcacttccctgacggctgggatagcgacgaggttaagcgaatgtgcggcgagaagacggacaaatacaccctcggagcctgttcagttaggtgggcttatatcctggccattataggtattctggacgccctgattctcagctttctcgcattcgtgctcgggaatcgccaggacagtttgatggccgaagaattaaaggcagagaataaggatgacgggaacgcatag

SEQ ID NO: 270290 - DNA, 699 bp, Artificial Sequence
  derived and/or modified sequence
atgcccggcgccgccgccgccgccgccgccgccgccgccgccatgctgcccgcccaggaggccgccaagctgtaccacaccaactacgtgagaaacagcagagccatcggcgtgctgtgggccatcttcaccatctgcttcgccatcgtgaacgtggtgtgcttcatccagccctactggatcggcgacggcgtggacaccccccaggccggctacttcggcctgttccactactgcatcggcaacggcttcagcagagagctgacctgcagaggcagcttcaccgacttcagcaccctgcccagcggcgccttcaaggccgccagcttcttcatcggcctgagcatgatgctgatcatcgcctgcatcatctgcttcaccctgttcttcttctgcaacaccgccaccgtgtacaagatctgcgcctggatgcagctgaccagcggcgactgcctggtgctgttcgacctgcacttccccgacggctgggacagcgacgaggtgaagagaatgtgcggcgagaagaccgacaagtacaccctgggcgcctgcagcgtgagatgggcctacatcctggccatcatcggcatcctggacgccctgatcctgagcttcctggccttcgtgctgggcaacagacaggacagcctgatggccgaggagctgaaggccgagaacaaggacgacggcaacgcctag

SEQ ID NO: 270291 - DNA, 1632 bp, Artificial Sequence
  derived and/or modified sequence
atggtcgttgcaacttacacatgcgaccagtgcggtgccgagacctatcaacccatccagtccccgacgtttatgccactgattatgtgcccatctcaggaatgccagacgaacagatctggcggtcgcctgtacttgcagacaagaggatctaggtttatcaaattccaagagatgaagatgcaggaacactctgatcaggtgcctgtcgggaatataccgagatcaataaccgtcctggttgaaggggagaacacaaggatcgcacagcctggtgaccacgtgagtgtaaccggaatattcttgcctatcttaagaaccgggtttaggcaagtggtgcagggcctcctgagtgagacatatctggaggcccatcgcattgtcaaaatgaataagagcgaggatgacgagagcggcgcgggagaactcactcgcgaggagttgcggcagatcgcagaggaagatttctatgagaagctcgctgccagtatcgccccagagatctatggtcacgaagacgtcaagaaagccctgctgctgctgctcgtcggcggcgtggaccagagtccgcgcgggatgaagattcggggaaacattaatatctgcctgatgggggatcccggggtggcgaaatctcaattactgtcttacattgatcgtctggccccaagatcccagtacaccacggggcgcggttcatcaggcgtaggcctcacggcggccgtgctgcgagatagtgtaagcggtgaactcacacttgagggcggcgccctggtgttggccgaccagggagtgtgttgcattgatgagtttgataaaatggctgaggctgatcgcaccgcaattcacgaggtcatggagcagcaaactattagcatcgccaaagcaggtatccttacaaccttgaatgctaggtgcagcattctggccgcggcgaatccagcttatggtagatacaatccacgccggtcgttagagcaaaacattcagttacccgcagctctcctgtctcgcttcgacttgctctggctgatccaggataggcccgatcgagacaatgatctgagacttgcacagcatatcacgtatgttcaccagcacagtcgtcagccgccatctcagtttgaacctctggacatgaaattgatgagacggtatattgctatgtgcagagaaaagcagcccatggtgccggagtcccttgctgactacataacggccgcctacgtggagatgagaagggaggcttgggccagcaaagacgccacttatacgagcgcacgaacgctgttagcaatcctgcggctgtctacagccctcgcaaggttgagaatggtggatgtggtcgagaaggaggatgtcaatgaagccatccggctgatggaaatgtctaaggattctctgctgggggataaaggacagactgcccgcactcagaggccagccgacgtcatctttgcaaccgtccgggaattggtgtctggtggccggtctgtgcgtttttccgaggcagaacagcggtgtgtttcacgcggcttcactcccgcccagtttcaggccgccctggatgaatatgaggagctcaacgtatggcaagtcaatgcaagccgcaccagaatcaccttcgtgtag

SEQ ID NO: 270292 - DNA, 1839 bp, Artificial Sequence
  derived and/or modified sequence
atgatggagcagagatccagggatcccggaatggtgagatctccccaaaatcaatacccggccgaactgatgcgtcgattcgaactatattttcaaggaccttcttccaataagccccgggtgatcagagaggttagggccgactctgttgggaagctggtgaccgtgaggggtatcgtgacgcgggtgtccgaggtgaaacccaaaatggtagtcgccacctacacctgtgaccaatgtggggccgagacttaccaaccaatccagagtcccacattcatgcctcttatcatgtgtcctagtcaggaatgtcagactaacaggtccggaggaaggctttacctccaaactcgaggcagtcggttcatcaagtttcaggaaatgaaaatgcaggaacactcggatcaagtgcctgtgggcaacatacccagatccattaccgtcctagtggaaggggagaacacccgcattgcccaacctggcgaccatgtgtcagtgacaggaatctttctccctatcctcagaactggcttccgacaggtggttcagggcctgctgtccgagacttatctagaagcgcaccggattgtcaaaatgaacaagtctgaggacgacgagtctggagcgggagaattgactagagaagaactcaggcaaatcgctgaggaagatttctacgagaagctggccgccagcatcgctcccgagatctacgggcacgaggacgtgaagaaagccctgttactcctgttagtgggaggcgttgaccaatcgccccggggcatgaaaataaggggaaacattaatatatgtcttatgggagatcccggggtggcaaagtcccagctactttcatatattgataggctcgctccgcggtcccagtacaccacagggcggggatcttccggggtaggcttgaccgccgcagtcctccgggactcagtcagtggggagctcacattagagggtggcgctctggttttggcggaccagggcgtctgctgtattgatgagttcgacaagatggcggaggcggacaggacagccatacatgaagtcatggagcagcagacaatcagcattgccaaagcaggtatcctgactaccctgaacgctcgatgcagcatcctggccgcggccaaccctgcctacgggagatacaatccgcggcgtagtttggaacaaaacattcagttgccggcagctctgctcagtaggtttgacctgctgtggcttatacaggatcggcctgacagggataatgacctgaggctagcccaacatattacgtatgtgcatcaacactccagacagcctccaagtcagttcgaacctctcgatatgaagctcatgcgtcggtacatcgcaatgtgccgggagaaacagcctatggtacctgagagtctcgcggactacatcactgcagcttacgtggaaatgaggcgcgaggcttgggctagcaaagacgcgacatacacctccgccagaacactccttgcaattctccgcctgtctacggctctcgcacggctccgcatggtagacgtcgttgaaaaggaggatgtgaacgaagccatcagactgatggagatgtcgaaggactcacttctcggggataaaggccagaccgcacggactcagagacctgcggatgtgatcttcgctaccgtccgagagttagtgtctggcgggaggtctgtaaggttcagtgaggccgaacaacgttgtgtatctcgcggatttactcctgcccagtttcaggccgctcttgatgaatacgaagagttaaatgtgtggcaggtcaacgcaagccgcacgcggattacttttgtgtag

SEQ ID NO: 270293 - DNA, 1632 bp, Artificial Sequence
  derived and/or modified sequence
atggtggtggccacctacacctgtgaccagtgtggggctgagacctaccagcccatccagagccccaccttcatgcccctcatcatgtgccccagccaggagtgccagaccaacagaagtggcggccgcctgtacctgcagacccggggcagccgcttcatcaagttccaggagatgaagatgcaggagcacagcgaccaggtgcctgtgggcaacatccccaggagcatcaccgtgctggtggagggggagaacacccgcatcgcccagcccggggaccacgtgtctgtgacaggcatcttcctgcccatcctgaggacaggcttccggcaggtggtgcagggcctgctgtctgagacctacctggaggcccacagaattgtgaagatgaacaagtcagaagatgatgagagcggggccggggagctgacccgggaggagctgcggcagattgctgaggaggacttctatgagaagctggccgccagcatcgcccctgagatctacggccatgaagatgtgaagaaggccctgctgctgctgctggtgggcggcgtggaccagagcccccggggcatgaagatccggggcaacatcaacatctgcctgatgggagaccccggggtggccaagagccagctgctgagctacatcgaccggctggcccccaggagccagtacaccaccggccggggcagcagcggcgtgggcctgacagctgctgtgctgcgggacagcgtgtctggagagctgaccctggagggcggggccctggtgctggccgaccagggcgtgtgctgcattgatgaatttgacaagatggccgaggccgacagaacagccatccacgaggtgatggagcagcagaccatcagcatcgccaaggccggcatcctgaccaccctgaatgcccgctgcagcatcctggccgccgccaacccagcctacggccgctacaacccccggcgcagcctggagcagaacatccagctgcctgctgccctgctgagcagatttgacctgctgtggctgatccaggacagaccagaccgggacaatgacctgcggctggcccagcacatcacctacgtgcaccagcacagccggcagccccccagccagtttgagcccctggacatgaagctgatgaggcgctacatcgccatgtgccgggagaagcagcccatggtgcctgagagcctggccgactacatcacagctgcctacgtggagatgagaagagaggcctgggccagcaaggatgccacctacaccagcgcccggaccctgctggccatcctgcggctgagcacagccctggcccggctgaggatggtggatgtggtggagaaggaggatgtgaatgaggccatccggctgatggagatgagcaaggacagcctgctgggggacaagggccagacagcccggacccagaggcctgcagatgtgatctttgccaccgtgcgggagctggtgtctgggggccgctctgtgcgcttcagcgaggccgagcagagatgtgtgtcccggggcttcaccccagcccagttccaggccgccctggatgaatatgaggagctgaatgtgtggcaggtgaatgccagcaggacccgcatcacctttgtgtag

SEQ ID NO: 270294 - DNA, 1839 bp, Artificial Sequence
  derived and/or modified sequence
atgatggagcagaggagccgggaccccggcatggtgcgcagcccccagaaccagtacccagctgagctgatgagaagatttgagctgtacttccagggccccagcagcaacaagcccagggtcatccgggaggtgcgggctgacagcgtgggcaagctggtgacagtgcggggcatcgtgaccagggtgtctgaggtgaagcccaagatggtggtggccacctacacctgtgaccagtgtggggctgagacctaccagcccatccagagccccaccttcatgcccctcatcatgtgccccagccaggagtgccagaccaacagaagtggcggccgcctgtacctgcagacccggggcagccgcttcatcaagttccaggagatgaagatgcaggagcacagcgaccaggtgcctgtgggcaacatccccaggagcatcaccgtgctggtggagggggagaacaccagaattgcccagcccggggaccacgtgtctgtgacaggcatcttcctgcccatcctgaggacaggcttccggcaggtggtgcagggcctgctgtctgagacctacctggaggcccaccgcatcgtgaagatgaacaagtcagaagatgatgaaagtggagctggggagctgacccgggaggagctgcggcagattgctgaggaggacttctatgagaagctggccgccagcatcgcccctgagatctacggccatgaagatgtgaagaaggccctgctgctgctgctggtgggcggcgtggaccagagcccccggggcatgaagatccggggcaacatcaacatctgcctgatgggagaccccggggtggccaagagccagctgctgagctacatcgaccggctggcccccaggagccagtacaccaccggccggggcagcagtggagtgggcctgacagctgctgtgctgcgggacagcgtgtctggagagctgaccctggagggcggggccctggtgctggccgaccagggcgtgtgctgcattgatgaatttgacaagatggccgaggccgacagaacagccatccacgaggtgatggagcagcagaccatcagcatcgccaaggccggcatcctgaccaccctgaatgcccgctgcagcatcctggccgccgccaacccagcctacggccgctacaaccccaggaggagcctggagcagaacatccagctgcctgctgccctgctgagcagatttgacctgctgtggctgatccaggacagaccagaccgggacaatgacctgcggctggcccagcacatcacctacgtgcaccagcacagccggcagccccccagccagtttgagcccctggacatgaagctgatgaggcgctacatcgccatgtgccgggagaagcagcccatggtgcctgagagcctggccgactacatcacagctgcctacgtggagatgaggcgggaggcctgggccagcaaggatgccacctacaccagcgcccggaccctgctggccatcctgcggctgagcacagccctggcccggctgaggatggtggatgtggtggagaaggaggatgtgaatgaggccatccggctgatggagatgagcaaggacagcctgctgggggacaagggccagacagcccggacccagaggcctgcagatgtgatctttgccaccgtgcgggagctggtgtctgggggccgctctgtgcgcttcagcgaggccgagcagagatgtgtgtcccggggcttcaccccagcccagttccaggccgccctggatgaatatgaggagctgaatgtgtggcaggtgaatgccagcaggacccgcatcacctttgtgtag

SEQ ID NO: 270295 - DNA, 1632 bp, Artificial Sequence
  derived and/or modified sequence
atggtggtggccacctacacctgcgaccagtgcggcgccgagacctatcagccaatccaatcccctaccttcatgcctctcattatgtgtcctagccaagagtgtcagacaaacagaagcggtggccgtctttatctgcagacacgcggatcacgctttattaaattccaggagatgaagatgcaggagcatagcgatcaggtgcctgtggggaatatacctcggtccattacagtcttggtcgaaggcgagaatacccggatcgcgcaacccggcgatcacgtgagcgttactggaatattcttacccattcttcggacgggcttccggcaggtggtgcaaggcctcctgagcgagacttacttagaagcccataggatcgttaaaatgaacaaaagcgaagacgatgagtccggagccggcgagctaaccagggaggaactgcgccagatcgctgaggaggacttctacgaaaagctggccgcgtctatcgccccagagatatatggacacgaggatgtgaagaaagccttgctattattgctggttgggggagttgatcaaagcccccgcggcatgaagatcagagggaacattaacatctgcctcatgggagatcccggcgtggccaagtctcagcttctgagttatatcgacaggcttgccccccggtcccagtacactaccggcagagggtcaagcggagtaggacttaccgctgccgttctccgggatagtgtgtccggcgagctgaccttggaaggaggggcactggtgttagccgaccagggcgtgtgttgcatcgatgagtttgataagatggcggaggcggatcggactgccattcacgaggtgatggaacagcagacaattagtatcgcaaaggccggcatccttacaacgctcaacgcccgatgttctatccttgccgcggcaaatcctgcatatggaagatataatccacggcgtagcctagagcagaatatccagcttcccgctgcactgttgagcagatttgaccttctttggctgatccaggacagaccagatcgcgataacgacctcaggctcgcgcaacacattacttatgtgcaccagcacagccgtcagcccccatcacagtttgagcctctggacatgaaactgatgaggaggtatatcgccatgtgccgagaaaagcagcccatggtcccagaatcacttgccgactacataaccgcggcgtacgttgagatgagaagggaggcctgggccagtaaagatgccacatacacctcagcccgaactttactggctatccttcgactgtcaaccgccctggcgagactgagaatggtagacgttgtagaaaaagaagatgttaacgaagcaataagactgatggaaatgagcaaggactctctgctcggggataaaggtcaaacagcccgcacccaacgaccagcagacgtgatcttcgctaccgtgagggagctcgtctctggaggtagaagcgtacggttcagcgaagccgagcagcgctgtgtctccagaggcttcactcctgcacagtttcaggctgcccttgacgagtatgaagagctgaatgtatggcaagtgaatgcaagcagaacaagaattaccttcgtttag

SEQ ID NO: 270296 - DNA, 1839 bp, Artificial Sequence
  derived and/or modified sequence
atgatggagcagcggagccgggaccccggcatggtgcggagcccccagaaccaataccctgccgaacttatgagaagatttgaactctatttccaggggccatcttctaacaagccgagggtgattagggaagtgagggctgatagcgtgggcaaactggtcactgtccgagggatagtcacaagagtgagcgaggtcaaaccaaaaatggtcgtcgccacctatacatgtgatcaatgcggggcagagacctatcagcccatccagtcccccacctttatgcctctcataatgtgccctagtcaggagtgccaaactaacagaagcggggggagactgtatctgcagacacgcggcagtagattcatcaaattccaggagatgaaaatgcaggaacacagcgaccaggtacccgtgggcaatatccctcgcagcataacagtgctagtcgagggggagaacactagaatcgcgcagccgggagatcacgtatcggtcaccggcatattcctacccatcctccgaacaggatttcgtcaggttgttcagggattgttgtccgagacctacctggaagcacaccgcatcgtgaaaatgaataagtccgaggacgatgaatccggggcaggggagcttacgcgcgaggagctgcgccaaatcgcagaggaagacttttacgaaaagctggccgcgagcattgctcctgagatttacggccatgaagatgttaagaaggccctgttgctgctgctcgtggggggcgtggaccaatcacctagaggtatgaaaattcgaggtaatattaatatttgccttatgggcgatccgggcgtggccaaatcacagctactgtcctacatcgaccggctcgccccccgatcccagtataccacaggacgagggtcctccggggtggggctgacggcagccgtgctgagggactctgtgagcggcgaactgaccttggaagggggggccttagtgctagccgaccaaggagtgtgttgtatagacgagttcgacaaaatggccgaagcagataggacagcaattcacgaagtcatggagcagcagacaatctccattgctaaggccggtatactcaccaccctgaatgcaaggtgctctattttggcagctgccaaccctgcatatggccggtacaatccccggaggtccctggaacaaaacattcaactgccagcagccctcctcagccgattcgatctgctctggctgattcaagacaggccagatcgtgataatgatctgagattagctcagcatattacttacgtgcaccagcatagtaggcagccacccagtcagtttgaacccctggacatgaaactcatgcgcaggtatattgccatgtgtagagagaaacagccaatggtgcccgaatctctggcagactacatcactgcagcttacgtcgaaatgcgcagggaggcctgggccagcaaggatgccacatacacttcagccagaaccctgctggccatcctgaggctgtcgaccgctctagcaaggcttcggatggtcgatgtggtggagaaggaggacgtgaacgaggccatccgactgatggagatgtccaaggattcacttctgggagataagggacagactgccaggacccaaaggccagccgatgtgatctttgcaactgtcagggaactagtgtcaggaggtcgatccgtccgattctctgaagccgagcagcgctgcgtaagtaggggcttcacccccgctcagtttcaggctgccctagacgagtatgaagagctcaatgtttggcaggtaaacgcaagcaggactcgcattacgtttgtgtag

SEQ ID NO: 270297 - DNA, 1632 bp, Artificial Sequence
  derived and/or modified sequence
atggtagtggcgacgtacacctgtgatcagtgtggagctgaaacctaccagcctatccagagcccaaccttcatgcctctcatcatgtgcccctcccaggagtgtcaaacaaacagaagcggtgggcgactgtatctccagactcgcggatcccggttcatcaaatttcaagagatgaaaatgcaggagcattcagatcaagttcccgtcggaaatataccaaggagcatcacagtccttgtggagggcgagaacaccagaattgcacaaccaggggatcatgtgtcagttacagggattttcctgcctatactgcggaccgggtttcgtcaggtcgttcagggcctgcttagtgaaacctacctcgaggcacaccggattgtgaagatgaacaagtccgaggacgacgagagtggagcgggagagctcactcgagaagaattgaggcagatcgcagaggaggacttttatgagaagctcgccgcatcaattgcacctgaaatatatggtcatgaggatgtaaagaaggccttgttactgctgttggtgggtggagtcgaccaatctccacgagggatgaagatccggggtaacatcaacatctgtctcatgggggaccctggagtcgccaagtcccaattgctgtcgtatatagatagactggcgcctcggtcacagtataccacggggagaggatctagcggtgttgggctgactgctgctgtgctgagagattctgtctccggtgagttgacactagaaggcggagcactggttctcgccgatcagggcgtctgctgtattgatgaattcgataagatggcagaggcagatcgtactgccattcatgaggttatggaacagcagacgatctccatagcgaaggcagggattctgacaacactgaacgctcgctgctcaattctggccgcagcaaaccctgcgtacgggcgttacaaccccaggagatcattagaacagaacattcagctgccggctgcgctcttgtccagattcgatctgctgtggctcattcaagacaggcccgaccgggacaacgacctacggctggcccagcacattacctacgtccaccagcacagtaggcagccaccctcccagttcgagcctctggacatgaagctaatgcgacggtacatcgcaatgtgcagggagaaacagccgatggtccccgagagcttggcggactacattaccgcggcttacgtggaaatgagaagagaggcttgggcctctaaggatgctacatatacctcggctcggactttactggccatcttaagattgagcaccgctctggccagactgcgcatggtggatgtagtggagaaagaggatgtgaacgaagctattagactcatggagatgtctaaggactccctcctgggggacaagggccaaaccgccaggactcaacggccagccgatgtaatctttgcgaccgttcgcgagcttgtgtctggaggcagaagcgttagattttcagaagccgagcaacgctgcgtctctaggggctttacaccggctcagtttcaagcggctctcgacgagtacgaggagctcaacgtgtggcaagtcaatgcttcaagaactcgtatcaccttcgtgtag

SEQ ID NO: 270298 - DNA, 1839 bp, Artificial Sequence
  derived and/or modified sequence
atgatggagcagcgatccagggatccagggatggtgcgctcccctcagaatcagtatcctgccgagctgatgaggcgtttcgagctttacttccagggcccttcctcaaacaagcctcgcgttatacgtgaagtgagggccgattcggtgggcaaactcgtgaccgtaagagggatcgtgactagggtctccgaggttaaacccaaaatggtggtggccacatatacatgcgatcagtgtggcgctgaaacataccagcccatccagtcacccaccttcatgccactgattatgtgcccctcccaagagtgccagacgaaccgttccggtggaagactttacctgcagaccaggggcagcaggttcatcaaattccaggagatgaagatgcaagagcattcagaccaggtgccggtgggaaatattcctagatccattaccgtgctcgttgagggagagaacacacgcattgcccagccaggggaccacgtatctgtgacaggcatctttctaccaatactgaggactggttttcgtcaagtggtgcagggtttgctcagcgaaacctacctggaggcgcacaggatcgtgaaaatgaacaagagtgaggacgacgagtctggcgctggggagctaacccgggaggagctgcggcagattgctgaagaggacttctacgaaaaactggcggcatcaatcgcacccgagatttacggtcatgaggacgtgaaaaaagccctgttactcctgctggtaggcggagtggatcagtccccacgaggtatgaagatccggggaaatatcaatatttgcctcatgggagacccaggagtggcgaaatctcagttattgagttatatcgatagattagcgccaagatcccagtacactacaggaagaggctcttcaggagtcggtctaaccgccgctgtgctccgcgatagcgttagcggcgaactaaccttggagggcggtgctctcgtgttggctgaccaaggagtgtgctgtatcgatgagtttgataaaatggcagaagcagaccgcacagccattcacgaggttatggagcaacagacaatctccatagctaaggcgggtatcctcaccactctgaacgctcggtgttccatcctggccgcagcaaaccccgcttacggcagatacaacccacgcaggtcgctcgagcagaatatccaactcccagctgcactcctttcccgctttgatctcctatggctgatacaggacaggcctgacagggataacgatctacgtcttgcccagcatataacgtacgttcaccagcactctcggcagcctccctctcagtttgagcccctggacatgaaactgatgcgcaggtacattgcaatgtgccgcgagaaacagccaatggtgcctgaatctctagcagattacattactgccgcttacgttgagatgagacgcgaggcatgggcaagtaaagatgccacctacactagcgctaggaccctgctagccatcctgagactctcaaccgccttggccaggctgcgaatggttgatgtcgtggaaaaagaagatgtgaatgaggctatccgcctgatggagatgtcaaaagatagtctcctgggcgataagggccagactgcccgaacacaacgcccagccgacgtgatctttgctactgttagggaattggtgtccggcggacggtccgtcagattctcagaggccgagcagagatgtgtgtcacgaggatttacccctgcccagtttcaggcagccctggacgaatacgaggagctcaacgtttggcaggtgaacgcctctcgcacaaggataacctttgtgtag

SEQ ID NO: 270299 - DNA, 1632 bp, Artificial Sequence
  derived and/or modified sequence
atggtggtggccacctacacctgcgaccagtgcggcgccgagacctaccagcccatccagagccccaccttcatgcccctgatcatgtgccccagccaggagtgccagaccaacagaagcggcggcagactgtacctgcagaccagaggcagcagattcatcaagttccaggagatgaagatgcaggagcacagcgaccaggtgcccgtgggcaacatccccagaagcatcaccgtgctggtggagggcgagaacaccagaatcgcccagcccggcgaccacgtgagcgtgaccggcatcttcctgcccatcctgagaaccggcttcagacaggtggtgcagggcctgctgagcgagacctacctggaggcccacagaatcgtgaagatgaacaagagcgaggacgacgagagcggcgccggcgagctgaccagagaggagctgagacagatcgccgaggaggacttctacgagaagctggccgccagcatcgcccccgagatctacggccacgaggacgtgaagaaggccctgctgctgctgctggtgggcggcgtggaccagagccccagaggcatgaagatcagaggcaacatcaacatctgcctgatgggcgaccccggcgtggccaagagccagctgctgagctacatcgacagactggcccccagaagccagtacaccaccggcagaggcagcagcggcgtgggcctgaccgccgccgtgctgagagacagcgtgagcggcgagctgaccctggagggcggcgccctggtgctggccgaccagggcgtgtgctgcatcgacgagttcgacaagatggccgaggccgacagaaccgccatccacgaggtgatggagcagcagaccatcagcatcgccaaggccggcatcctgaccaccctgaacgccagatgcagcatcctggccgccgccaaccccgcctacggcagatacaaccccagaagaagcctggagcagaacatccagctgcccgccgccctgctgagcagattcgacctgctgtggctgatccaggacagacccgacagagacaacgacctgagactggcccagcacatcacctacgtgcaccagcacagcagacagccccccagccagttcgagcccctggacatgaagctgatgagaagatacatcgccatgtgcagagagaagcagcccatggtgcccgagagcctggccgactacatcaccgccgcctacgtggagatgagaagagaggcctgggccagcaaggacgccacctacaccagcgccagaaccctgctggccatcctgagactgagcaccgccctggccagactgagaatggtggacgtggtggagaaggaggacgtgaacgaggccatcagactgatggagatgagcaaggacagcctgctgggcgacaagggccagaccgccagaacccagagacccgccgacgtgatcttcgccaccgtgagagagctggtgagcggcggcagaagcgtgagattcagcgaggccgagcagagatgcgtgagcagaggcttcacccccgcccagttccaggccgccctggacgagtacgaggagctgaacgtgtggcaggtgaacgccagcagaaccagaatcaccttcgtgtag

SEQ ID NO: 270300 - DNA, 1839 bp, Artificial Sequence
  derived and/or modified sequence
atgatggagcagagaagcagagaccccggcatggtgagaagcccccagaaccagtaccccgccgagctgatgagaagattcgagctgtacttccagggccccagcagcaacaagcccagagtgatcagagaggtgagagccgacagcgtgggcaagctggtgaccgtgagaggcatcgtgaccagagtgagcgaggtgaagcccaagatggtggtggccacctacacctgcgaccagtgcggcgccgagacctaccagcccatccagagccccaccttcatgcccctgatcatgtgccccagccaggagtgccagaccaacagaagcggcggcagactgtacctgcagaccagaggcagcagattcatcaagttccaggagatgaagatgcaggagcacagcgaccaggtgcccgtgggcaacatccccagaagcatcaccgtgctggtggagggcgagaacaccagaatcgcccagcccggcgaccacgtgagcgtgaccggcatcttcctgcccatcctgagaaccggcttcagacaggtggtgcagggcctgctgagcgagacctacctggaggcccacagaatcgtgaagatgaacaagagcgaggacgacgagagcggcgccggcgagctgaccagagaggagctgagacagatcgccgaggaggacttctacgagaagctggccgccagcatcgcccccgagatctacggccacgaggacgtgaagaaggccctgctgctgctgctggtgggcggcgtggaccagagccccagaggcatgaagatcagaggcaacatcaacatctgcctgatgggcgaccccggcgtggccaagagccagctgctgagctacatcgacagactggcccccagaagccagtacaccaccggcagaggcagcagcggcgtgggcctgaccgccgccgtgctgagagacagcgtgagcggcgagctgaccctggagggcggcgccctggtgctggccgaccagggcgtgtgctgcatcgacgagttcgacaagatggccgaggccgacagaaccgccatccacgaggtgatggagcagcagaccatcagcatcgccaaggccggcatcctgaccaccctgaacgccagatgcagcatcctggccgccgccaaccccgcctacggcagatacaaccccagaagaagcctggagcagaacatccagctgcccgccgccctgctgagcagattcgacctgctgtggctgatccaggacagacccgacagagacaacgacctgagactggcccagcacatcacctacgtgcaccagcacagcagacagccccccagccagttcgagcccctggacatgaagctgatgagaagatacatcgccatgtgcagagagaagcagcccatggtgcccgagagcctggccgactacatcaccgccgcctacgtggagatgagaagagaggcctgggccagcaaggacgccacctacaccagcgccagaaccctgctggccatcctgagactgagcaccgccctggccagactgagaatggtggacgtggtggagaaggaggacgtgaacgaggccatcagactgatggagatgagcaaggacagcctgctgggcgacaagggccagaccgccagaacccagagacccgccgacgtgatcttcgccaccgtgagagagctggtgagcggcggcagaagcgtgagattcagcgaggccgagcagagatgcgtgagcagaggcttcacccccgcccagttccaggccgccctggacgagtacgaggagctgaacgtgtggcaggtgaacgccagcagaaccagaatcaccttcgtgtag

SEQ ID NO: 270301 - protein, 185 aa, Artificial Sequence
  derived and/or modified sequence
MTGFTQRATIDPELNEIHVLSGLSKDKEKREENVRNSFWIYDIVRNSWSCVYKNDQAAKDNPTKSLQEEEPCPRFAHQLVYDELHKVHYLFGGNPGKSCSPKMRLDDFWSLKLCRPSKDYLLRHCKYLIRKHRFEEKAQVDPLSALKYLQNDLYITVDHSDPEETKEAFLMWITPMLKELSSLTP

SEQ ID NO: 270302 - DNA, 558 bp, Artificial Sequence
  derived and/or modified sequence
atgactgggtttactcagagggctactatagatcccgaactcaatgagatccacgtgctttccgggctgtcaaaggacaaggagaaacgcgaggagaatgttaggaactctttctggatctacgatatcgtgcgtaattcttggtcgtgtgtttacaaaaacgatcaagcagccaaggataacccaacaaaaagtctgcaggaagaagagccctgcccgcgcttcgcgcaccagctcgtgtacgatgagctgcacaaagtgcactacttgtttggcggaaacccaggcaaatcttgctcgcctaagatgcgcctggacgatttctggtcacttaagctgtgccggccatctaaggattatctgcttagacattgcaaataccttataagaaagcaccgatttgaagagaaggcacaggtggatcctctgtctgctttgaaatatttgcagaacgacctgtatatcaccgttgatcactcagaccctgaggagacaaaggaggctttcctcatgtggattacaccaatgctgaaggagctcagcagcctaacaccctag

SEQ ID NO: 270303 - DNA, 558 bp, Artificial Sequence
  derived and/or modified sequence
atgacaggcttcacccagagggccaccatcgaccctgagctgaatgagatccacgtgctgagcggcctgagcaaggacaaggagaagcgggaggagaatgtgagaaattccttctggatctatgacatcgtgagaaattcctggagctgtgtgtacaagaatgaccaggccgccaaggacaaccccaccaagagcctgcaggaggaggagccctgccccaggtttgcccaccagctggtgtatgatgagctgcacaaggtgcactacctgtttggaggcaaccctgggaagagctgcagccccaagatgaggctggatgacttctggagcctgaagctgtgccggcccagcaaggactacctgctgcggcactgcaagtacctgatcaggaagcacagatttgaggagaaggcccaggtggaccccctgagcgccctgaagtacctgcagaatgacctgtacatcaccgtggaccacagcgaccctgaggagaccaaggaggccttcctgatgtggatcacccccatgctgaaggagctgagcagcctgaccccctag

SEQ ID NO: 270304 - DNA, 558 bp, Artificial Sequence
  derived and/or modified sequence
atgaccggcttcacccagcgggccaccatcgaccccgagctgaacgagattcatgtgttgtccggcctgagcaaggacaaggagaagagggaagagaacgtacgcaactccttctggatctatgatattgtgagaaactcctggtcatgtgtgtataagaatgatcaggccgcaaaggacaaccccaccaagagcctccaagaagaggagccttgcccccggttcgctcaccagctggtatacgatgaattgcataaagtgcactatctgttcggcgggaaccctggcaaaagctgttccccgaaaatgcgtttggatgacttctggagcctgaaactgtgtagaccatcaaaggattacctactacggcattgtaagtacctgatcagaaaacatcgattcgaggagaaggcccaagtcgaccctctcagcgctcttaagtacttgcaaaatgacctttacattactgtggatcactctgacccggaggagaccaaggaagccttccttatgtggatcacacccatgctgaaggaactcagctccctgactccttag

SEQ ID NO: 270305 - DNA, 558 bp, Artificial Sequence
  derived and/or modified sequence
atgacaggattcacacagcgcgctactattgacccagagcttaatgaaatccacgtgctgagtggcctctctaaagataaggaaaagcgcgaggagaatgtccgcaactccttttggatctacgatatagtgcggaattcctggagctgcgtctacaaaaatgaccaagccgcaaaagataacccgactaaatcgctccaggaggaggagccatgtccccgatttgcgcaccaattggtgtacgacgagctgcacaaggtccattatctgttcggcggaaacccaggaaagagctgctctcctaaaatgaggttggatgacttttggtctctaaagctgtgccgccctagcaaagattaccttctgagacactgcaaatacttgataaggaagcaccggtttgaggagaaagcccaggtcgatccactttctgccctgaaatatctgcagaatgacctctacatcactgtcgaccactctgaccccgaagaaaccaaagaggcatttcttatgtggatcacacctatgctcaaggaactgagttccttgactccctag

SEQ ID NO: 270306 - DNA, 558 bp, Artificial Sequence
  derived and/or modified sequence
atgaccggcttcacccagagagccaccatcgaccccgagctgaacgagatccacgtgctgagcggcctgagcaaggacaaggagaagagagaggagaacgtgagaaacagcttctggatctacgacatcgtgagaaacagctggagctgcgtgtacaagaacgaccaggccgccaaggacaaccccaccaagagcctgcaggaggaggagccctgccccagattcgcccaccagctggtgtacgacgagctgcacaaggtgcactacctgttcggcggcaaccccggcaagagctgcagccccaagatgagactggacgacttctggagcctgaagctgtgcagacccagcaaggactacctgctgagacactgcaagtacctgatcagaaagcacagattcgaggagaaggcccaggtggaccccctgagcgccctgaagtacctgcagaacgacctgtacatcaccgtggaccacagcgaccccgaggagaccaaggaggccttcctgatgtggatcacccccatgctgaaggagctgagcagcctgaccccctag

SEQ ID NO: 270307 - DNA, 2687 bp, Artificial Sequence
  derived and/or modified sequence
aacagatttctaaaaaatactgaaaatggcaacagccttgcaaggacagtttagcctctaaaagcagttcctttgaagagaaaatactcaattagatgtatacattctgttctgtttaaaactcagttttgtatttttctcattatacttaatgtaaaatgtatcctgttaacagtgaatactttaattggtttgggaatttgtttttattgagaatatatagtgaaaataactgtgaacacagtgttcaccaggggtttttagcatttaatgtgatgattattcagatttctctacttgaattttttaatgaatgaagatttttcaaagttaattattcatataattcctgattaataattgacagatcctaatttggggccacatgtaaaatatatgaaagctcacataacgtggcaattttttactctgagagactgcagcagttcccatctccccttaacctattgccaccaacaccattgatttgttttccagcgatggcaagccggcaggtggatattgcaactcagggctggttcattggtctgatgtgtgctgttgctctccttatcttaattttgctgattgtttgcttcatcagaagaaacaagggtggtaaatatccagttaaagaaaaggaagatgcccatgctgaccctgaaatccagcctatgaaggaagatgatgggacatttggagaatacagtgatgcagaagaccacaagcctttgaaaaaaggaagtcgaactccttcagacaggactgtgaaaaaagaagatagtgacgacagcctagttgactatggagaaggggttaatggccagttcaatgaggatggctcctttattggacaatacagtggtaagaaagagaaagagccggctgaaggaaacgaaagctcagaggcaccttctcctgtcaacgccatgaattcctttgtttaatttttaagctctttgccaatattccatttctctagaatgtttatcctaagcacttgtttgtcagccctctcatactatgaacatatgggtagagagtatattttctgctgtatgttagtattatgagaatagttacagcaaaaacataactcagtcaaatgatatgttaatatgaactggaatgcaaagtgcatactttttcattcaaaatgggtattcttgatttcctcagaactgataaaaaataatgcaacatcaccaacagatcctgttatttcctctgcaggatacagttcaatatgatgcatgaaaaatgctccacatttaaaggacatacccgtgtatgttatgaaaacatggtttgatactttgtttatactaccctcagctgaacccctatatatgaattccgttttcattgtcaagaatgttactgtagtattctctagaacttcaatgtctttgtggacattgttgtgaaattggtgactatgtatagctgtcgttagtctttttgggagactgttaggaacagtttgtacagtatatacttgctaaatgagttcattatgacagtcacattgctgatgcttactgagaactattacctactcttggctcctgttactccgtaggcttcttaatcttccaggcattacagcagcacagtgttctactttttacatcatttctatgttcggttgtttttaggcataaacaatgtgtattgcagtgcatttcggcatttgtgccatactgaaagaatcaaaaacaaatcatccaaattaaatttcaaacattatttcagagaacacagggcaagacacatacagtgccttcagatattaagcattccacaacatcgtgcattctgtatcagctggtccagtccattctgggtcctagattactgtcattgtctaaaagtaacttttaaaaagcagagttcatgaaaactgcaatgctgggaaaagaaggaaacatgaaaataaaaataagacagtttattagaaatagcatttcctcataagcataaaaagaaaatctttgttgccaactgaagcacatgatgattttgtggtcctttatggtttctattacattcagtaagaaagatgtcaacatgctagaaaattaattttaaaactaagttattccaacactaaaagcatacaacagcatgccaacagtaatatattattctccaagactttacctatgtaagtgttcaaaactctgcagcattaaacaacgtgtatgcaaattgttatggatacatttcagaatctaagaaatcaggcaagtgcttaaaaggccaacggtccaagggattacatctgcagtttaaaaagtaaatatatattctatcgtattcatttttcacagatccacctgtctcttgaaaatataaaaagacaaaacaggtttgccttggcatcagagagcacaaagattaaaagttactttaaatttgccaatattttgggagaacaataaaactacattttttcctcttccatactggtagatgcgaaatttatctgtgcatgaaagggtcacttctgtaatagtgcaacagatttggtattaaaaattaaatgtggttttaaaagttcctctctcttttgtaatttatgttcccaattgagtgtgaatgtccaagtaatggtgtatgtaatggtacaggcaaatgtgactggatttccctcaaaaaagtaactattaaacagtcttgatctc

SEQ ID NO: 270308 - protein, 840 aa, Artificial Sequence
  derived and/or modified sequence
MVSVFRSEEMCLSQLFLQVEAAYCCVAELGELGLVQFKDLNMNVNSFQRKFVNEVRRCESLERILRFLEDEMQNEIVVQLLEKSPLTPLPREMITLETVLEKLEGELQEANQNQQALKQSFLELTELKYLLKKTQDFFETETNLADDFFTEDTSGLLELKAVPAYMTGKLGFIAGVINRERMASFERLLWRICRGNVYLKFSEMDAPLEDPVTKEEIQKNIFIIFYQGEQLRQKIKKICDGFRATVYPCPEPAVERREMLESVNVRLEDLITVITQTESHRQRLLQEAAANWHSWLIKVQKMKAVYHILNMCNIDVTQQCVIAEIWFPVADATRIKRALEQGMELSGSSMAPIMTTVQSKTAPPTFNRTNKFTAGFQNIVDAYGVGSYREINPAPYTIITFPFLFAVMFGDCGHGTVMLLAALWMILNERRLLSQKTDNEIWNTFFHGRYLILLMGIFSIYTGLIYNDCFSKSLNIFGSSWSVQPMFRNGTWNTHVMEESLYLQLDPAIPGVYFGNPYPFGIDPIWNLASNKLTFLNSYKMKMSVILGIVQMVFGVILSLFNHIYFRRTLNIILQFIPEMIFILCLFGYLVFMIIFKWCCFDVHVSQHAPSILIHFINMFLFNYSDSSNAPLYKHQQEVQSFFVVMALISVPWMLLIKPFILRASHRKSQLQASRIQEDATENIEGDSSSPSSRSGQRTSADTHGALDDHGEEFNFGDVFVHQAIHTIEYCLGCISNTASYLRLWALSLAHAQLSEVLWTMVMNSGLQTRGWGGIVGVFIIFAVFAVLTVAILLIMEGLSAFLHALRLHWVEFQNKFYVGDGYKFSPFSFKHILDGTAEE

SEQ ID NO: 270309 - DNA, 2523 bp, Artificial Sequence
  derived and/or modified sequence
atggttagcgtatttcggagtgaagaaatgtgtctgtcccaattattcttacaagtagaagcggcctattgctgcgtcgccgagttgggcgagttgggtctggtgcagttcaaagacctcaacatgaacgtgaattccttccagcgaaagtttgttaacgaggtccgacgttgcgaatccctcgagcgcatcctgaggttcttagaagacgagatgcagaatgagattgtggttcagctgttggagaaatcgcccttgacacccctgccccgggaaatgatcacactggaaaccgtacttgaaaagctcgaaggcgagctgcaggaggctaatcaaaaccaacaggcactcaaacaatcttttctggagttgacggaactgaaatacctactcaagaaaacccaggatttctttgagacagaaaccaatctggccgatgacttttttaccgaggataccagcggacttctcgagctgaaggccgtacctgcgtatatgacaggcaaactgggatttatcgcaggcgtgataaatagggagaggatggcttccttcgagcggctactatggaggatttgtcgtggcaatgtgtatctcaagttttccgagatggatgcgccgctggaagaccccgtaactaaggaagaaatacaaaaaaacatctttatcatcttttaccagggtgagcagctgagacagaaaattaagaagatctgcgacgggtttcgcgctacagtgtatccatgtcctgaacctgctgtagaacgcagagagatgctagagtcggtcaatgttcgactggaagatttgattacggtgattacacagactgaatcccatagacaaaggctgctacaggaagcagcagctaactggcattcctggctgattaaggtgcaaaaaatgaaggcggtctaccatattctaaatatgtgcaacattgatgttacacaacagtgcgtaattgccgagatatggtttcccgtggctgacgcaactaggatcaaacgggctttagagcaggggatggaactgtctggaagttctatggcaccaatcatgacgacggtccagagtaaaacagctccacccacctttaacagaacaaacaagtttaccgctggcttccagaatatcgtggatgcttatggtgtaggttcctaccgcgagataaatccggcaccctacaccatcataaccttcccattcctgttcgcagtaatgttcggcgactgcgggcatggaactgttatgctgctggccgccttgtggatgatactcaacgagcgaaggctcctcagtcaaaagactgacaatgaaatctggaacaccttttttcatgggcggtatttaatcctattaatgggaatctttagcatctacacgggcctcatctacaatgattgcttcagcaaatctctgaatattttcggttctagttggtcagttcagcccatgttcagaaacggcacctggaacacacatgtgatggaagaaagcctctatctccagttagaccccgctatcccaggcgtctatttcgggaatccgtacccatttggcatcgatccaatctggaacctggctagtaataaattgacatttctgaactcttacaagatgaaaatgtccgtgatcctcgggatcgttcagatggtttttggcgtgatcctgtccctgttcaaccacatatattttagacggacgctgaatattatcctccagtttataccagagatgatctttatactgtgtctgttcggatatctagtgtttatgataatctttaagtggtgttgctttgatgtccacgtgtcccagcacgccccttccattctcatccactttataaatatgttcttgtttaattatagtgatagctccaacgccccgctgtataaacaccaacaggaagtgcagtccttttttgtagtgatggccctgatcagcgtaccttggatgctcctgatcaaaccctttatactcagagcatctcatagaaaaagtcagctccaggcctcaaggatccaggaggacgccaccgaaaatatcgaaggagactcctcgagcccttctagcaggagcggccagaggaccagcgccgacactcacggtgccctggacgatcatggcgaggaattcaactttggggatgtcttcgtacaccaggccatacatacaatcgaatactgcctgggctgtatctctaacaccgcctcgtatctgcgtctgtgggccctgagcttagcccatgctcagttgagtgaggtcctgtggacaatggtgatgaacagcgggctacaaacacgggggtggggcggaatcgtgggcgtgtttatcattttcgccgtttttgccgtcctgaccgtagctatcttacttatcatggagggtctgagtgccttcttacacgcactgcggctgcactgggtggaatttcagaataaattttatgtcggggacgggtataaattctctcctttttcatttaagcacattctggatggtactgcagaggaatag

SEQ ID NO: 270310 - DNA, 2523 bp, Artificial Sequence
  derived and/or modified sequence
atggttagcgtgtttaggagtgaggagatgtgcttgtcacagctcttcctgcaagtagaagccgcctactgttgcgtagcagagctgggtgagctgggcctggttcagtttaaggatctaaacatgaacgtcaatagcttccaaaggaagtttgtgaatgaggtgcggaggtgtgagagcctcgagaggattctccgcttcctcgaggacgagatgcaaaacgaaatcgttgtgcagttgctcgagaaaagtccactgacaccccttccgagggagatgatcaccttagaaaccgtgttagaaaagctcgaaggcgagttgcaggaggccaaccagaatcaacaggctctcaaacagagtttcctggaattgactgaactcaagtacctcctcaagaagacacaggattttttcgaaacggaaacaaatctggcagatgacttctttactgaagacacaagtggtctcctagagctcaaggctgttccagcttatatgaccgggaaactggggtttatcgccggggtaatcaacagggagaggatggcctcttttgaacgcctgctgtggcggatatgtcgaggcaacgtgtatctcaagttttccgagatggatgcaccacttgaagatccagtgacaaaggaggaaatccagaaaaacattttcatcatcttttatcagggggaacagctccgccagaagatcaagaagatctgtgatggattccgtgctacagtgtatccctgtcccgagcccgcagtggaaagacgggaaatgctggaatctgtcaacgtgcggttggaggatctcattacggtcatcacgcagacagagtctcatcggcaaagattgcttcaggaggcagccgcaaattggcactcctggctgataaaggttcagaaaatgaaggcagtctatcacattctgaacatgtgtaacattgatgttacacagcagtgcgtaatagctgagatctggtttcctgtggccgatgctactagaattaagcgggcactggaacaaggcatggaattgtctgggtcttccatggcacccattatgacaactgtgcagtccaagaccgcccccccgaccttcaacagaaccaataaatttaccgccggttttcagaacatcgtggatgcatacggcgtgggtagctaccgtgaaataaaccccgccccgtataccattatcacattcccctttctgttcgcagtcatgttcggcgactgtggacatggcactgtcatgcttctggctgctctgtggatgatcttaaatgagcgcaggctactctctcagaaaacggataacgaaatttggaacactttttttcacggacgatatctgattctactcatgggtattttcagcatctatacaggattaatctataatgattgtttctctaaatctctgaatatctttggaagcagctggtcagtacagccaatgtttcgaaacggcacctggaatacacacgttatggaggagagtctctacctgcagctagatcccgctatacccggcgtttatttcggcaacccctacccttttggaattgatccaatttggaatttagctagcaataagttgaccttcctcaatagttataagatgaaaatgagcgtgatcttaggtatcgtgcagatggtcttcggcgtgatcctctcattatttaatcacatctattttaggcggacactcaacataatcctgcaattcatccccgagatgatttttatcctttgtctgtttggatacctcgtttttatgattatctttaagtggtgctgcttcgatgtgcacgtatcccagcacgccccaagtatcttgattcactttatcaacatgttcctattcaactatagcgattccagcaacgcacccctttacaaacatcagcaggaagtccagtcattcttcgtggtgatggctctcatttcagtgccatggatgctgctgattaaaccgtttatcctccgggcctcgcacagaaaaagccagctgcaggcctctcggatccaggaagacgccaccgagaatatcgaaggagattcctcaagtccgtcctcccgcagtggccagagaaccagtgctgacacacacggcgctcttgacgaccacggtgaggagtttaattttggcgatgtattcgtccaccaggccattcatacaattgagtattgtctcggttgcatttcaaacactgcatcttacctgagattgtgggcattgtctctggctcatgcccaactgtccgaggttctgtggactatggtcatgaacagcggcctgcagaccaggggatggggcggtattgtgggcgtgttcatcatctttgcggtctttgcggttctaacggttgctatactgcttattatggagggactaagcgctttcttgcatgcactgcgtcttcactgggtcgagtttcaaaacaagttctatgtaggggatgggtataaattcagcccgttcagtttcaaacatatcctagacggcacagcagaggagtag

SEQ ID NO: 270311 - DNA, 2523 bp, Artificial Sequence
  derived and/or modified sequence
atggtgagcgtgtttcgctccgaagagatgtgcctctcccagttgttcctgcaggtggaagcggcttattgctgcgtcgccgaactaggggagctcgggctcgtgcagttcaaagatctgaacatgaacgtaaatagcttccagcgcaagtttgtgaatgaggtacgacggtgcgagtcacttgagcggattctgaggttcttggaagatgagatgcaaaatgaaatcgttgtacagctgctcgaaaagagccccctgacgcccctcccgcgtgaaatgataactcttgaaactgtcctcgagaaactggaaggggaactacaggaagccaaccagaaccagcaggccctaaagcagtctttcttggagctgactgaactcaaatacctgctaaaaaagacccaggatttctttgaaacagaaaccaatttggccgatgacttctttactgaagacacctcaggtcttttggaactgaaggctgtcccggcatatatgactgggaagctcggctttatcgccggagtcatcaacagagaacgcatggcatccttcgagaggttgttgtggagaatctgccggggtaatgtgtatttgaaattttcagaaatggatgcacccctagaagacccagtgacaaaggaagaaatacagaagaacatctttataatcttttatcaaggcgaacagctgagacagaagatcaaaaaaatctgcgatgggttccgggcgacagtgtatccgtgccctgagccagcggtggagaggagggagatgctggaaagtgtgaacgtgaggcttgaggacttgataaccgtcatcactcagacagaaagtcacaggcaaagattgctacaggaggcagcagcaaactggcatagctggctgatcaaggtacagaagatgaaggccgtgtatcatatcctgaatatgtgtaacatcgacgtcacccagcagtgcgtcatcgccgagatttggtttccggtggcagatgcaacccgtatcaagagggccctggaacagggcatggagctgtccgggagctctatggcgccaataatgacgactgtgcagtcgaagactgcccctccaacgtttaacagaaccaataagtttacagcgggatttcaaaacattgtcgacgcctacggcgttgggagttatcgtgaaatcaatcctgcaccgtatacaattattaccttcccgttcctctttgccgtgatgtttggggactgcggacatggcacagtcatgttactggctgccctctggatgatattaaatgagcggagactgttgtctcagaaaaccgataatgagatctggaatactttcttccacggaagataccttatcctgctgatgggcatcttctctatctacaccggactgatctacaatgattgcttttctaagtctctgaatatctttgggtcttcatggagtgtgcagcccatgttccggaacggaacatggaatacccatgtcatggaagaaagtctgtacctacaactggatcctgcgatccctggagtgtattttgggaacccatatccattcggaattgaccctatttggaatctggcttcaaataagctcacattcctgaactcttataaaatgaagatgtccgtgatcctgggcattgtccagatggtgttcggtgtgatactctctctgtttaaccacatctatttcagacgcactctgaatatcatcctccagtttatcccggagatgatttttatcttatgcctgtttggatatctcgtctttatgataattttcaaatggtgctgtttcgatgtgcacgtttctcagcacgccccttccatactcattcacttcataaatatgtttctttttaattacagcgacagttctaatgccccgctatacaagcaccaacaggaagtacagtccttttttgtggtaatggctctgattagtgtgccttggatgctgctaataaagccgttcatcctccgagcgagccacaggaagtcacagttgcaggcctcccgcatccaggaggacgctacagagaatatcgaaggggactcatcatccccttcttcccgctcaggacagcgcacaagtgcggacacccacggagccctggacgaccacggtgaggagttcaattttggtgatgtatttgtgcatcaggccatacataccatcgagtactgtctagggtgtatcagcaataccgcgtcctacctcaggctgtgggctctctctttggctcacgcccagctgtcagaagtcctgtggacaatggttatgaattcgggcttgcaaactcgcggttggggggggatcgtcggggtgttcatcatcttcgctgtttttgcagtgctgacggtcgcaatcctgctgattatggaaggcctatccgccttcctgcacgctctgagattacattgggtcgaatttcaaaacaagttctacgtgggtgatggatacaagttttcaccatttagttttaaacatattcttgacggcacggccgaggaatag

SEQ ID NO: 270312 - DNA, 2523 bp, Artificial Sequence
  derived and/or modified sequence
atggtgtctgtgttccgctctgaggagatgtgcctgagccagctgttcctgcaggtggaggccgcctactgctgcgtggccgagctgggggagctgggcctggtgcagttcaaggacctgaacatgaatgtgaacagcttccagaggaagtttgtgaatgaggtgcggcgctgtgagagcctggagcgcatcctgcgcttcctggaggatgagatgcagaatgagatcgtggtgcagctgctggagaagagccccctgacccccctgccccgggagatgatcaccctggagaccgtgctggagaagctggagggggagctgcaggaggccaaccagaaccagcaggccctgaagcagagcttcctggagctgacagagctgaagtacctgctgaagaagacccaggacttctttgaaacagagaccaacctggctgatgacttcttcacagaggacaccagcggcctgctggagctgaaggctgtgcctgcctacatgaccgggaagctgggcttcatcgccggggtcatcaaccgggagaggatggccagctttgagcggctgctgtggaggatctgcagaggaaatgtgtacctgaagttcagcgagatggatgcccccctggaggaccctgtgaccaaggaggagatccagaagaacatcttcatcatcttctaccagggcgagcagctgcggcagaagatcaagaagatctgtgatggcttccgggccaccgtgtacccctgcccagagcctgctgtggagcggcgggagatgctggagagcgtgaatgtgcggctggaggacctgatcaccgtcatcacccagacagagagccaccggcagaggctgctgcaggaggccgccgccaactggcacagctggctgatcaaggtgcagaagatgaaggctgtgtaccacatcctgaacatgtgcaacattgatgtgacccagcagtgtgtgattgctgagatctggttccctgtggctgatgccacccgcatcaagagggccctggagcagggcatggagctgagcggcagctccatggcccccatcatgaccaccgtgcagagcaagacagccccacccaccttcaacagaaccaacaagttcaccgctggcttccagaacatcgtggatgcctatggagtgggcagctaccgggagatcaacccagccccctacaccatcatcaccttccccttcctgtttgctgtgatgtttggagactgtggccacggcaccgtgatgctgctggccgccctgtggatgatcctgaatgaaagaaggctgctgagccagaagacagacaatgagatctggaacaccttcttccacggccgctacctgatcctgctgatgggcatcttcagcatctacacaggcctcatctacaatgactgcttcagcaagagcctgaacatcttcggcagctcctggagcgtgcagcccatgttcagaaatggcacctggaacacccacgtgatggaggagagcctgtacctgcagctggaccctgccatccctggggtgtacttcggcaacccctaccccttcggcatcgaccccatctggaacctggccagcaacaagctgaccttcctgaacagctacaagatgaagatgtctgtcatcctgggcatcgtgcagatggtgtttggagtcatcctgagcctcttcaaccacatctacttccggaggaccctgaacatcatcctgcagttcatccctgagatgatcttcatcctgtgcctgtttggctacctggtgttcatgatcatcttcaagtggtgctgctttgatgtgcacgtgtcccagcacgcccccagcatcctgatccacttcatcaacatgttcctgttcaactacagcgacagcagcaatgcccccctgtacaagcaccagcaggaggtgcagagcttctttgtggtgatggccctgatctctgtgccctggatgctgctgatcaagcccttcatcctgcgggccagccacaggaagagccagctgcaggccagccgcatccaggaggatgccacagagaacatcgagggggacagcagcagccccagcagccgcagcggccagaggaccagcgctgacacccacggggccctggatgaccacggggaggagttcaactttggagatgtgtttgtgcaccaggccatccacaccatcgagtactgcctgggctgcatcagcaacacagccagctacctgcggctgtgggccctgagcctggcccacgcccagctgtctgaggtgctgtggaccatggtgatgaacagcggcctgcagacccggggctggggcggcatcgtgggcgtcttcatcatctttgctgtgtttgctgtgctgactgtggccatcctgctgatcatggagggcctgagcgccttcctgcacgccctgcggctgcactgggtggagttccagaacaagttctacgtgggagatggctacaagttcagccccttctccttcaagcacatcctggatggaacagctgaggagtag

SEQ ID NO: 270313 - DNA, 2523 bp, Artificial Sequence
  derived and/or modified sequence
atggtgagcgtgttccggagcgaggagatgtgcctgagccagctgtttctgcaggttgaggctgcttactgttgtgtcgcagagctgggagagctggggcttgtacagttcaaggacctgaacatgaatgtcaatagtttccagagaaagttcgtaaatgaagttcggaggtgtgaatctctagagaggatcctgcgcttcctggaggacgaaatgcagaacgaaattgtggtgcaactgctcgagaagagccctttgacgcccctgccacgggaaatgatcacactggagaccgtgttagaaaagctggagggcgagttgcaggaggcaaatcagaatcaacaggctctcaagcagtcctttctggagttgacagagttgaagtacctgttgaagaagacccaggactttttcgaaactgaaacaaacctagcagatgacttctttaccgaggataccagcggactacttgaactgaaggctgtccccgcttacatgaccggcaaactgggcttcatcgccggggtaattaaccgggagcggatggcatccttcgagagactcctttggcggatctgtcgaggcaacgtatacttgaaattttccgaaatggacgctccattggaagatccagtcaccaaagaggaaatccaaaagaatatattcataatcttctatcagggagagcaactcagacaaaaaattaagaaaatctgcgacggtttccgcgccaccgtatacccatgtccagagccagctgtggaacgacgggaaatgctggagagcgtcaatgttcggctggaagacctgattacagtaattactcagacagagtcacatagacaacgacttctgcaagaagctgctgctaattggcacagctggctgataaaagtgcaaaagatgaaagccgtttatcatatcctcaacatgtgcaatattgacgtcacccagcagtgcgtcattgcggagatctggttcccagtcgccgacgccacgagaataaagagagccctggaacaagggatggagctgagtggctccagtatggcgccaattatgacaacggtccagagtaaaacagcccccccgactttcaacaggaccaataaattcacagctgggtttcagaacatagtggacgcctacggtgttggatcttaccgtgaaatcaatccagcaccatacactattattacgttcccgtttctgttcgcggttatgttcggcgattgcggccacggcactgtcatgctgcttgctgcactctggatgatcctgaacgagcgccgactgctgtctcaaaagacggataatgagatctggaataccttcttccacggacgctacctaatccttttgatgggcatcttcagcatctacaccggactcatctataatgactgcttcagcaaaagcttgaacatttttggctccagctggtcggtgcagcccatgttccgaaacggcacatggaatacccacgtcatggaggagtctctctacctgcaactagacccagctataccaggggtatatttcggcaatccatatccctttggcatagatccgatatggaacctggcaagcaataagttaaccttcctaaattcatacaaaatgaaaatgtccgtgattttgggcatcgtgcaaatggtattcggcgttattctgagtctcttcaaccatatttacttccggaggacactgaatatcatacttcagtttatccccgagatgatctttatcctctgcctgtttggttacctggtatttatgataattttcaaatggtgctgctttgatgtacatgtgagccagcatgccccttcgatcctgattcacttcattaacatgttcctcttcaactattccgatagcagtaacgcccctctctacaaacatcagcaggaagttcagtccttctttgtagtaatggccctaatctcagttccttggatgctgctcataaagccattcatactacgcgctagccaccgtaagtcccagctgcaagccagtaggatacaggaagacgccaccgagaacatagagggagattcttctagtccatcaagtaggtctgggcaacgcacttcagccgacacacacggggctttagacgatcacggcgaagaatttaattttggcgatgtgtttgtgcaccaggctattcacacaatagaatactgcctgggatgtatctccaacacagccagttatctgagactatgggcactgagtctggcccacgcccaactcagtgaggtgctttggacaatggtaatgaactctggtctgcaaaccagaggatgggggggaatcgtgggagtgtttatcatctttgctgtatttgcagttcttacagtcgctatactcctcattatggagggactttctgcctttctgcacgccctgcggctgcattgggtagaattccagaacaaattctatgttggcgatggctataagttctctccttttagcttcaagcacattcttgatggaacagccgaagagtag

SEQ ID NO: 270314 - DNA, 2523 bp, Artificial Sequence
  derived and/or modified sequence
atggtgagcgtgttccggagcgaggagatgtgcctgagccagctgtttttgcaggtggaagcagcctactgttgtgtggccgaactcggcgagctaggcctggttcagttcaaagatttaaatatgaatgtgaattccttccagcggaagttcgtgaatgaagtgcgcaggtgcgagtcactcgagaggatcctgcgcttccttgaggacgagatgcaaaatgagattgttgtgcagctcctagaaaagtctcccctgactccactgccacgagagatgattactctggaaactgttctcgagaagctcgagggagaattacaggaggcgaatcagaatcagcaggctctgaagcagtcttttctggagctgacagaattaaaatacttattgaagaaaacacaagacttttttgaaactgaaaccaatctcgctgatgatttttttacagaagacactagtggccttcttgagttgaaggccgtcccggcttatatgaccggaaaactcgggttcatcgctggggtcattaatcgggaaaggatggccagctttgaacgattattatggagaatctgccgaggcaatgtctacttgaaatttagtgaaatggatgcgccattagaagaccctgtgaccaaggaagagatccagaagaacattttcataatcttctaccagggggaacaactgcgacagaagattaagaagatatgtgatggctttagagctaccgtgtacccctgtccagagcccgcggtggaaaggagggaaatgctggaatctgtgaatgtacggctggaggatttaataaccgtaattacccagactgagtcccatcgtcagagactgctgcaggaagccgccgccaattggcacagttggctgatcaaggttcagaaaatgaaagctgtctaccatatcctgaatatgtgcaacatcgacgtcacccagcaatgtgtgatcgcagagatctggtttcccgtggccgacgctactaggatcaaacgcgctctagagcaggggatggagctgtcgggctcctctatggcacctatcatgaccactgttcagagcaaaactgccccacccacatttaaccggacaaacaagtttaccgcaggcttccagaatattgtggacgcttacggagtcgggtcctaccgtgagatcaacccagccccctacaccattatcacttttccgtttcttttcgcagtgatgttcggagactgcggccacggaacggtaatgttgctcgcggctctgtggatgatcctcaatgagcgccgcctactatcccagaagaccgataatgaaatttggaatacgttttttcatggcaggtatctgatattattaatgggtatattctccatatacacaggcctgatttataatgactgtttcagtaagtctttgaacatcttcgggtctagctggtcagtacaacctatgttccggaatggcacgtggaacacacacgtgatggaggagtcactatacctccagctcgatccagcaatccctggggtgtactttgggaatccctatcctttcggcatcgaccctatctggaacctggccagcaacaagttaacatttctcaattcttacaagatgaagatgtctgtgatcctggggatagtccaaatggtgttcggggtcatcctgtctttgttcaaccacatctactttaggaggactctgaacatcattctccagtttattccggagatgatattcatcctgtgtcttttcgggtacttagtctttatgataatctttaagtggtgttgctttgacgtgcatgtttcacaacatgctccctcgattctgatccacttcattaacatgttcctgtttaattacagtgattcctccaacgccccactgtacaaacaccagcaggaggtccagagcttcttcgtggtcatggccctgatcagcgtgccctggatgctcttaattaagccattcattctcagggccagccacaggaaaagccagcttcaggcctcacggattcaagaggatgctacagagaacatcgagggagattcaagttctcctagcagcaggagcggtcagaggacatccgccgatacacacggggctctagatgatcacggagaggagtttaacttcggagacgtcttcgtgcatcaggctatccatactatcgagtattgcctaggctgcatttctaacactgcctcatatttgcgcttgtgggccctgtccctggcacacgcccagctgtctgaagtgttatggaccatggtaatgaactctggcctgcagacccggggctggggcggcattgtgggtgtgttcatcatcttcgcagttttcgctgtgctcaccgtggcgatcctcttaatcatggaaggactgtctgcctttctgcacgcactgcgtctccactgggtcgaattccagaacaagttctatgtaggggacgggtataagttctcccccttttcctttaagcacatcctggacgggacagccgaagaatag

SEQ ID NO: 270315 - DNA, 2523 bp, Artificial Sequence
  derived and/or modified sequence
atggtgagcgtgttccggagcgaggagatgtgcctgagccagctgttcctgcaggtggaggccgcctattgctgcgtagccgaactgggtgagctcggactggttcagtttaaggatctgaatatgaatgtaaatagctttcagaggaaatttgttaatgaagtccgtcgctgtgagtcattggaacgcatccttcggttcttggaagatgaaatgcagaatgagatcgttgtgcagttgcttgaaaaatcccccctcacacctctcccccgtgaaatgattaccttagaaactgtgctcgagaagctggaaggcgaactacaggaagccaaccagaaccagcaggcactcaagcagtcttttctggagctgaccgagcttaagtacctgctgaaaaagactcaggacttttttgagaccgaaaccaatttagccgatgatttcttcacagaagataccagtggcctccttgaactgaaagccgttccagcttacatgactgggaaactcggattcattgccggcgtgataaatagggagaggatggcttctttcgaaaggctgctttggcgcatttgcagagggaacgtctaccttaagttctccgagatggatgcaccactcgaggatccagtgacaaaggaagaaatacagaagaacattttcatcattttctatcaaggagagcagctcagacaaaagattaagaagatatgcgatggctttcgcgctaccgtctatccctgccccgaacccgccgtggagcggcgagaaatgctcgagtcagtgaatgtgagactagaagacttgataacagttataacgcagacagagtctcacagacagagactcctgcaggaagcagctgccaattggcattcttggctgatcaaggtccagaaaatgaaggccgtctatcatattctaaatatgtgtaatatcgacgtgacacagcagtgtgtgatagcagaaatttggttcccagtggctgacgctacgagaattaaacgggcattggagcaggggatggagctgtctggcagttctatggcccccatcatgactactgtgcagagtaagaccgctccaccgaccttcaaccgtacaaacaagttcacagctggattccagaatatcgttgatgcttacggtgttggatcctaccgggaaataaaccccgccccctatacgatcatcacttttcctttcctttttgccgtgatgttcggcgactgtgggcacggtactgttatgttgttggccgctctgtggatgattctgaacgagagacggctcttatcccagaagacagataatgagatctggaatacattcttccacggacgttatctaatcctgttgatggggatattcagtatttacaccgggctgatatataatgactgtttcagcaaatcccttaacatttttggtagtagttggtctgttcagcccatgtttcgaaatggaacttggaatactcacgtcatggaggaatcgttgtatctccaacttgacccagcgataccgggcgtgtatttcggaaatccctatccattcggaatcgatccgatttggaacctggcgagcaataaactaacatttctgaattcttataagatgaaaatgtctgtcattctgggcatcgtccagatggtgttcggcgtaatcttgagcttgttcaatcatatttatttccgtcggaccctgaacatcattttgcagttcatcccagagatgatctttattctttgtttgttcgggtacctggtgtttatgataatctttaaatggtgttgctttgatgtccatgttagccagcacgccccctcaattctcattcacttcataaatatgttcctgtttaactactctgacagctccaacgccccattgtataagcatcagcaggaagttcagtctttctttgttgtaatggccctgatctcagtgccgtggatgcttcttatcaagccgttcatactccgggctagtcaccgtaagagtcagctgcaagcctcccgcatccaggaagatgccactgaaaatatagaaggagacagttcctcacccagttccagaagcggacagcgcacaagcgcagacacacacggcgccctcgatgaccacggagaagaattcaattttggagacgtgtttgtgcatcaggcaatccacaccatcgagtactgtctggggtgcatcagcaataccgcatcctacttgaggctctgggcgttgagtctagcccatgctcaactgtcggaggtgctctggactatggtgatgaactctggtcttcagactagaggttggggcggtatcgtgggcgtctttataattttcgccgtttttgcagtgctgaccgtagctatcttacttatcatggagggcttatcggcctttctgcatgctctgcgcctgcattgggtagagtttcaaaataaattctatgtcggggacggctacaagttctcacccttcagctttaaacatatcctggatggtactgcagaagaatag

SEQ ID NO: 270316 - DNA, 2523 bp, Artificial Sequence
  derived and/or modified sequence
atggtgtctgtcttccggtcggaggaaatgtgtctgtctcagctatttctgcaggtcgaggccgcttactgttgcgtggcagagctcggggagcttgggctagttcagttcaaagaccttaatatgaatgtgaacagctttcagcggaaatttgtgaatgaggtgcggagatgtgagagcctggaaagaattctgaggttcttagaagatgagatgcagaacgagatcgtagttcaactcctggaaaaaagccccctcactccactgccacgagagatgataacactggagacagtcttagagaaactggaaggggagcttcaggaggccaaccagaaccaacaggcgctcaagcagtctttcctagaactcaccgaactgaagtacttgctgaaaaaaactcaggacttttttgagacagaaaccaatttagcggatgatttctttacagaagatacctctgggctgcttgaactgaaggcagtgccagcttacatgacagggaagttgggtttcatagccggtgttattaatcgcgaacggatggcttccttcgaacgtctgctctggcgcatctgccgcggtaacgtctaccttaagttttctgagatggacgcacccctggaggatcctgtcactaaggaagagatacagaagaacatctttattatcttctaccagggagaacaattaaggcagaaaatcaagaaaatctgcgacgggttcagggcaacagtgtatccctgccccgaacctgccgtagaacgccgtgagatgctcgagtccgtgaatgttagactggaagatctgataacagtgatcacccaaaccgagagtcataggcagagactgctgcaggaggctgccgctaactggcactcctggctcatcaaagtgcagaagatgaaggccgtgtaccacattctgaacatgtgtaacatcgatgtgacgcagcaatgtgtgattgctgagatttggtttccagttgcagatgccacccggataaaacgagcactcgaacagggcatggaactcagtggatcttccatggcgccaatcatgaccaccgtgcaatcaaaaaccgccccacctacgtttaacagaacaaacaagttcaccgctggctttcaaaacatagtggatgcctacggagtaggatcatatagagaaattaatccagcgccttataccatcatcacattcccatttctcttcgcagtaatgttcggggattgtggacatggaaccgttatgctactagccgctctgtggatgattctaaacgagcggcgtctgctcagccaaaagacggataatgaaatttggaacacttttttccacgggaggtatttgatcctgttaatgggcatattcagcatttatactgggctgatctacaatgactgtttttccaagtctctgaatatattcggttcatcctggagtgtgcagccaatgtttcgcaacggcacctggaatacccatgtaatggaggaaagcctttaccttcagctcgatccagctatccctggggtgtactttggaaatccgtatcccttcgggattgaccctatttggaatctggcgtctaataaactcacttttttaaatagctataagatgaaaatgtctgttattttaggcattgtgcagatggttttcggagtgattcttagcttattcaatcatatttacttccggcgtaccctgaacatcatcttacagttcatacccgaaatgatcttcatcctttgcctcttcggctatctcgtattcatgattatcttcaagtggtgctgttttgacgtccacgtgagtcagcatgccccttccattctgatccattttatcaatatgtttctgttcaactactccgactctagtaacgctccactgtataagcaccagcaggaagtgcagtcatttttcgtcgtgatggcattgatctccgtgccttggatgctccttataaagccattcatcttacgagccagccaccgcaaaagccaactgcaggccagcaggattcaagaggacgcaaccgaaaatatcgaaggggacagctcctctcctagcagtcgatcagggcagcggactagcgctgatacacacggtgctttggacgatcatggagaggaattcaatttcggggatgtattcgtccatcaggctatccacaccatcgagtattgcttagggtgcatctccaacactgcaagctacctgcgcctgtgggcactctctttagctcacgcccaactgtctgaagtcctgtggacaatggtcatgaactccggactgcagactagaggctgggggggaattgtgggcgtcttcataatttttgccgtctttgccgtattgaccgttgctatcctgcttattatggaggggttgagtgcctttctccacgccttgcgacttcattgggtggaatttcagaataagttttacgtcggcgatgggtataaatttagccccttcagcttcaagcacatactggatggaaccgccgaggaatag

SEQ ID NO: 270317 - DNA, 2523 bp, Artificial Sequence
  derived and/or modified sequence
atggtaagtgtgtttcgctccgaggagatgtgtctcagccagctgttcttgcaagtggaggctgcgtattgctgcgtggcggagctaggcgagctgggattagtacagtttaaggatttgaacatgaacgtgaactccttccagaggaaattcgtgaacgaagtgcggaggtgcgagagtctggaacgaatccttagatttcttgaggacgagatgcagaacgagatcgttgtgcagcttctcgagaagtcccccctgactcctttgcctcgagagatgataacactggagaccgtgctggagaagctagaaggtgagttgcaggaggccaaccagaatcagcaagccttgaagcagtcattcttagaactcacggaattgaagtatttgctgaagaaaacccaggacttcttcgagacagaaactaacttagcggatgacttcttcactgaggataccagcggattgctcgagcttaaagctgtccctgcatatatgacggggaagttgggattcatcgcaggtgtgatcaatcgagagcgtatggctagcttcgagaggttactgtggaggatttgtagaggcaacgtgtacttaaagttctctgaaatggatgccccactcgaagaccccgtcaccaaagaagaaattcaaaaaaatatcttcattatattttatcagggtgaacagctgcgccaaaaaatcaagaagatttgcgatggattccgggcaacggtctatccgtgtcccgaaccagccgtggagaggagggagatgcttgagtctgtgaatgtgcgactggaggatctgattaccgtgattacccagacagagtctcacagacagaggctgctacaagaagccgcagctaattggcactcttggttaataaaagttcagaaaatgaaagccgtgtaccacatactgaacatgtgtaatatcgacgtgacacagcagtgcgtgattgcagaaatctggttcccagtggcggatgccactcggattaagcgagctctggaacagggaatggaactgtccggttcgagcatggcacccattatgacaaccgtgcaatccaaaaccgctcctcctacgtttaatcggactaataagttcacagccggattccagaatatagtcgatgcgtacggtgtcggcagctatcgtgaaattaaccctgctccctatacaataatcaccttccccttcctgttcgcggtgatgttcggcgattgcggccacggcactgtgatgctgttagctgctctttggatgattctgaacgaacgtaggctgctctctcagaaaactgataatgaaatttggaataccttttttcacggcagatatctaattctcctgatggggatttttagcatctataccggcctgatttataatgattgctttagtaagagtctgaatatttttggttcctcatggagtgtacaacccatgtttcgaaatggaacctggaatactcatgtaatggaggaatcattgtatttgcagcttgacccggcaatcccaggagtttacttcggtaacccttaccctttcggcatagatccaatctggaacctcgctagcaataaactgacattcctgaactcctataagatgaaaatgagtgtgatacttgggattgtgcagatggtgtttggcgttatcctgtcactttttaatcatatatatttccgcagaacgcttaacatcatcctgcaatttattccagaaatgatcttcatcctgtgcctgttcgggtacctcgttttcatgattatatttaagtggtgctgctttgacgtacatgtatcacagcacgcacccagcattctgatacatttcatcaatatgttccttttcaactacagtgactctagcaacgctcccctgtataaacatcagcaggaggtccagtcctttttcgtggttatggcactgatttcggtcccatggatgttgttaattaaacctttcatcttaagagcaagtcatcgtaagagtcagctccaagctagcagaattcaggaagacgctactgaaaatattgagggagattccagtagcccctctagccggtcagggcagcgaaccagcgctgatacacacggggcactcgatgaccacggggaggaatttaatttcggcgacgtattcgtacaccaggctatacatacaattgagtattgtctcggctgtatcagtaacacggcctcatatctgagactatgggctctgtcactagctcacgcacaacttagcgaagtactctggaccatggtgatgaactcgggactgcagacccgcggttgggggggtatcgtcggcgtgtttattatcttcgccgtgtttgccgttcttacggttgccattcttctgataatggaggggttgtcagctttcctgcatgctttgcgacttcattgggtggagttccagaataagttctacgtgggcgacggatacaaattcagccccttttcctttaaacatattctggatggcactgccgaagaatag

SEQ ID NO: 270318 - DNA, 2523 bp, Artificial Sequence
  derived and/or modified sequence
atggtgagtgtgttcaggagtgaggagatgtgtctgtcccagctttttctgcaagtggaggccgcttattgttgcgtcgcagaattgggtgaattaggattggttcaattcaaggacctaaacatgaatgtgaatagctttcagagaaaatttgtcaacgaagtccgcagatgtgagtccctggaaaggatcctgagatttctcgaggatgaaatgcagaacgaaattgtggtgcaattgttggaaaaaagccctctcacaccacttccgcgtgaaatgatcaccctggaaaccgtgcttgagaaactggagggggagctccaggaagccaaccagaaccaacaagctctcaagcaatcattcctggaactgactgagcttaagtatctattgaaaaagacccaggatttttttgagactgaaaccaacctggcggacgacttctttacggaggacacttccggactgctggaattaaaggcagtacccgcatacatgacggggaagctcggctttattgcaggggtgatcaaccgtgagaggatggcctcctttgaaaggctgctgtggcgcatctgccggggtaacgtgtaccttaaatttagtgaaatggatgctccactggaagaccccgtgacaaaagaggagatacaaaagaatatcttcatcatcttctaccagggagagcagctgcggcaaaaaattaagaaaatctgtgatgggttccgggctacagtgtacccatgtcccgaaccagccgtcgagagacgagagatgttggaatctgtcaacgtcaggttggaagacctcataaccgtgataactcagactgagtctcatagacagagactgctgcaggaggcagcagcgaattggcacagttggctcatcaaggttcaaaaaatgaaggctgtgtatcacattctgaatatgtgcaatatcgacgtgactcaacagtgtgtgatcgcggaaatttggttccctgtggctgatgccaccagaattaagcgcgcactggagcaaggtatggaactgtctggaagctcgatggcacctataatgactactgtgcagtcaaagaccgcccctccaacctttaaccgcactaacaagttcaccgcaggatttcagaacattgtagatgcctacggtgtagggtcttatcgtgagatcaatcccgcaccttacactattattacctttccttttctgtttgcagttatgttcggagactgcgggcacggcaccgtcatgttgctagctgcactgtggatgattttgaacgagcgaagactcctttcccagaaaacagacaacgagatttggaataccttcttccacggacggtatctgattctgctcatgggaatattttctatatacactgggctcatctacaatgattgcttctctaagagcctgaacatctttgggtcgagttggtcggttcagccgatgttccggaatgggacctggaacacccacgtcatggaggaatccttatatcttcaactggatcccgctatacctggcgtatattttggcaacccatatccgtttggaattgaccctatttggaatctggccagtaataagttgacattcctcaactcatataaaatgaagatgtctgtcatcctgggcatagtacaaatggttttcggagttattctctctctgtttaatcacatttattttagacgtactctgaatatcatcttgcaatttattcccgagatgatatttatcctatgtctattcggatatctagttttcatgatcatcttcaagtggtgctgtttcgatgtgcacgtgtcacagcatgcaccgtccattctcatccacttcattaacatgtttctgtttaactattccgattcttctaatgcccctctgtacaaacatcagcaagaggtccagtctttttttgtggttatggccctgatcagcgtaccatggatgcttcttatcaagccttttattctcagagcaagccacaggaagagtcagctccaggctagccggattcaggaagatgccacggaaaacatcgagggagatagctcaagtcccagctcccggtccgggcaacggacgtccgctgacacgcacggtgccctggacgaccatggggaagagttcaacttcggcgacgttttcgtgcatcaggcaatacacacgattgaatattgcctaggatgtatctcaaatactgcttcatacctgaggctttgggctttaagcctggcccacgcccagttgagtgaggtgctgtggactatggtgatgaacagtggcctgcagacacgtgggtggggcggtatcgttggagtcttcatcatcttcgcggtatttgcagtactgaccgtcgcaatcctattaatcatggaaggactctcagcattcctgcatgctctccgtctacattgggtggagtttcagaacaagttctacgtgggggacggttacaaattttcacccttctcctttaaacacatactggacggaacagccgaggaatag

SEQ ID NO: 270319 - DNA, 3135 bp, Artificial Sequence
  derived and/or modified sequence
ataacgctacctgccgagcaagccgagtggagggaggcaaaggccaggctgaggatcagggtggcccgggtggcagcggggaggcgctgcatgctggaggctgtgctgagtgcccggtgcaggtgagccggtcctgcggagttgtgccgagtgcctgctgcagtctcatttccagttcctccatgacgtggcaagtgaagacaggaatgaaaggaatgtaaagcagcttttctctgaagagaagaagagagagagacacagccaagaccgaggctgggccaagatggtgtctgtgtttcgaagcgaggagatgtgtttgtcacaactgtttctccaggtggaagctgcatattgctgtgtggctgagctcggagagctcggattggttcagttcaaagatttaaatatgaatgtgaacagctttcaaaggaaatttgtgaatgaagtcagaaggtgtgaatcactggagagaatcctccgttttctggaagacgagatgcaaaatgagattgtagttcagttgctcgagaaaagcccactgaccccgctcccacgggaaatgattaccctggagactgttctagaaaaactggaaggagagttacaggaagccaaccagaaccagcaggccttgaaacaaagcttcctagaactgacagaactgaaatacctcctgaagaaaacccaagacttctttgagacggaaaccaatttagctgatgatttctttactgaggacacttctggcctcctggagttgaaagcagtgcctgcatatatgaccggaaagttggggttcatagccggtgtgatcaacagggagaggatggcttcctttgagcggttactgtggcgaatctgccgaggaaacgtgtacttgaagttcagtgagatggacgcccctctggaggatcctgtgacgaaagaagaaattcagaagaacatattcatcatattttaccaaggagagcagctcaggcagaaaatcaagaagatctgtgatgggtttcgagccactgtctacccttgcccagagcctgcggtggagcgcagagagatgttggagagcgtcaatgtgaggctggaagatttaatcaccgtcataacacaaacagagtctcaccgccagcgcctgctgcaggaagccgctgccaactggcactcctggctcatcaaggtgcagaagatgaaagctgtctaccacatcctgaacatgtgcaacatcgacgtcacccagcagtgtgtcatcgccgagatctggttcccggtggcagatgccacacgtatcaagagggcactggagcaaggcatggaactaagtggctcctccatggcccccatcatgaccacagtgcaatctaaaacagcccctcccacatttaacaggaccaataaattcacagctggcttccagaatattgttgatgcctatggtgtcggcagctaccgggagataaacccagccccctacaccatcatcactttccccttcctgttcgctgtgatgtttggagactgtggtcatggaaccgtgatgctcctggctgcactttggatgattctgaatgagagacgcttgctctcccagaagacagacaatgagatttggaacaccttcttccacgggcgctatctgatcctacttatgggcatcttctccatctacacgggtttgatctacaatgactgcttctccaagtccttgaacatctttggctcttcttggagtgtccaacccatgttcagaaacggcacatggaatactcatgtaatggaggaaagtctatatctgcagctggacccagccataccaggagtgtattttggaaatccatacccgtttgggattgatccgatttggaacttggcttcaaacaaactcacatttctgaactcgtataaaatgaagatgtcggtgatcctgggaattgtccagatggttttcggtgtcatcctcagccttttcaatcacatatacttcagaagaactctcaacatcattctgcaatttatccctgagatgatttttatcctgtgtctgtttggatacctggttttcatgatcattttcaaatggtgctgctttgacgtccatgtatctcagcacgcccccagcatcctcatccacttcatcaacatgtttctgtttaactacagtgactcttccaacgcacccctctacaaacatcagcaagaagtccaaagtttctttgtggttatggctttgatttctgtgccgtggatgcttctgattaagccgtttattcttagagccagtcatcggaaatcccagctgcaggcatccaggatccaagaagatgccactgagaacattgaaggtgatagctccagcccttctagccgttctggccagaggacttctgcagatacccacggggctctggacgaccatggagaagagttcaactttggagacgtctttgtccaccaagccatccacaccatcgagtactgcctgggctgcatttcaaacacagcctcctacctgcggctctgggccctcagcctggctcatgcacaactgtctgaagtgctctggactatggtgatgaacagcggccttcagacgcgaggctggggaggaatcgtcggggtttttattatttttgccgtatttgctgtcctgacagtagccatccttctgatcatggagggcctctctgctttcctgcacgccctgcgactgcactgggttgagttccagaacaagttctatgtcggggatggttacaagttttctccattctcctttaaacacatcctggatggcacagccgaggagtaggctgagggctgcacctcccacggtggtcaccatgccaatgaaggaagttcagtcttgtctttgatatcagcccctgcaaggcgctcaatgggaaggttgttcttggctcacctgaagcatgaaactgtgtattatttggacgtcagcctgtggatttgatacgacttaaccacgtcagaggaaggactttggcaagtgatattgtcttcatgtggggtattaattctcaaataataaagtaattgacaaatgaggggagaatgctaaacagatgtcttcttgcaatattttaaatattgtatttgagaaaataaacatctgagtcattc

SEQ ID NO: 270320 - DNA, 2709 bp, Artificial Sequence
  derived and/or modified sequence
gctggaggctgtgctgagtgcccggtgcaggtgagccggtcctgcggagttgtgccgagtgcctgctgcagaccgaggctgggccaagatggtgtctgtgtttcgaagcgaggagatgtgtttgtcacaactgtttctccaggtggaagctgcatattgctgtgtggctgagctcggagagctcggattggttcagttcaaagatttaaatatgaatgtgaacagctttcaaaggaaatttgtgaatgaagtcagaaggtgtgaatcactggagagaatcctccgttttctggaagacgagatgcaaaatgagattgtagttcagttgctcgagaaaagcccactgaccccgctcccacgggaaatgattaccctggagactgttctagaaaaactggaaggagagttacaggaagccaaccagaaccagcaggccttgaaacaaagcttcctagaactgacagaactgaaatacctcctgaagaaaacccaagacttctttgagacggaaaccaatttagctgatgatttctttactgaggacacttctggcctcctggagttgaaagcagtgcctgcatatatgaccggaaagttggggttcatagccggtgtgatcaacagggagaggatggcttcctttgagcggttactgtggcgaatctgccgaggaaacgtgtacttgaagttcagtgagatggacgcccctctggaggatcctgtgacgaaagaagaaattcagaagaacatattcatcatattttaccaaggagagcagctcaggcagaaaatcaagaagatctgtgatgggtttcgagccactgtctacccttgcccagagcctgcggtggagcgcagagagatgttggagagcgtcaatgtgaggctggaagatttaatcaccgtcataacacaaacagagtctcaccgccagcgcctgctgcaggaagccgctgccaactggcactcctggctcatcaaggtgcagaagatgaaagctgtctaccacatcctgaacatgtgcaacatcgacgtcacccagcagtgtgtcatcgccgagatctggttcccggtggcagatgccacacgtatcaagagggcactggagcaaggcatggaactaagtggctcctccatggcccccatcatgaccacagtgcaatctaaaacagcccctcccacatttaacaggaccaataaattcacagctggcttccagaatattgttgatgcctatggtgtcggcagctaccgggagataaacccagccccctacaccatcatcactttccccttcctgttcgctgtgatgtttggagactgtggtcatggaaccgtgatgctcctggctgcactttggatgattctgaatgagagacgcttgctctcccagaagacagacaatgagatttggaacaccttcttccacgggcgctatctgatcctacttatgggcatcttctccatctacacgggtttgatctacaatgactgcttctccaagtccttgaacatctttggctcttcttggagtgtccaacccatgttcagaaacggcacatggaatactcatgtaatggaggaaagtctatatctgcagctggacccagccataccaggagtgtattttggaaatccatacccgtttgggattgatccgatttggaacttggcttcaaacaaactcacatttctgaactcgtataaaatgaagatgtcggtgatcctgggaattgtccagatggttttcggtgtcatcctcagccttttcaatcacatatacttcagaagaactctcaacatcattctgcaatttatccctgagatgatttttatcctgtgtctgtttggatacctggttttcatgatcattttcaaatggtgctgctttgacgtccatgtatctcagcacgcccccagcatcctcatccacttcatcaacatgtttctgtttaactacagtgactcttccaacgcacccctctacaaacatcagcaagaagtccaaagtttctttgtggttatggctttgatttctgtgccgtggatgcttctgattaagccgtttattcttagagccagtcatcggaaatcccagctgcaggcatccaggatccaagaagatgccactgagaacattgaaggtgatagctccagcccttctagccgttctggccagaggacttctgcagatacccacggggctctggacgaccatggagaagagttcaactttggagacgtctttgtccaccaagccatccacaccatcgagtactgcctgggctgcatttcaaacacagcctcctacctgcggctctgggccctcagcctggctcatgcacaactgtctgaagtgctctggactatggtgatgaacagcggccttcagacgcgaggctggggaggaatcgtcggggtttttattatttttgccgtatttgctgtcctgacagtagccatccttctgatcatggagggcctctctgctttcctgcacgccctgcgactgcactgggttgagttccagaacaagttctatgtcggggatggttacaagttttctccattctcctttaaacacatcctggatggcacagccgaggagtaggctgagggctgcacctcccacggtggtcaccatgccaatgaaggaagttcagtcttgtctttgatatcagcccctgcaaggcgctcaatgggaaggtt

SEQ ID NO: 270321 - DNA, 3090 bp, Artificial Sequence
  derived and/or modified sequence
aacagagctgcctcctggctctttgggagcctgggaggagaaggagccgggaggggcgctgcggggaagccacctgcggattcactggctgctgctccgcccaggactgctagcaagcacggagggctgccagacctggggctccctgctccgtgcgtcaggttggggaaaccaccgtctgccccagaccctgacccaggacccgcctggaggaagctgggaccgaggctgggccaagatggtgtctgtgtttcgaagcgaggagatgtgtttgtcacaactgtttctccaggtggaagctgcatattgctgtgtggctgagctcggagagctcggattggttcagttcaaagatttaaatatgaatgtgaacagctttcaaaggaaatttgtgaatgaagtcagaaggtgtgaatcactggagagaatcctccgttttctggaagacgagatgcaaaatgagattgtagttcagttgctcgagaaaagcccactgaccccgctcccacgggaaatgattaccctggagactgttctagaaaaactggaaggagagttacaggaagccaaccagaaccagcaggccttgaaacaaagcttcctagaactgacagaactgaaatacctcctgaagaaaacccaagacttctttgagacggaaaccaatttagctgatgatttctttactgaggacacttctggcctcctggagttgaaagcagtgcctgcatatatgaccggaaagttggggttcatagccggtgtgatcaacagggagaggatggcttcctttgagcggttactgtggcgaatctgccgaggaaacgtgtacttgaagttcagtgagatggacgcccctctggaggatcctgtgacgaaagaagaaattcagaagaacatattcatcatattttaccaaggagagcagctcaggcagaaaatcaagaagatctgtgatgggtttcgagccactgtctacccttgcccagagcctgcggtggagcgcagagagatgttggagagcgtcaatgtgaggctggaagatttaatcaccgtcataacacaaacagagtctcaccgccagcgcctgctgcaggaagccgctgccaactggcactcctggctcatcaaggtgcagaagatgaaagctgtctaccacatcctgaacatgtgcaacatcgacgtcacccagcagtgtgtcatcgccgagatctggttcccggtggcagatgccacacgtatcaagagggcactggagcaaggcatggaactaagtggctcctccatggcccccatcatgaccacagtgcaatctaaaacagcccctcccacatttaacaggaccaataaattcacagctggcttccagaatattgttgatgcctatggtgtcggcagctaccgggagataaacccagccccctacaccatcatcactttccccttcctgttcgctgtgatgtttggagactgtggtcatggaaccgtgatgctcctggctgcactttggatgattctgaatgagagacgcttgctctcccagaagacagacaatgagatttggaacaccttcttccacgggcgctatctgatcctacttatgggcatcttctccatctacacgggtttgatctacaatgactgcttctccaagtccttgaacatctttggctcttcttggagtgtccaacccatgttcagaaacggcacatggaatactcatgtaatggaggaaagtctatatctgcagctggacccagccataccaggagtgtattttggaaatccatacccgtttgggattgatccgatttggaacttggcttcaaacaaactcacatttctgaactcgtataaaatgaagatgtcggtgatcctgggaattgtccagatggttttcggtgtcatcctcagccttttcaatcacatatacttcagaagaactctcaacatcattctgcaatttatccctgagatgatttttatcctgtgtctgtttggatacctggttttcatgatcattttcaaatggtgctgctttgacgtccatgtatctcagcacgcccccagcatcctcatccacttcatcaacatgtttctgtttaactacagtgactcttccaacgcacccctctacaaacatcagcaagaagtccaaagtttctttgtggttatggctttgatttctgtgccgtggatgcttctgattaagccgtttattcttagagccagtcatcggaaatcccagctgcaggcatccaggatccaagaagatgccactgagaacattgaaggtgatagctccagcccttctagccgttctggccagaggacttctgcagatacccacggggctctggacgaccatggagaagagttcaactttggagacgtctttgtccaccaagccatccacaccatcgagtactgcctgggctgcatttcaaacacagcctcctacctgcggctctgggccctcagcctggctcatgcacaactgtctgaagtgctctggactatggtgatgaacagcggccttcagacgcgaggctggggaggaatcgtcggggtttttattatttttgccgtatttgctgtcctgacagtagccatccttctgatcatggagggcctctctgctttcctgcacgccctgcgactgcactgggttgagttccagaacaagttctatgtcggggatggttacaagttttctccattctcctttaaacacatcctggatggcacagccgaggagtaggctgagggctgcacctcccacggtggtcaccatgccaatgaaggaagttcagtcttgtctttgatatcagcccctgcaaggcgctcaatgggaaggttgttcttggctcacctgaagcatgaaactgtgtattatttggacgtcagcctgtggatttgatacgacttaaccacgtcagaggaaggactttggcaagtgatattgtcttcatgtggggtattaattctcaaataataaagtaattgacaaatgaggggagaatgctaaacagatgtcttcttgcaatattttaaatattgtatttgagaaaataaacatctgagtcattc

SEQ ID NO: 270322 - DNA, 2523 bp, Artificial Sequence
  derived and/or modified sequence
atggtgagcgtgttcagaagcgaggagatgtgcctgagccagctgttcctgcaggtggaggccgcctactgctgcgtggccgagctgggcgagctgggcctggtgcagttcaaggacctgaacatgaacgtgaacagcttccagagaaagttcgtgaacgaggtgagaagatgcgagagcctggagagaatcctgagattcctggaggacgagatgcagaacgagatcgtggtgcagctgctggagaagagccccctgacccccctgcccagagagatgatcaccctggagaccgtgctggagaagctggagggcgagctgcaggaggccaaccagaaccagcaggccctgaagcagagcttcctggagctgaccgagctgaagtacctgctgaagaagacccaggacttcttcgagaccgagaccaacctggccgacgacttcttcaccgaggacaccagcggcctgctggagctgaaggccgtgcccgcctacatgaccggcaagctgggcttcatcgccggcgtgatcaacagagagagaatggccagcttcgagagactgctgtggagaatctgcagaggcaacgtgtacctgaagttcagcgagatggacgcccccctggaggaccccgtgaccaaggaggagatccagaagaacatcttcatcatcttctaccagggcgagcagctgagacagaagatcaagaagatctgcgacggcttcagagccaccgtgtacccctgccccgagcccgccgtggagagaagagagatgctggagagcgtgaacgtgagactggaggacctgatcaccgtgatcacccagaccgagagccacagacagagactgctgcaggaggccgccgccaactggcacagctggctgatcaaggtgcagaagatgaaggccgtgtaccacatcctgaacatgtgcaacatcgacgtgacccagcagtgcgtgatcgccgagatctggttccccgtggccgacgccaccagaatcaagagagccctggagcagggcatggagctgagcggcagcagcatggcccccatcatgaccaccgtgcagagcaagaccgccccccccaccttcaacagaaccaacaagttcaccgccggcttccagaacatcgtggacgcctacggcgtgggcagctacagagagatcaaccccgccccctacaccatcatcaccttccccttcctgttcgccgtgatgttcggcgactgcggccacggcaccgtgatgctgctggccgccctgtggatgatcctgaacgagagaagactgctgagccagaagaccgacaacgagatctggaacaccttcttccacggcagatacctgatcctgctgatgggcatcttcagcatctacaccggcctgatctacaacgactgcttcagcaagagcctgaacatcttcggcagcagctggagcgtgcagcccatgttcagaaacggcacctggaacacccacgtgatggaggagagcctgtacctgcagctggaccccgccatccccggcgtgtacttcggcaacccctaccccttcggcatcgaccccatctggaacctggccagcaacaagctgaccttcctgaacagctacaagatgaagatgagcgtgatcctgggcatcgtgcagatggtgttcggcgtgatcctgagcctgttcaaccacatctacttcagaagaaccctgaacatcatcctgcagttcatccccgagatgatcttcatcctgtgcctgttcggctacctggtgttcatgatcatcttcaagtggtgctgcttcgacgtgcacgtgagccagcacgcccccagcatcctgatccacttcatcaacatgttcctgttcaactacagcgacagcagcaacgcccccctgtacaagcaccagcaggaggtgcagagcttcttcgtggtgatggccctgatcagcgtgccctggatgctgctgatcaagcccttcatcctgagagccagccacagaaagagccagctgcaggccagcagaatccaggaggacgccaccgagaacatcgagggcgacagcagcagccccagcagcagaagcggccagagaaccagcgccgacacccacggcgccctggacgaccacggcgaggagttcaacttcggcgacgtgttcgtgcaccaggccatccacaccatcgagtactgcctgggctgcatcagcaacaccgccagctacctgagactgtgggccctgagcctggcccacgcccagctgagcgaggtgctgtggaccatggtgatgaacagcggcctgcagaccagaggctggggcggcatcgtgggcgtgttcatcatcttcgccgtgttcgccgtgctgaccgtggccatcctgctgatcatggagggcctgagcgccttcctgcacgccctgagactgcactgggtggagttccagaacaagttctacgtgggcgacggctacaagttcagccccttcagcttcaagcacatcctggacggcaccgccgaggagtag

SEQ ID NO: 270323 - protein, 876 aa, Artificial Sequence
  derived and/or modified sequence
MGDSDDEYDRRRRDKFRRERSDYDRSRERDERRRGDDWNDREWDRGRERRSRGEYRDYDRNRRERFSPPRHELSPPQKRMRRDWDEHSSDPYHSGYEMPYAGGGGGPTYGPPQPWGHPDVHIMQHHVLPIQARLGSIAEIDLGVPPPVMKTFKEFLLSLDDSVDETEAVKRYNDYKLDFRRQQMQDFFLAHKDEEWFRSKYHPDEVGKRRQEARGALQNRLRVFLSLMETGWFDNLLLDIDKADAIVKMLDAAVIKMEGGTENDLRILEQEEEEEQAGKPGEPSKKEEGRAGAGLGDGERKTNDKDEKKEDGKQAENDSSNDDKTKKSEGDGDKEEKKEDSEKEAKKSSKKRNRKHSGDDSFDEGSVSESESESESGQAEEEKEEAEEALKEKEKPKEEEWEKPKDAAGLECKPRPLHKTCSLFMRNIAPNISRAEIISLCKRYPGFMRVALSEPQPERRFFRRGWVTFDRSVNIKEICWNLQNIRLRECELSPGVNRDLTRRVRNINGITQHKQIVRNDIKLAAKLIHTLDDRTQLWASEPGTPPLPTSLPSQNPILKNITDYLIEEVSAEEEELLGSSGGAPPEEPPKEGNPAEINVERDEKLIKVLDKLLLYLRIVHSLDYYNTCEYPNEDEMPNRCGIIHVRGPMPPNRISHGEVLEWQKTFEEKLTPLLSVRESLSEEEAQKMGRKDPEQEVEKFVTSNTQELGKDKWLCPLSGKKFKGPEFVRKHIFNKHAEKIEEVKKEVAFFNNFLTDAKRPALPEIKPAQPPGPAQILPPGLTPGLPYPHQTPQGLMPYGQPRPPILGYGAGAVRPAVPTGGPPYPHAPYGAGRGNYDAFRGQGGYPGKPRNRMVRGDPRAIVEYRDLDAPDDVDFF

SEQ ID NO: 270324 - DNA, 2631 bp, Artificial Sequence
  derived and/or modified sequence
atgggcgacagcgacgacgagtacgacagaagaagaagagacaagttcagaagagagagaagcgactacgacagaagcagagagagagacgagagaagaagaggcgacgactggaacgacagagagtgggacagaggcagagagagaagaagcagaggcgagtacagagactacgacagaaacagaagagagagattcagcccccccagacacgagctgagccccccccagaagagaatgagaagagactgggacgagcacagcagcgacccctaccacagcggctacgagatgccctacgccggcggcggcggcggccccacctacggccccccccagccctggggccaccccgacgtgcacatcatgcagcaccacgtgctgcccatccaggccagactgggcagcatcgccgagatcgacctgggcgtgcccccccccgtgatgaagaccttcaaggagttcctgctgagcctggacgacagcgtggacgagaccgaggccgtgaagagatacaacgactacaagctggacttcagaagacagcagatgcaggacttcttcctggcccacaaggacgaggagtggttcagaagcaagtaccaccccgacgaggtgggcaagagaagacaggaggccagaggcgccctgcagaacagactgagagtgttcctgagcctgatggagaccggctggttcgacaacctgctgctggacatcgacaaggccgacgccatcgtgaagatgctggacgccgccgtgatcaagatggagggcggcaccgagaacgacctgagaatcctggagcaggaggaggaggaggagcaggccggcaagcccggcgagcccagcaagaaggaggagggcagagccggcgccggcctgggcgacggcgagagaaagaccaacgacaaggacgagaagaaggaggacggcaagcaggccgagaacgacagcagcaacgacgacaagaccaagaagagcgagggcgacggcgacaaggaggagaagaaggaggacagcgagaaggaggccaagaagagcagcaagaagagaaacagaaagcacagcggcgacgacagcttcgacgagggcagcgtgagcgagagcgagagcgagagcgagagcggccaggccgaggaggagaaggaggaggccgaggaggccctgaaggagaaggagaagcccaaggaggaggagtgggagaagcccaaggacgccgccggcctggagtgcaagcccagacccctgcacaagacctgcagcctgttcatgagaaacatcgcccccaacatcagcagagccgagatcatcagcctgtgcaagagataccccggcttcatgagagtggccctgagcgagccccagcccgagagaagattcttcagaagaggctgggtgaccttcgacagaagcgtgaacatcaaggagatctgctggaacctgcagaacatcagactgagagagtgcgagctgagccccggcgtgaacagagacctgaccagaagagtgagaaacatcaacggcatcacccagcacaagcagatcgtgagaaacgacatcaagctggccgccaagctgatccacaccctggacgacagaacccagctgtgggccagcgagcccggcaccccccccctgcccaccagcctgcccagccagaaccccatcctgaagaacatcaccgactacctgatcgaggaggtgagcgccgaggaggaggagctgctgggcagcagcggcggcgccccccccgaggagccccccaaggagggcaaccccgccgagatcaacgtggagagagacgagaagctgatcaaggtgctggacaagctgctgctgtacctgagaatcgtgcacagcctggactactacaacacctgcgagtaccccaacgaggacgagatgcccaacagatgcggcatcatccacgtgagaggccccatgccccccaacagaatcagccacggcgaggtgctggagtggcagaagaccttcgaggagaagctgacccccctgctgagcgtgagagagagcctgagcgaggaggaggcccagaagatgggcagaaaggaccccgagcaggaggtggagaagttcgtgaccagcaacacccaggagctgggcaaggacaagtggctgtgccccctgagcggcaagaagttcaagggccccgagttcgtgagaaagcacatcttcaacaagcacgccgagaagatcgaggaggtgaagaaggaggtggccttcttcaacaacttcctgaccgacgccaagagacccgccctgcccgagatcaagcccgcccagccccccggccccgcccagatcctgccccccggcctgacccccggcctgccctacccccaccagaccccccagggcctgatgccctacggccagcccagaccccccatcctgggctacggcgccggcgccgtgagacccgccgtgcccaccggcggccccccctacccccacgccccctacggcgccggcagaggcaactacgacgccttcagaggccagggcggctaccccggcaagcccagaaacagaatggtgagaggcgaccccagagccatcgtggagtacagagacctggacgcccccgacgacgtggacttcttctag

SEQ ID NO: 270325 - DNA, 2904 bp, Artificial Sequence
  derived and/or modified sequence
gttcgcctctcttcggccctctactcaagagctccgtctccgtctcgccctcctcgaagtcctcgtcgcgcgcccgcgacccaggtcgccctgaaatctagcccgtccgagcgcgagtccaacgccgcggccgcaccaaggccccctcagaccgtgccatgggtgacagtgatgacgagtacgatcgaaggcgcagggacaagttcagaagagagcgcagcgactacgaccgttcccgcgagagagatgaaagacgtcgaggggacgattggaatgacagagagtgggaccgtggccgtgagcgccgtagtcggggtgaatatcgggactatgaccggaatcggcgagagcgcttctcgccacctcgccacgaactcagcccgccacagaagcgcatgaggagagactgggatgagcacagctctgacccataccacagtggctatgagatgccctatgctggggggggtgggggcccaacttatggcccccctcagccctggggccaccctgacgtccacatcatgcagcaccatgtcctgcctatccaggccaggctgggcagcattgcagagattgacctgggtgtgccgccgcccgtgatgaagaccttcaaggagtttctcctctccctggatgactcggtggatgagacggaggccgtcaagcgctataatgactacaagctggatttccggaggcaacagatgcaggatttcttcctggcgcacaaagatgaggagtggtttcggtctaagtaccacccagatgaggtggggaagcgtcggcaggaggcccggggggccctgcaaaaccgactgagggtcttcctgtccctcatggagactggctggtttgataaccttctcctggacatagacaaagctgatgccattgtcaagatgctggatgcagccgtgattaagatggaaggaggcacggagaatgatcttcgcatcctggagcaggaggaggaggaggagcaggcaggaaagcctggggagcccagcaagaaagaagaaggacgggctggagcaggcctaggggacggggagcgcaaaaccaacgacaaggatgagaagaaggaagacggcaagcaggctgagaatgacagttctaatgatgacaaaacaaagaagtcggagggtgatggggacaaggaagagaagaaagaagactccgagaaggaagccaaaaagagtagcaagaagcggaaccggaagcacagtggtgacgacagctttgacgagggcagcgtgtcagagtctgagtcggagtcagagagcggccaggctgaggaggagaaggaggaggccgaagaagcgctcaaggagaaggagaagcccaaggaagaagaatgggagaagcccaaggacgccgcggggctggagtgcaagccgcggccgctgcataagacctgctccctcttcatgcgcaacatcgcgcccaacatctcccgggccgagatcatctccctttgtaaaaggtacccaggctttatgcgggtggcgctctcagagccccagccagagaggaggtttttccgtcgtggctgggtgaccttcgaccgcagtgttaacattaaagagatctgttggaacctgcagaacatccgtctccgggagtgtgagctgagccctggtgtgaacagggacctgacccggcgcgttcgcaacatcaacggcatcacccagcacaagcagattgtgcgcaacgacatcaagctggcggccaagctgatccacacgctggatgacaggacacagctttgggcctcagaaccagggacgcctcccctgcccacgagcctgccctcgcaaaacccgatcttgaagaatatcaccgactacctgatcgaggaagtaagcgccgaggaggaggagctgctggggagcagcgggggcgctcctcctgaggagcctcctaaggaagggaacccggcagagatcaacgtggagcgggatgagaagttgattaaggtcttggacaagctcctcctttacctgcgcatcgtgcattccttggattattacaacacctgtgagtaccccaacgaggacgagatgcccaatcgctgtgggatcatccacgttcgggggcccatgccacccaaccgcatcagtcacggggaagtgctggagtggcagaagacttttgaggagaagctcacgccgttgctgagtgtgcgggagtcactctcagaggaagaggcccagaagatggggcgcaaagacccagagcaggaagtggagaagttcgtcacctccaacacgcaggaactgggcaaggataagtggctgtgtcctctcagtggcaagaaattcaagggtcctgagtttgtgcgcaaacatatcttcaacaagcatgcagagaaaattgaggaagtgaaaaaggaagtcgcgttttttaacaacttcctcactgatgctaagcgcccagctctgcctgagatcaagccagcccagccacctggccccgcccagatactccccccaggtttgaccccaggactcccctacccacaccagactccccagggcctgatgccctatggtcagccccggcccccgatcttgggctatggagctggtgctgtccgccctgcagtccccacaggaggccctccatacccccatgccccgtatggtgctggtcgagggaactatgatgccttccgaggccagggaggttatcctgggaaacctcgcaacaggatggttcgtggagacccaagggccattgtggaatatcgggacctggatgccccagacgatgttgatttcttttgagccgtcccccgttcctcagtcctgtatcatccatacttgtactaccttgtcctatgaagctctgagaattttttgtacgatcagccttactgctaataaaagcacttccacaggg

SEQ ID NO: 270326 - DNA, 2631 bp, Artificial Sequence
  derived and/or modified sequence
atgggggattccgatgacgaatacgatcggcgacgccgcgacaagttccgaagggagcggtcggattatgacaggagtcgcgagcgggatgagagaagacggggcgacgattggaacgatcgggagtgggaccgagggagggaaaggcgcagcagaggagaataccgggactacgatagaaatagaagagaacggttctcaccacctcgccacgagctgagtccaccccagaagcgtatgcggcgcgactgggacgagcattcgagcgatccgtaccactcgggctatgagatgccctacgccgggggtggcgggggccccacttacggacccccccagccctgggggcaccctgacgttcatatcatgcagcatcatgtgttgccaatacaggcccgccttgggagcatagccgagatagatctcggggtgccaccgcccgttatgaaaacatttaaggaatttctcctatccctggacgactcagtggatgaaacggaggctgtaaagaggtacaacgattataagctagattttagaaggcaacagatgcaggatttcttcttagctcataaagacgaggagtggtttcgcagcaagtatcaccctgatgaagtgggcaaacggagacaggaggcccgcggggcgctgcagaatagactgagggtgtttctgagtctgatggaaacgggctggttcgataacctgttgttagatatcgacaaagcagatgccattgtaaagatgcttgatgcagccgtaatcaaaatggagggcggaaccgaaaatgacttgcggatccttgagcaggaggaggaagaggagcaggctggcaaaccaggagaaccaagcaaaaaagaagaggggcgcgcaggggcaggcttgggagacggggagagaaaaactaacgataaggacgaaaagaaggaggacggcaagcaagctgagaacgactctagtaatgatgacaaaacaaagaagagcgagggcgacggtgataaagaagagaagaaagaagattccgagaaagaggccaaaaagagcagcaagaaaagaaaccggaagcacagtggagacgattctttcgatgaaggttccgtgagtgaatccgaatctgagtccgagtctggccaggcagaggaagaaaaagaggaggctgaggaggcccttaaagaaaaggagaagccgaaagaagaagagtgggaaaaacccaaggacgcggctggcctggaatgtaagccccgcccattgcataagacctgctccctctttatgcggaacatcgcgccaaatatctccagggctgaaattatctctctgtgtaagagataccccggttttatgagggtggcattgagtgaacctcagccagagagacgcttttttcgtaggggatgggtgacctttgacaggtccgtcaatataaaggagatatgctggaatctccaaaacattcgactccgggaatgcgaactctcaccaggcgtgaatagagacctcactcgaagggtccgcaatatcaacggcattacccagcataagcagatcgtgagaaatgatatcaagctggccgcgaaacttatccacacattggatgaccgcacgcagctgtgggcgagtgaacccggcaccccccctctgcctacgagcctgccaagtcaaaaccctatcctcaaaaacatcaccgactatctgattgaagaggttagcgcggaggaagaggagctgctgggttcttcaggcggcgcaccaccagaggagcctcccaaggaaggtaacccagcagagatcaacgtggaacgcgatgagaaactcattaaagtcctggataagcttctgctgtatctccggattgtgcatagccttgactattacaatacatgcgagtatcccaatgaggatgagatgcctaatcggtgcgggattatacatgttcggggacccatgcccccaaatcggatttcccatggggaggtgctcgaatggcagaagacgtttgaggagaagctgacacccctcctgagcgtacgggagagcttgagtgaggaggaggcccaaaagatgggaaggaaggatcccgagcaagaggtagaaaagtttgttacgtcaaatactcaggagcttgggaaagataaatggttatgcccactgtcaggcaagaaatttaaagggcccgaatttgtacgcaaacacatctttaataagcatgccgaaaagatcgaagaagtcaaaaaagaggtcgccttcttcaataacttcctcactgatgccaaacggccggcactgccagagatcaagcctgcacaaccccccgggcccgctcaaattctccccccaggcctgacacccgggctgccctatcctcaccagaccccccagggcctgatgccctatggacagccccgtccccccatcctaggatatggtgcgggtgccgttagaccggctgtacccaccggtggccctccttacccacacgcaccctatggggcagggcgcggtaattatgatgcctttaggggacagggcgggtatcctgggaaacctaggaacaggatggtgagaggcgaccctcgggccattgtggagtacagggatttagatgcccccgatgacgtggacttcttttag

SEQ ID NO: 270327 - DNA, 2631 bp, Artificial Sequence
  derived and/or modified sequence
atgggagacagtgatgatgaatatgacagaagaagaagagacaagttcagaagagagaggagtgactatgacaggagccgggagagagatgagaggagaagaggagatgactggaatgaccgggagtgggaccggggccgggagaggaggagcagaggagagtacagagattatgacaggaacagaagagagcgcttcagcccccccaggcatgagctgagccccccccagaagaggatgagaagagactgggatgagcacagcagtgacccctaccacagcggctatgagatgccctatgccggcggcggcggcggccccacctacggccccccccagccctggggccacccagatgtgcacatcatgcagcaccacgtgctgcccatccaggcccggctgggcagcattgctgagattgacctgggcgtgcccccacctgtgatgaagaccttcaaggagttcctgctgagcctggatgacagcgtggatgaaacagaggccgtgaagcgctacaatgactacaagctggacttccggcggcagcagatgcaggacttcttcctggcccacaaggatgaggagtggttccgcagcaagtaccacccagatgaggtgggcaagaggcggcaggaggcccggggggccctgcagaaccggctgcgggtcttcctgagcctgatggagaccggctggtttgacaacctgctgctggacatcgacaaggcagatgccatcgtgaagatgctggatgctgctgtgatcaagatggagggcggcacagaaaatgacctgcgcatcctggagcaggaggaggaggaggagcaggccggcaagccaggagagcccagcaagaaggaggagggccgggccggggccggcctgggagatggagagaggaagaccaatgacaaggatgagaagaaggaggatggcaagcaggccgagaatgacagcagcaatgatgacaagaccaagaagtcagaaggagatggagacaaggaggagaagaaggaggacagcgagaaggaggccaagaagagcagcaagaagaggaacaggaagcacagcggagatgacagctttgatgagggctctgtgtctgagagcgagagcgagagcgagagcggccaggccgaggaggagaaggaggaggccgaggaggccctgaaggagaaggagaagcccaaggaggaggagtgggagaagcccaaggatgctgctggcctggagtgcaagccccggcccctgcacaagacctgcagcctcttcatgaggaacatcgcccccaacatcagcagagctgagatcatcagcctgtgcaagcgctacccaggcttcatgagggtggccctgtctgagccccagcctgagcggcgcttcttcagaagaggctgggtgacctttgacagatctgtgaacatcaaggagatctgctggaacctgcagaacatccggctgagagaatgtgagctgagccctggggtgaacagagacctgacccggcgggtgaggaacatcaatggcatcacccagcacaagcagatcgtgagaaatgacatcaagctggccgccaagctgatccacaccctggatgacaggacccagctgtgggccagcgagcccggcaccccacccctgcccaccagcctgcccagccagaaccccatcctgaagaacatcacagactacctgattgaggaggtgtctgctgaggaggaggagctgctgggcagcagcggcggggcccctcctgaggagccccccaaggagggcaacccagctgagatcaacgtggagagagatgagaagctgatcaaggtgctggacaagctgctgctgtacctgcgcatcgtgcacagcctggactactacaacacctgtgagtacccaaatgaagatgagatgcccaacagatgtggcatcatccacgtgcggggccccatgccacccaaccgcatcagccacggggaggtgctggagtggcagaagacctttgaggagaagctgacccccctgctgtctgtgcgggagagcctgtctgaggaggaggcccagaagatgggcaggaaggaccctgagcaggaggtggagaagtttgtgaccagcaacacccaggagctgggcaaggacaagtggctgtgccccctgagcggcaagaagttcaagggccctgagtttgtgaggaagcacatcttcaacaagcatgctgagaagattgaggaggtgaagaaggaggtggccttcttcaacaacttcctgacagatgccaagaggcctgccctgcctgagatcaagccagcccagcccccaggccctgcccagatcctgcccccaggcctgaccccaggcctgccctacccccaccagaccccccagggcctgatgccctacggccagcccaggcctcccatcctgggctacggggccggggctgtgcggcctgctgtgcccactggaggccccccctacccccacgccccctatggagctggccggggcaactatgatgccttccggggccagggcggctacccaggcaagcccaggaacaggatggtgcggggggacccccgggccatcgtggagtacagagacctggatgccccagatgatgtggacttcttctag

SEQ ID NO: 270328 - DNA, 2631 bp, Artificial Sequence
  derived and/or modified sequence
atgggcgacagcgacgacgagtacgaccggcggcggcgggacaagttcagaagggaacgctctgactatgatcggagtagggaacgagatgagcggcggcgaggggatgactggaatgatcgagaatgggaccggggtcgtgagaggaggtccaggggcgagtaccgtgattacgaccggaatcgtcgcgagcgtttttcaccgccgcggcacgagctaagcccgccgcagaagagaatgcggagggattgggatgagcattcctccgatccctatcattccggctacgaaatgccttacgcgggcggtggaggaggccccacatacggtccaccgcagccatggggccacccggacgtccacatcatgcagcaccacgtcctgcccatacaggctcgactgggatccattgctgagattgacttaggggtacccccccctgttatgaagacgtttaaggagtttttgctgagcctcgatgactcagttgatgagacggaggcagtgaagagatacaatgactataaactcgactttaggcgacagcaaatgcaagattttttcctcgcccacaaagatgaggaatggttccgtagtaagtaccatccggacgaagttgggaagcggaggcaagaggcccgtggtgcactgcagaaccggcttagagtattcctgtccctgatggagactggctggttcgataacctcctgttagatatcgacaaggctgacgcaattgtcaaaatgctggacgcagcggtgattaagatggaagggggaaccgaaaatgacttgcgtattctcgaacaggaggaggaggaagaacaggccggcaagcctggagaaccgtctaagaaggaagaggggcgagccggggctggtctgggcgacggagaacgtaaaaccaatgacaaggacgaaaagaaggaagacggcaaacaggccgagaatgactcgagtaacgatgacaagacaaagaaaagcgaaggcgacggagacaaagaagagaagaaagaagactcagaaaaggaagccaagaagtccagcaagaagagaaatcgaaaacactctggggacgacagcttcgatgagggttccgtgtccgaaagtgagagcgagagcgagagtggccaggctgaggaggaaaaagaagaagctgaggaagccctcaaggaaaaggaaaaacctaaggaggaggaatgggaaaaacccaaggacgccgcaggactggaatgtaaacctaggccattacacaaaacctgcagcctgttcatgaggaatatcgccccaaatatctcgagggcggaaataatcagtctgtgcaaaaggtatcctggatttatgagggtcgctttgagcgagcctcagccagagcgcagattttttcgaagaggatgggttacctttgacagatcggtcaatattaaagaaatttgctggaatcttcaaaacatacggttacgtgaatgtgagctgagtccaggcgtcaatcgcgaccttacccgtcgcgtcaggaacatcaatgggatcactcagcataaacagatcgtccggaatgacatcaagctcgcagccaagcttatacacaccctcgatgataggacacaactgtgggccagtgagccagggacaccccctcttcctacttccctgccatcccagaatccaatcctcaagaacattactgattacctaatcgaagaggtatcagcagaagaggaggagctgttaggcagcagtgggggggcgcccccagaggagccaccgaaagaggggaacccagcagagattaacgtagaacgggatgagaagctgatcaaggtgctggacaagttgctgctttacctgcgtatagttcactcgctcgattattataacacttgcgagtaccctaacgaggatgagatgccaaaccgatgtggaatcattcacgtgcgggggcctatgcctcccaatcgcatctcacacggggaagttctggagtggcagaagacttttgaggaaaagttgacccccctcctttccgtgcgcgagagcctgtccgaagaagaggcacagaaaatgggcaggaaggatccagagcaggaggtagaaaaatttgtcaccagcaacacgcaggagctgggtaaggacaagtggttatgtcccctgagcggaaagaagtttaaggggcctgagttcgtgaggaaacatattttcaacaaacatgcagaaaagatcgaggaggtgaagaaggaggtcgcatttttcaataacttcttaaccgacgccaaacggcctgcacttcccgagataaaaccagctcaacctcccggtcctgcccagatacttccgcccggtttgacccctggactcccttatccacatcagaccccccagggtctgatgccttacggtcagccccgtcctcctattctggggtatggagctggtgctgtgcgacctgctgtgccaactggggggccgccttaccctcatgctccctacggggcaggccgcggaaattatgatgcctttcgcggacagggcggataccccggcaagcctcggaacagaatggttaggggcgatcccagggccatcgtcgagtatagagacctggatgctccagacgatgttgattttttctag

SEQ ID NO: 270329 - DNA, 2631 bp, Artificial Sequence
  derived and/or modified sequence
atgggggattccgacgatgaatacgatcgtcggcgtcgggataaattcagaagagagaggtccgattatgaccgcagccgcgagcgggacgagcgcaggaggggggatgactggaacgaccgtgagtgggacaggggtagagagagacgtagtcgcggagaatacagagactatgatagaaatcgcagggagcggttctccccgccacggcacgagcttagtcctcctcaaaaacgcatgcggagagattgggatgaacatagctctgatccctatcacagtggatatgagatgccctatgctggtggtggcggaggaccaacttatgggccaccacagccatggggtcaccccgatgtgcacattatgcagcaccacgtccttccaattcaggctcggctagggtccatagccgagatcgatttgggtgtgccaccacccgtcatgaagacattcaaagagtttttgctcagtctagatgactcagtggatgagactgaagccgtgaagagatataacgactacaagttagatttccgccgtcaacagatgcaggatttttttctggcccacaaggacgaagaatggttcaggagtaaataccaccctgacgaggtggggaaacgtaggcaggaagccaggggagccttacagaatcgtctccgggtattcctgtcactcatggagacaggctggttcgacaatctgctcctagatatcgacaaagcagacgccatcgtcaagatgctggacgccgcagtgatcaagatggaagggggaacagagaacgatctgcgcatactcgagcaagaagaggaagaagaacaggcaggaaagcccggagaaccaagtaagaaggaggagggaagagcgggagcgggattgggggatggggagcgaaagacaaatgacaaggacgagaagaaggaggatggtaagcaggcggaaaacgattccagcaatgatgataaaaccaaaaaaagcgagggcgatggggacaaagaagagaaaaaagaagattccgagaaggaggccaaaaagtcctctaagaagaggaatagaaaacactcaggcgacgatagcttcgatgagggatccgtatcagaatccgaatcagaaagcgagagcggacaggcagaggaggaaaaagaggaggccgaagaggccctaaaagagaaggagaagccaaaagaagaggagtgggaaaaacctaaggacgccgcaggactggagtgcaagcccagaccactgcacaagacatgctccttgtttatgcgaaatatcgcgcctaatatatctagagccgagatcatttccctctgtaaacgctatcctgggtttatgcgtgtggcactcagcgagcctcaaccggagcgcagatttttccgaagaggatgggtcaccttcgacaggtccgtaaacattaaggaaatttgctggaatctacaaaacatacgtctccgggagtgcgagttgtcccccggagtaaatcgggacctgaccagaagagtgagaaacatcaacggcataactcagcataagcagatcgttcggaacgacattaaacttgctgctaagcttatacatacgttagacgaccgcacgcagctgtgggccagcgagccgggaaccccacccctgcctacatctctcccgtctcaaaatcccattctcaagaatattacagactacctgattgaggaggttagcgccgaagaggaagagctgctcggatcaagcgggggagccccaccggaggaaccccctaaggagggcaaccccgcagagattaacgtggaacgagatgaaaagctgatcaaagtgctggacaagcttctgttatatttgcgcatcgtgcactcattggactactacaacacatgcgaatatcccaatgaagacgaaatgcccaaccgctgcggcattatccacgtgagaggcccaatgcccccaaacagaatatcccacggagaagttctggaatggcaaaaaacgtttgaggagaagctgacgccactgctgagtgtgagggaaagcctcagcgaggaagaggcccagaagatgggtcgcaaggatccggagcaggaggtggagaagttcgttaccagtaatacccaagaactcgggaaggataagtggctatgtccgctgtctggcaagaaattcaaaggcccagaattcgtgcggaagcacatctttaacaagcatgctgagaagattgaagaagtaaaaaaagaggtggcctttttcaataactttttgactgacgctaaacgacccgctctcccagagatcaaaccagcccaacccccaggaccggcacagattttgccacccggtctgacaccaggccttccttaccctcaccagacgccacaaggactcatgccatacggacagcctagaccccctattctgggatatggagccggagcagtgcggcctgcggtcccgactggcggacctccctatccccacgccccttacggagctggcaggggaaattatgatgccttccgaggccaggggggataccctgggaagcctaggaatcggatggttaggggggacccgagggccattgtagagtacagagacctcgatgcacctgacgatgtggatttcttctag

SEQ ID NO: 270330 - protein, 224 aa, Artificial Sequence
  derived and/or modified sequence
MPNRCGIIHVRGPMPPNRISHGEVLEWQKTFEEKLTPLLSVRESLSEEEAQKMGRKDPEQEVEKFVTSNTQELGKDKWLCPLSGKKFKGPEFVRKHIFNKHAEKIEEVKKEVAFFNNFLTDAKRPALPEIKPAQPPGPAQILPPGLTPGLPYPHQTPQGLMPYGQPRPPIGLWSWCCPPCSPQEALHTPMPRMVLVEGTMMPSEAREVILGNLATGWFVETQGP

SEQ ID NO: 270331 - protein, 875 aa, Artificial Sequence
  derived and/or modified sequence
MGDSDDEYDRRRRDKFRRERSDYDRSRERDERRRGDDWNDREWDRGRERRSRGEYRDYDRNRRERFSPPRHELSPPQKRMRRDWDEHSSDPYHSGYEMPYAGGGGGPTYGPPQPWGHPDVHIMQHHVLPIQARLGSIAEIDLGVPPPVMKTFKEFLLSLDDSVDETEAVKRYNDYKLDFRRQQMQDFFLAHKDEEWFRSKYHPDEVGKRRQEARGALQNRLRVFLSLMETGWFDNLLLDIDKADAIVKMLDAAVIKMEGGTENDLRILEQEEEEEQAGKPGEPSKKEEGRAGAGLGDGERKTNDKDEKKEDGKQAENDSSNDDKTKKSEGDGDKEEKKEDSEKEAKKSSKKRNRKHSGDDSFDEGSVSESESESESGQAEEEKEEAEALKEKEKPKEEEWEKPKDAAGLECKPRPLHKTCSLFMRNIAPNISRAEIISLCKRYPGFMRVALSEPQPERRFFRRGWVTFDRSVNIKEICWNLQNIRLRECELSPGVNRDLTRRVRNINGITQHKQIVRNDIKLAAKLIHTLDDRTQLWASEPGTPPLPTSLPSQNPILKNITDYLIEEVSAEEEELLGSSGGAPPEEPPKEGNPAEINVERDEKLIKVLDKLLLYLRIVHSLDYYNTCEYPNEDEMPNRCGIIHVRGPMPPNRISHGEVLEWQKTFEEKLTPLLSVRESLSEEEAQKMGRKDPEQEVEKFVTSNTQELGKDKWLCPLSGKKFKGPEFVRKHIFNKHAEKIEEVKKEVAFFNNFLTDAKRPALPEIKPAQPPGPAQILPPGLTPGLPYPHQTPQGLMPYGQPRPPILGYGAGAVRPAVPTGGPPYPHAPYGAGRGNYDAFRGQGGYPGKPRNRMVRGDPRAIVEYRDLDAPDDVDFF

SEQ ID NO: 270332 - DNA, 2628 bp, Artificial Sequence
  derived and/or modified sequence
atgggcgacagcgacgacgagtacgacagaagaagaagagacaagttcagaagagagagaagcgactacgacagaagcagagagagagacgagagaagaagaggcgacgactggaacgacagagagtgggacagaggcagagagagaagaagcagaggcgagtacagagactacgacagaaacagaagagagagattcagcccccccagacacgagctgagccccccccagaagagaatgagaagagactgggacgagcacagcagcgacccctaccacagcggctacgagatgccctacgccggcggcggcggcggccccacctacggccccccccagccctggggccaccccgacgtgcacatcatgcagcaccacgtgctgcccatccaggccagactgggcagcatcgccgagatcgacctgggcgtgcccccccccgtgatgaagaccttcaaggagttcctgctgagcctggacgacagcgtggacgagaccgaggccgtgaagagatacaacgactacaagctggacttcagaagacagcagatgcaggacttcttcctggcccacaaggacgaggagtggttcagaagcaagtaccaccccgacgaggtgggcaagagaagacaggaggccagaggcgccctgcagaacagactgagagtgttcctgagcctgatggagaccggctggttcgacaacctgctgctggacatcgacaaggccgacgccatcgtgaagatgctggacgccgccgtgatcaagatggagggcggcaccgagaacgacctgagaatcctggagcaggaggaggaggaggagcaggccggcaagcccggcgagcccagcaagaaggaggagggcagagccggcgccggcctgggcgacggcgagagaaagaccaacgacaaggacgagaagaaggaggacggcaagcaggccgagaacgacagcagcaacgacgacaagaccaagaagagcgagggcgacggcgacaaggaggagaagaaggaggacagcgagaaggaggccaagaagagcagcaagaagagaaacagaaagcacagcggcgacgacagcttcgacgagggcagcgtgagcgagagcgagagcgagagcgagagcggccaggccgaggaggagaaggaggaggccgaggccctgaaggagaaggagaagcccaaggaggaggagtgggagaagcccaaggacgccgccggcctggagtgcaagcccagacccctgcacaagacctgcagcctgttcatgagaaacatcgcccccaacatcagcagagccgagatcatcagcctgtgcaagagataccccggcttcatgagagtggccctgagcgagccccagcccgagagaagattcttcagaagaggctgggtgaccttcgacagaagcgtgaacatcaaggagatctgctggaacctgcagaacatcagactgagagagtgcgagctgagccccggcgtgaacagagacctgaccagaagagtgagaaacatcaacggcatcacccagcacaagcagatcgtgagaaacgacatcaagctggccgccaagctgatccacaccctggacgacagaacccagctgtgggccagcgagcccggcaccccccccctgcccaccagcctgcccagccagaaccccatcctgaagaacatcaccgactacctgatcgaggaggtgagcgccgaggaggaggagctgctgggcagcagcggcggcgccccccccgaggagccccccaaggagggcaaccccgccgagatcaacgtggagagagacgagaagctgatcaaggtgctggacaagctgctgctgtacctgagaatcgtgcacagcctggactactacaacacctgcgagtaccccaacgaggacgagatgcccaacagatgcggcatcatccacgtgagaggccccatgccccccaacagaatcagccacggcgaggtgctggagtggcagaagaccttcgaggagaagctgacccccctgctgagcgtgagagagagcctgagcgaggaggaggcccagaagatgggcagaaaggaccccgagcaggaggtggagaagttcgtgaccagcaacacccaggagctgggcaaggacaagtggctgtgccccctgagcggcaagaagttcaagggccccgagttcgtgagaaagcacatcttcaacaagcacgccgagaagatcgaggaggtgaagaaggaggtggccttcttcaacaacttcctgaccgacgccaagagacccgccctgcccgagatcaagcccgcccagccccccggccccgcccagatcctgccccccggcctgacccccggcctgccctacccccaccagaccccccagggcctgatgccctacggccagcccagaccccccatcctgggctacggcgccggcgccgtgagacccgccgtgcccaccggcggccccccctacccccacgccccctacggcgccggcagaggcaactacgacgccttcagaggccagggcggctaccccggcaagcccagaaacagaatggtgagaggcgaccccagagccatcgtggagtacagagacctggacgcccccgacgacgtggacttcttctag

SEQ ID NO: 270333 - DNA, 2959 bp, Artificial Sequence
  derived and/or modified sequence
gggtgacgcaggcgcagcgcgggctgcgcgcgctactgcccatccccggttgtcccacttttgttcgcctctcttcggccctctactcaagagctccgtctccgtctcgccctcctcgaagtcctcgtcgcgcgcccgcgacccaggtcgccctgaaatctagcccgtccgagcgcgagtccaacgccgcggccgcaccaaggccccctcagaccgtgccatgggtgacagtgatgacgagtacgatcgaaggcgcagggacaagttcagaagagagcgcagcgactacgaccgttcccgcgagagagatgaaagacgtcgaggggacgattggaatgacagagagtgggaccgtggccgtgagcgccgtagtcggggtgaatatcgggactatgaccggaatcggcgagagcgcttctcgccacctcgccacgaactcagcccgccacagaagcgcatgaggagagactgggatgagcacagctctgacccataccacagtggctatgagatgccctatgctggggggggtgggggcccaacttatggcccccctcagccctggggccaccctgacgtccacatcatgcagcaccatgtcctgcctatccaggccaggctgggcagcattgcagagattgacctgggtgtgccgccgcccgtgatgaagaccttcaaggagtttctcctctccctggatgactcggtggatgagacggaggccgtcaagcgctataatgactacaagctggatttccggaggcaacagatgcaggatttcttcctggcgcacaaagatgaggagtggtttcggtctaagtaccacccagatgaggtggggaagcgtcggcaggaggcccggggggccctgcaaaaccgactgagggtcttcctgtccctcatggagactggctggtttgataaccttctcctggacatagacaaagctgatgccattgtcaagatgctggatgcagccgtgattaagatggaaggaggcacggagaatgatcttcgcatcctggagcaggaggaggaggaggagcaggcaggaaagcctggggagcccagcaagaaagaagaaggacgggctggagcaggcctaggggacggggagcgcaaaaccaacgacaaggatgagaagaaggaagacggcaagcaggctgagaatgacagttctaatgatgacaaaacaaagaagtcggagggtgatggggacaaggaagagaagaaagaagactccgagaaggaagccaaaaagagtagcaagaagcggaaccggaagcacagtggtgacgacagctttgacgagggcagcgtgtcagagtctgagtcggagtcagagagcggccaggctgaggaggagaaggaggaggccgaagcgctcaaggagaaggagaagcccaaggaagaagaatgggagaagcccaaggacgccgcggggctggagtgcaagccgcggccgctgcataagacctgctccctcttcatgcgcaacatcgcgcccaacatctcccgggccgagatcatctccctttgtaaaaggtacccaggctttatgcgggtggcgctctcagagccccagccagagaggaggtttttccgtcgtggctgggtgaccttcgaccgcagtgttaacattaaagagatctgttggaacctgcagaacatccgtctccgggagtgtgagctgagccctggtgtgaacagggacctgacccggcgcgttcgcaacatcaacggcatcacccagcacaagcagattgtgcgcaacgacatcaagctggcggccaagctgatccacacgctggatgacaggacacagctttgggcctcagaaccagggacgcctcccctgcccacgagcctgccctcgcaaaacccgatcttgaagaatatcaccgactacctgatcgaggaagtaagcgccgaggaggaggagctgctggggagcagcgggggcgctcctcctgaggagcctcctaaggaagggaacccggcagagatcaacgtggagcgggatgagaagttgattaaggtcttggacaagctcctcctttacctgcgcatcgtgcattccttggattattacaacacctgtgagtaccccaacgaggacgagatgcccaatcgctgtgggatcatccacgttcgggggcccatgccacccaaccgcatcagtcacggggaagtgctggagtggcagaagacttttgaggagaagctcacgccgttgctgagtgtgcgggagtcactctcagaggaagaggcccagaagatggggcgcaaagacccagagcaggaagtggagaagttcgtcacctccaacacgcaggaactgggcaaggataagtggctgtgtcctctcagtggcaagaaattcaagggtcctgagtttgtgcgcaaacatatcttcaacaagcatgcagagaaaattgaggaagtgaaaaaggaagtcgcgttttttaacaacttcctcactgatgctaagcgcccagctctgcctgagatcaagccagcccagccacctggccccgcccagatactccccccaggtttgaccccaggactcccctacccacaccagactccccagggcctgatgccctatggtcagccccggcccccgatcgggctatggagctggtgctgtccgccctgctccccacaggaggccctccatacccccatgccccgtatggtgctggtcgagggaactatgatgccttccgaggccagggaggttatcctgggaaacctcgcaacaggatggttcgtggagacccaagggccattgtggaatatcgggacctggatgccccagacgatgttgatttcttttgagccgtcccccgttcctcagtcctgtatcatccatacttgtactaccttgtcctatgaagctctgagaattttttgtacgatcagccttactgctaataaaagcacttccacaggg

SEQ ID NO: 270334 - DNA, 2628 bp, Artificial Sequence
  derived and/or modified sequence
atgggtgacagcgacgatgagtatgatcgacggcgccgcgataaattcaggagagagaggtccgactacgatcgcagcagggaacgcgatgaacgccgccggggagacgactggaatgacagagagtgggacagaggacgtgaacggcgcagtaggggcgagtatcgggattacgaccgtaatcgcagggagcgatttagtccccctagacacgagctgtcacccccccagaagcgcatgcggcgggactgggacgaacactccagtgatccttaccacagtgggtacgagatgccatacgctggtggtggcggaggccccacgtacggtccaccccagccatggggccatcccgatgttcacattatgcagcaccacgtgttacctatccaagctcggttgggcagcatcgccgagatagacctgggggtcccgcctcccgtgatgaaaactttcaaagagttccttctaagcctggacgattccgtggacgagaccgaggccgtcaaacggtacaacgactacaaactcgattttagacggcagcagatgcaggacttttttcttgctcacaaagacgaggaatggtttcgcagtaaatatcaccctgatgaggtcggcaagagaaggcaggaggcacggggagcccttcagaatcgcctgcgggtgttcttgagtctgatggagactggctggtttgataatctgttactggacatcgataaggctgacgccatcgtaaagatgttagacgcagctgtaataaaaatggaaggaggtactgagaacgacctaagaattctggagcaggaagaggaggaagaacaggcgggcaagcccggtgaaccaagtaaaaaagaagagggtcgagccggcgcaggcctgggggacggtgagaggaaaaccaatgataaggacgaaaagaaggaagatggaaagcaagccgaaaacgactctagcaacgacgacaagacaaagaaatctgagggtgacggcgataaggaagagaagaaggaggatagtgagaaagaggccaagaagtcttcgaaaaagaggaatagaaaacactccggggacgacagcttcgacgagggaagcgtgtccgaatcagaatctgagagcgagagtggccaggcagaagaggagaaagaggaagctgaggccctcaaagagaaagagaaacccaaagaggaagaatgggagaaaccaaaagatgccgcgggcctcgaatgcaagccgaggcctcttcacaagacttgcagtctgtttatgcggaatatcgctcccaatatttcacgcgcggaaattatctccctgtgtaagcgctaccctggattcatgagggtggccctcagcgaacctcagcctgaacgccgtttctttcggcgcggttgggttacctttgacagatccgtgaacatcaaggaaatctgttggaatctgcagaatattcgcctgagggaatgcgagctctccccaggagtcaaccgggaccttactcggcgagtgcgcaatataaacggcatcacccagcacaagcagattgtacggaatgacattaagttagccgctaagctgattcacactctggacgatcgtacccagctgtgggcctcagaacccggcacaccccctctccctacatcattgccttcacagaaccctatcttgaagaatattactgattacctgatcgaagaggtgagcgctgaggaggaggagttactcgggagctcagggggcgcgccaccggaggaaccaccgaaggaaggcaacccagctgagatcaatgtcgagagagacgaaaagctcattaaagttctggataagctgttgttgtacctccggattgtgcacagtctggactactataatacatgcgaatatcccaacgaggatgagatgcctaacagatgtggaattattcatgtcagagggcccatgccccctaataggattagccatggtgaggtgctggaatggcagaaaacctttgaggaaaagctgacgccactgttgtcagttagggagagtctatctgaggaggaagcacagaagatgggccggaaagacccagaacaggaagtggaaaaatttgtgacctcaaatactcaggaactgggaaaggataagtggctgtgtcccttgagtggtaaaaagtttaagggcccagagttcgtccggaagcacatttttaacaaacacgcagaaaaaatcgaagaagtgaagaaggaggtggcctttttcaataatttcctgacagacgctaagagacctgccctcccagagatcaaacccgcgcagcctccaggcccggcccaaattctcccgcctggcttgactcctgggctcccatatccccaccagacaccccagggtttgatgccttacggccagcccagacctcctatcctggggtacggcgccggagcagtgcgccctgccgttccgaccgggggccctccgtacccccacgcaccctacggagctggccggggaaattatgacgcattccgaggtcagggaggataccctggcaagccccggaaccgtatggtgcggggtgacccacgtgccatcgtcgagtatcgcgacctagacgcaccagacgacgttgatttcttctag

SEQ ID NO: 270335 - DNA, 2628 bp, Artificial Sequence
  derived and/or modified sequence
atgggagacagtgatgatgaatatgacagaagaagaagagacaagttcagaagagagaggagtgactatgacaggagccgggagagagatgagaggagaagaggagatgactggaatgaccgggagtgggaccggggccgggagaggaggagcagaggagagtacagagattatgacaggaacagaagagagcgcttcagcccccccaggcatgagctgagccccccccagaagaggatgagaagagactgggatgagcacagcagtgacccctaccacagcggctatgagatgccctatgccggcggcggcggcggccccacctacggccccccccagccctggggccacccagatgtgcacatcatgcagcaccacgtgctgcccatccaggcccggctgggcagcattgctgagattgacctgggcgtgcccccacctgtgatgaagaccttcaaggagttcctgctgagcctggatgacagcgtggatgaaacagaggccgtgaagcgctacaatgactacaagctggacttccggcggcagcagatgcaggacttcttcctggcccacaaggatgaggagtggttccgcagcaagtaccacccagatgaggtgggcaagaggcggcaggaggcccggggggccctgcagaaccggctgcgggtcttcctgagcctgatggagaccggctggtttgacaacctgctgctggacatcgacaaggcagatgccatcgtgaagatgctggatgctgctgtgatcaagatggagggcggcacagaaaatgacctgcgcatcctggagcaggaggaggaggaggagcaggccggcaagccaggagagcccagcaagaaggaggagggccgggccggggccggcctgggagatggagagaggaagaccaatgacaaggatgagaagaaggaggatggcaagcaggccgagaatgacagcagcaatgatgacaagaccaagaagtcagaaggagatggagacaaggaggagaagaaggaggacagcgagaaggaggccaagaagagcagcaagaagaggaacaggaagcacagcggagatgacagctttgatgagggctctgtgtctgagagcgagagcgagagcgagagcggccaggccgaggaggagaaggaggaggccgaggccctgaaggagaaggagaagcccaaggaggaggagtgggagaagcccaaggatgctgctggcctggagtgcaagccccggcccctgcacaagacctgcagcctcttcatgagaaatattgcccccaacatcagcagagctgagatcatcagcctgtgcaagcgctacccaggcttcatgagggtggccctgtctgagccccagcctgagcggcgcttcttccggcggggctgggtgacctttgacagatctgtgaacatcaaggagatctgctggaacctgcagaacatccggctgcgggagtgtgagctgagccctggggtgaacagagacctgaccaggagagtgaggaacatcaatggcatcacccagcacaagcagatcgtgagaaatgacatcaagctggccgccaagctgatccacaccctggatgacaggacccagctgtgggccagcgagcccggcaccccacccctgcccaccagcctgcccagccagaaccccatcctgaagaacatcacagactacctgattgaggaggtgtctgctgaggaggaggagctgctgggcagcagtggaggagcccctcctgaggagccccccaaggagggcaacccagctgagatcaacgtggagagagatgagaagctgatcaaggtgctggacaagctgctgctgtacctgagaattgtgcacagcctggactactacaacacctgtgagtacccaaatgaagatgagatgcccaacagatgtggcatcatccacgtgcggggccccatgccacccaaccgcatcagccatggagaggtgctggagtggcagaagacctttgaggagaagctgacccccctgctgtctgtgcgggagagcctgtctgaggaggaggcccagaagatgggcaggaaggaccctgagcaggaggtggagaagtttgtgaccagcaacacccaggagctgggcaaggacaagtggctgtgccccctgagcggcaagaagttcaagggccctgagtttgtgaggaagcacatcttcaacaagcacgccgagaagattgaggaggtgaagaaggaggtggccttcttcaacaacttcctgacagatgccaagaggcctgccctgcctgagatcaagccagcccagcccccaggccctgcccagatcctgcccccaggcctgaccccaggcctgccctacccccaccagaccccccagggcctgatgccctacggccagccccggccccccatcctgggctatggagctggagctgtgcggcctgctgtgcccaccggcggccccccctacccccacgccccctacggggccggccggggcaactatgatgccttccggggccagggcggctacccaggcaagcccaggaacaggatggtgcggggggacccccgggccatcgtggagtacagagacctggatgccccagatgatgtggacttcttctag

SEQ ID NO: 270336 - DNA, 2963 bp, Artificial Sequence
  derived and/or modified sequence
gggtgacgcaggcgcagcgcgggctgcgcgcgctactgcccatccccggttgtcccacttttgttcgcctctcttcggccctctactcaagagctccgtctccgtctcgccctcctcgaagtcctcgtcgcgcgcccgcgacccaggtcgccctgaaatctagcccgtccgagcgcgagtccaacgccgcggccgcaccaaggccccctcagaccgtgccatgggtgacagtgatgacgagtacgatcgaaggcgcagggacaagttcagaagagagcgcagcgactacgaccgttcccgcgagagagatgaaagacgtcgaggggacgattggaatgacagagagtgggaccgtggccgtgagcgccgtagtcggggtgaatatcgggactatgaccggaatcggcgagagcgcttctcgccacctcgccacgaactcagcccgccacagaagcgcatgaggagagactgggatgagcacagctctgacccataccacagtggctatgagatgccctatgctggggggggtgggggcccaacttatggcccccctcagccctggggccaccctgacgtccacatcatgcagcaccatgtcctgcctatccaggccaggctgggcagcattgcagagattgacctgggtgtgccgccgcccgtgatgaagaccttcaaggagtttctcctctccctggatgactcggtggatgagacggaggccgtcaagcgctataatgactacaagctggatttccggaggcaacagatgcaggatttcttcctggcgcacaaagatgaggagtggtttcggtctaagtaccacccagatgaggtggggaagcgtcggcaggaggcccggggggccctgcaaaaccgactgagggtcttcctgtccctcatggagactggctggtttgataaccttctcctggacatagacaaagctgatgccattgtcaagatgctggatgcagccgtgattaagatggaaggaggcacggagaatgatcttcgcatcctggagcaggaggaggaggaggagcaggcaggaaagcctggggagcccagcaagaaagaagaaggacgggctggagcaggcctaggggacggggagcgcaaaaccaacgacaaggatgagaagaaggaagacggcaagcaggctgagaatgacagttctaatgatgacaaaacaaagaagtcggagggtgatggggacaaggaagagaagaaagaagactccgagaaggaagccaaaaagagtagcaagaagcggaaccggaagcacagtggtgacgacagctttgacgagggcagcgtgtcagagtctgagtcggagtcagagagcggccaggctgaggaggagaaggaggaggccgaagcgctcaaggagaaggagaagcccaaggaagaagaatgggagaagcccaaggacgccgcggggctggagtgcaagccgcggccgctgcataagacctgctccctcttcatgcgcaacatcgcgcccaacatctcccgggccgagatcatctccctttgtaaaaggtacccaggctttatgcgggtggcgctctcagagccccagccagagaggaggtttttccgtcgtggctgggtgaccttcgaccgcagtgttaacattaaagagatctgttggaacctgcagaacatccgtctccgggagtgtgagctgagccctggtgtgaacagggacctgacccggcgcgttcgcaacatcaacggcatcacccagcacaagcagattgtgcgcaacgacatcaagctggcggccaagctgatccacacgctggatgacaggacacagctttgggcctcagaaccagggacgcctcccctgcccacgagcctgccctcgcaaaacccgatcttgaagaatatcaccgactacctgatcgaggaagtaagcgccgaggaggaggagctgctggggagcagcgggggcgctcctcctgaggagcctcctaaggaagggaacccggcagagatcaacgtggagcgggatgagaagttgattaaggtcttggacaagctcctcctttacctgcgcatcgtgcattccttggattattacaacacctgtgagtaccccaacgaggacgagatgcccaatcgctgtgggatcatccacgttcgggggcccatgccacccaaccgcatcagtcacggggaagtgctggagtggcagaagacttttgaggagaagctcacgccgttgctgagtgtgcgggagtcactctcagaggaagaggcccagaagatggggcgcaaagacccagagcaggaagtggagaagttcgtcacctccaacacgcaggaactgggcaaggataagtggctgtgtcctctcagtggcaagaaattcaagggtcctgagtttgtgcgcaaacatatcttcaacaagcatgcagagaaaattgaggaagtgaaaaaggaagtcgcgttttttaacaacttcctcactgatgctaagcgcccagctctgcctgagatcaagccagcccagccacctggccccgcccagatactccccccaggtttgaccccaggactcccctacccacaccagactccccagggcctgatgccctatggtcagccccggcccccgatcttgggctatggagctggtgctgtccgccctgcagtccccacaggaggccctccatacccccatgccccgtatggtgctggtcgagggaactatgatgccttccgaggccagggaggttatcctgggaaacctcgcaacaggatggttcgtggagacccaagggccattgtggaatatcgggacctggatgccccagacgatgttgatttcttttgagccgtcccccgttcctcagtcctgtatcatccatacttgtactaccttgtcctatgaagctctgagaattttttgtacgatcagccttactgctaataaaagcacttccacaggg

SEQ ID NO: 270337 - DNA, 2628 bp, Artificial Sequence
  derived and/or modified sequence
atgggcgacagcgacgacgagtacgaccggcggcggcgggacaagtttcggcgcgagcgcagtgactacgatcgtagtcgagaacgggacgagagacggcgcggtgacgactggaatgacagggagtgggatcgaggcagagagcgcaggtcaagaggcgaatacagagactatgatcgcaaccgccgggagcgcttctcacccccacgccatgaacttagccccccccagaagcggatgaggcgcgactgggatgagcattcctccgacccataccactctggctacgagatgccctacgcaggaggaggaggagggccaacatacggcccacctcagccttggggtcatcctgatgtacacattatgcagcatcacgtgctgcctatacaggctaggcttggcagtatagcggaaattgacctgggtgtcccaccacccgtgatgaagacttttaaagaattcctgctctcactggacgactccgtagacgagacggaggcagtcaaacgctataatgactacaaattagactttcgccggcagcagatgcaagatttctttcttgcccacaaagacgaggagtggttccggagcaaataccaccctgatgaagtggggaagagacggcaggaggccagaggagcactgcagaacagattacgtgtgtttttatctcttatggagacgggatggtttgataatctcctgcttgatattgacaaagccgacgctattgtcaaaatgttggacgcggccgtgattaagatggaggggggaacagagaatgatctgaggatcctagagcaggaggaggaggaggaacaggccgggaagcctggtgaaccaagcaagaaggaggagggccgcgcaggcgcgggcctcggggatggcgagcgcaagaccaatgacaaggacgagaaaaaggaggatgggaagcaggctgaaaacgatagcagcaacgacgataagacaaaaaaatcagaaggggacggggataaagaggagaagaaggaagatagtgagaaagaggcaaaaaagtcatcaaagaagagaaatagaaaacattccggcgacgactctttcgatgagggatccgtgtccgagtctgagtccgagtcagagtccggccaagctgaagaagaaaaagaggaggccgaggctctgaaggagaaggagaagcccaaggaggaagagtgggagaagcctaaggatgcggcagggctggaatgtaagcctaggcctcttcacaagacatgctccctgtttatgcgcaatatagccccaaacatcagccgcgctgaaatcatcagcctctgcaagaggtaccccggcttcatgcgggttgcccttagcgaaccacagccagagcgcagattctttagaagggggtgggtgacctttgatcggtccgtgaacatcaaagagatctgctggaacttacaaaacatcaggctgcgcgagtgcgagttgagccccggtgtgaaccgcgatctgactaggcgggtccgcaatataaatgggatcacccagcataagcaaattgtgcgcaatgacattaaactggccgcaaaactcatacatacattggatgacaggacccagttgtgggcgagcgagcccgggaccccaccactgccaactagtctccctagccaaaatcccatcctgaagaatattactgactatctgatcgaagaagtctctgccgaggaggaagaactcctgggcagttccggaggcgctcctcctgaggaacctccaaaggagggcaatcccgccgaaatcaatgtcgagagagatgagaagttaattaaggtcctggataaattactcctgtacctgcgaatagttcacagtttggattattacaacacatgtgaatatcctaatgaggacgagatgcccaaccggtgtgggatcatacatgttagaggccctatgccacctaaccggatttcccatggtgaagtacttgagtggcagaaaacgttcgaagaaaaacttacacccttattaagcgtgcgggaatccctgagcgaagaggaggctcagaaaatgggaaggaaagacccggaacaggaggtggagaagttcgtgacgtctaatacgcaggagctaggaaaggacaagtggctgtgcccactctcaggcaagaagtttaagggcccagagttcgtccggaaacatatctttaataagcacgctgaaaagattgaggaagtgaagaaagaggtggccttctttaataactttctgaccgatgcaaaacgtcccgctttgcctgaaatcaaacctgcgcaacctcctggccccgcccagatcctccctccaggattgactccaggtctcccataccctcatcaaaccccccaggggctgatgccttacgggcaacccaggccccctatactaggttacggagcgggagccgttaggcctgctgtccctaccggaggcccaccgtaccctcacgcaccctatggtgccgggcggggaaactacgacgctttcagaggtcagggcggctatcccgggaaacctagaaatagaatggtaaggggcgacccacgcgctattgtagaatacagggacctagacgcgcccgatgacgtggactttttctag

SEQ ID NO: 270338 - DNA, 2628 bp, Artificial Sequence
  derived and/or modified sequence
atgggtgattctgatgacgagtatgataggcgccgtcgggataagttcagacgggaacgcagcgactatgatagatcacgcgagagagacgagaggcggagaggggacgattggaatgatcgagagtgggatagaggacgcgaaaggcgaagtcggggtgagtaccgggactatgaccgaaacagaagggaaagatttagtccacctagacacgaattgagcccaccgcagaagcggatgcgtagagattgggatgagcattcttctgacccctatcacagtggttacgaaatgccgtacgccggtggcggaggagggcctacctacggcccaccacagccttggggccacccggacgtgcacatcatgcagcaccatgtgcttccgatccaagcccgtctcggctctattgccgaaatcgacctgggagttcctcctcccgttatgaaaacattcaaggaattcttactgtccctggatgatagtgtcgacgagacagaagccgttaagcgctacaatgattacaaactggacttccgtagacagcaaatgcaagacttttttctggctcacaaggacgaggagtggtttcgatctaaatatcaccccgacgaggtgggcaaacgaaggcaggaagccagaggagccctgcaaaaccgccttcgggtttttctgagtctgatggagactgggtggttcgacaacctgctgttggacattgacaaagccgacgccattgtgaaaatgttagatgctgctgtgataaagatggaggggggtaccgagaatgacttgcgaatactggaacaagaggaggaggaggagcaggccggaaagccgggagagcctagcaaaaaggaagaaggcagagctggggctgggctgggagatggagaaagaaagaccaatgacaaggatgagaagaaagaggatggaaagcaggcggaaaacgacagctcgaacgatgacaaaactaagaagtcagagggagatggagacaaggaggaaaaaaaagaggatagcgagaaggaagcgaagaagagctccaagaagagaaaccggaagcactcaggagacgactccttcgatgaagggtccgtgtcagagtcggagtcagaatctgagagcggacaggctgaagaggagaaggaggaagctgaggccctgaaggaaaaggaaaagccgaaggaggaagagtgggaaaagcctaaggacgcagccggtttggagtgcaaacctcggccactgcataagacctgctctttgtttatgcgaaatatagctcctaacatttcacgagcggaaattatcagtctatgcaagaggtatcctgggttcatgcgcgtcgcactgagtgagccccaaccagagagacgcttttttcgcaggggctgggtaacctttgatcgtagtgtaaacatcaaggagatttgctggaacctccaaaacattcggttgcgggagtgtgagttgtccccgggagtgaatagggacctaacacgtagagtgcggaacatcaacggcataacccagcacaaacaaatcgtaagaaatgacataaagctcgccgctaaactgatacacaccctggacgaccgtacccagctatgggcctctgagccagggacaccgccattgccaacgagcttaccaagccaaaacccgatattaaagaatataaccgactacctgatcgaagaggtgagcgctgaggaagaggagctgttggggtcatctggtggggctcctcccgaggaaccccctaaagagggtaatcctgctgagatcaacgttgaacgggacgaaaagcttatcaaggtgctggataagctcttattatacctaagaattgtccactctctcgactactataatacgtgcgaatatcccaatgaggacgagatgcccaatcgttgcgggatcattcatgttcgagggcctatgccacccaatcgcatttctcacggtgaggtgctcgagtggcagaaaacttttgaggagaagctgacaccacttctcagcgttcgggagagcctgtctgaagaagaggctcagaagatggggcgaaaggaccctgagcaagaggtggaaaaatttgtcaccagcaatacccaggagctggggaaggataaatggctgtgtcccctgtcagggaagaagtttaaagggccagagtttgtgcggaaacacatcttcaataagcatgccgaaaagattgaggaagtgaaaaaggaagtcgcgttctttaacaatttcctgactgatgcaaagcgaccagccctcccagaaatcaaacccgcacagccaccaggtcccgctcagattctccctccaggtctcacacccggtctgccttacccacaccagacgcctcaaggtctgatgccttacggccagcctcgaccccctatactagggtacggcgctggagctgtcagaccggcagtgcctactggtggtcctccctacccccacgcgccatacggggctggacggggtaattatgatgcttttcgtgggcagggtggttaccctggcaagccaagaaacaggatggtccggggtgatccccgagccatcgtcgagtatcgcgatctcgatgcacccgacgacgtggattttttctag

SEQ ID NO: 270339 - DNA, 2961 bp, Artificial Sequence
  derived and/or modified sequence
gggtgacgcaggcgcagcgcgggctgcgcgcgctactgcccatccccggttgtcccacttttgttcgcctctcttcggccctctactcaagagctccgtctccgtctcgccctcctcgaagtcctcgtcgcgcgcccgcgacccaggtcgccctgaaatctagcccgtccgagcgcgagtccaacgccgcggccgcaccaaggccccctcagaccgtgccatgggtgacagtgatgacgagtacgatcgaaggcgcagggacaagttcagaagagagcgcagcgactacgaccgttcccgcgagagagatgaaagacgtcgaggggacgattggaatgacagagagtgggaccgtggccgtgagcgccgtagtcggggtgaatatcgggactatgaccggaatcggcgagagcgcttctcgccacctcgccacgaactcagcccgccacagaagcgcatgaggagagactgggatgagcacagctctgacccataccacagtggctatgagatgccctatgggggggggtgggggcccaacttatggcccccctcagccctggggccaccctgacgtccacatcatgcagcaccatgtcctgcctatccaggccaggctgggcagcattgcagagattgacctgggtgtgccgccgcccgtgatgaagaccttcaaggagtttctcctctccctggatgactcggtggatgagacggaggccgtcaagcgctataatgactacaagctggatttccggaggcaacagatgcaggatttcttcctggcgcacaaagatgaggagtggtttcggtctaagtaccacccagatgaggtggggaagcgtcggcaggaggcccggggggccctgcaaaaccgactgagggtcttcctgtccctcatggagactggctggtttgataaccttctcctggacatagacaaagctgatgccattgtcaagatgctggatgcagccgtgattaagatggaaggaggcacggagaatgatcttcgcatcctggagcaggaggaggaggaggagcaggcaggaaagcctggggagcccagcaagaaagaagaaggacgggctggagcaggcctaggggacggggagcgcaaaaccaacgacaaggatgagaagaaggaagacggcaagcaggctgagaatgacagttctaatgatgacaaaacaaagaagtcggagggtgatggggacaaggaagagaagaaagaagactccgagaaggaagccaaaaagagtagcaagaagcggaaccggaagcacagtggtgacgacagctttgacgagggcagcgtgtcagagtctgagtcggagtcagagagcggccaggctgaggaggagaaggaggaggccgaagcgctcaaggagaaggagaagcccaaggaagaagaatgggagaagcccaaggacgccgcggggctggagtgcaagccgcggccgctgcataagacctgctccctcttcatgcgcaacatcgcgcccaacatctcccgggccgagatcatctccctttgtaaaaggtacccaggctttatgcgggtggcgctctcagagccccagccagagaggaggtttttccgtcgtggctgggtgaccttcgaccgcagtgttaacattaaagagatctgttggaacctgcagaacatccgtctccgggagtgtgagctgagccctggtgtgaacagggacctgacccggcgcgttcgcaacatcaacggcatcacccagcacaagcagattgtgcgcaacgacatcaagctggcggccaagctgatccacacgctggatgacaggacacagctttgggcctcagaaccagggacgcctcccctgcccacgagcctgccctcgcaaaacccgatcttgaagaatatcaccgactacctgatcgaggaagtaagcgccgaggaggaggagctgctggggagcagcgggggcgctcctcctgaggagcctcctaaggaagggaacccggcagagatcaacgtggagcgggatgagaagttgattaaggtcttggacaagctcctcctttacctgcgcatcgtgcattccttggattattacaacacctgtgagtaccccaacgaggacgagatgcccaatcgctgtgggatcatccacgttcgggggcccatgccacccaaccgcatcagtcacggggaagtgctggagtggcagaagacttttgaggagaagctcacgccgttgctgagtgtgcgggagtcactctcagaggaagaggcccagaagatggggcgcaaagacccagagcaggaagtggagaagttcgtcacctccaacacgcaggaactgggcaaggataagtggctgtgtcctctcagtggcaagaaattcaagggtcctgagtttgtgcgcaaacatatcttcaacaagcatgcagagaaaattgaggaagtgaaaaaggaagtcgcgttttttaacaacttcctcactgatgctaagcgcccagctctgcctgagatcaagccagcccagccacctggccccgcccagatactccccccaggtttgaccccaggactcccctacccacaccagactccccagggcctgatgccctatggtcagccccggcccccgatcttgggctatggagctggtgctgtccgccctgcagtccccacaggaggccctccatacccccatgccccgtatggtgctggtcgagggaactatgatgccttccgaggccagggaggttatcctgggaaacctcgcaacaggatggttcgtggagacccaagggccattgtggaatatcgggacctggatgccccagacgatgttgatttcttttgagccgtcccccgttcctcagtcctgtatcatccatacttgtactaccttgtcctatgaagctctgagaattttttgtacgatcagccttactgctaataaaagcacttccacaggg

SEQ ID NO: 270340 - protein, 872 aa, Artificial Sequence
  derived and/or modified sequence
MGDSDDEYDRRRRDKFRRERSDYDRSRERDERRRGDDWNDREWDRGRERRSRGEYRDYDRNRRERFSPPRHELSPPQKRMRRDWDEHSSDPYHSGYEMPYAGGGGGPTYGPPQPWGHPDVHIMQHHVLPIQARLGSIAEIDLGVPPPVMKTFKEFLLSLDDSVDETEAVKRYNDYKLDFRRQQMQDFFLAHKDEEWFRSKYHPDEVGKRRQEARGALQNRLRVFLSLMETGWFDNLLLDIDKADAIVKMLDAAVIKMEGGTENDLRILEQEEEEEQAGKPGEPSKKEEGRAGAGLGDGERKTNDKDEKKEDGKQAENDSSNDDKTKKSEGDGDKEEKKEDSEKEAKKSSKKRNRKHSGDDSFDEGSVSESESESESGQAEEEKEEAEEALKEKEKPKEEEWEKPKDAAGLECKPRPLHKTCSLFMRNIAPNISRAEIISLCKRYPGFMRVALSEPQPERRFFRRGWVTFDRSVNIKEICWNLQNIRLRECELSPGVNRDLTRRVRNINGITQHKQIVRNDIKLAAKLIHTLDDRTQLWASEPGTPPLPTSLPSQNPILKNITDYLIEEVSAEEEELLGSSGGAPPEEPPKEGNPAEINVERDEKLIKVLDKLLLYLRIVHSLDYYNTCEYPNEDEMPNRCGIIHVRGPMPPNRISHGEVLEWQKTFEEKLTPLLSVRESLSEEEAQKMGRKDPEQEVEKFVTSNTQELGKDKWLCPLSGKKFKGPEFVRKHIFNKHAEKIEEVKKEVAFFNNFLTDAKRPALPEIKPAQPPGPAQSLTPGLPYPHQTPQGLMPYGQPRPPILGYGAGAVRPAVPTGGPPYPHAPYGAGRGNYDAFRGQGGYPGKPRNRMVRGDPRAIVEYRDLDAPDDVDFF

SEQ ID NO: 270341 - DNA, 2619 bp, Artificial Sequence
  derived and/or modified sequence
atgggcgacagcgacgacgagtacgacagaagaagaagagacaagttcagaagagagagaagcgactacgacagaagcagagagagagacgagagaagaagaggcgacgactggaacgacagagagtgggacagaggcagagagagaagaagcagaggcgagtacagagactacgacagaaacagaagagagagattcagcccccccagacacgagctgagccccccccagaagagaatgagaagagactgggacgagcacagcagcgacccctaccacagcggctacgagatgccctacgccggcggcggcggcggccccacctacggccccccccagccctggggccaccccgacgtgcacatcatgcagcaccacgtgctgcccatccaggccagactgggcagcatcgccgagatcgacctgggcgtgcccccccccgtgatgaagaccttcaaggagttcctgctgagcctggacgacagcgtggacgagaccgaggccgtgaagagatacaacgactacaagctggacttcagaagacagcagatgcaggacttcttcctggcccacaaggacgaggagtggttcagaagcaagtaccaccccgacgaggtgggcaagagaagacaggaggccagaggcgccctgcagaacagactgagagtgttcctgagcctgatggagaccggctggttcgacaacctgctgctggacatcgacaaggccgacgccatcgtgaagatgctggacgccgccgtgatcaagatggagggcggcaccgagaacgacctgagaatcctggagcaggaggaggaggaggagcaggccggcaagcccggcgagcccagcaagaaggaggagggcagagccggcgccggcctgggcgacggcgagagaaagaccaacgacaaggacgagaagaaggaggacggcaagcaggccgagaacgacagcagcaacgacgacaagaccaagaagagcgagggcgacggcgacaaggaggagaagaaggaggacagcgagaaggaggccaagaagagcagcaagaagagaaacagaaagcacagcggcgacgacagcttcgacgagggcagcgtgagcgagagcgagagcgagagcgagagcggccaggccgaggaggagaaggaggaggccgaggaggccctgaaggagaaggagaagcccaaggaggaggagtgggagaagcccaaggacgccgccggcctggagtgcaagcccagacccctgcacaagacctgcagcctgttcatgagaaacatcgcccccaacatcagcagagccgagatcatcagcctgtgcaagagataccccggcttcatgagagtggccctgagcgagccccagcccgagagaagattcttcagaagaggctgggtgaccttcgacagaagcgtgaacatcaaggagatctgctggaacctgcagaacatcagactgagagagtgcgagctgagccccggcgtgaacagagacctgaccagaagagtgagaaacatcaacggcatcacccagcacaagcagatcgtgagaaacgacatcaagctggccgccaagctgatccacaccctggacgacagaacccagctgtgggccagcgagcccggcaccccccccctgcccaccagcctgcccagccagaaccccatcctgaagaacatcaccgactacctgatcgaggaggtgagcgccgaggaggaggagctgctgggcagcagcggcggcgccccccccgaggagccccccaaggagggcaaccccgccgagatcaacgtggagagagacgagaagctgatcaaggtgctggacaagctgctgctgtacctgagaatcgtgcacagcctggactactacaacacctgcgagtaccccaacgaggacgagatgcccaacagatgcggcatcatccacgtgagaggccccatgccccccaacagaatcagccacggcgaggtgctggagtggcagaagaccttcgaggagaagctgacccccctgctgagcgtgagagagagcctgagcgaggaggaggcccagaagatgggcagaaaggaccccgagcaggaggtggagaagttcgtgaccagcaacacccaggagctgggcaaggacaagtggctgtgccccctgagcggcaagaagttcaagggccccgagttcgtgagaaagcacatcttcaacaagcacgccgagaagatcgaggaggtgaagaaggaggtggccttcttcaacaacttcctgaccgacgccaagagacccgccctgcccgagatcaagcccgcccagccccccggccccgcccagagcctgacccccggcctgccctacccccaccagaccccccagggcctgatgccctacggccagcccagaccccccatcctgggctacggcgccggcgccgtgagacccgccgtgcccaccggcggccccccctacccccacgccccctacggcgccggcagaggcaactacgacgccttcagaggccagggcggctaccccggcaagcccagaaacagaatggtgagaggcgaccccagagccatcgtggagtacagagacctggacgcccccgacgacgtggacttcttctag

SEQ ID NO: 270342 - DNA, 2619 bp, Artificial Sequence
  derived and/or modified sequence
atgggggacagcgatgacgagtatgatcgtaggcgaagggacaagtttcggcgcgagagatcagactatgatcgctcacgagagcgggatgaacgcaggcgaggcgacgattggaatgaccgcgagtgggacagaggccgcgagaggagatcacggggagaataccgcgattacgatcgtaatagaagggagaggttctccccgccccggcacgaactgagtcccccgcaaaaacgaatgcgcagggattgggacgagcacagcagcgacccatatcacagtggatatgaaatgccatatgccggggggggcggcggaccaacttacggaccaccccaaccctggggccacccggacgtgcacattatgcagcatcatgtccttccaatccaagccagattgggctctattgctgagatcgatctgggcgtccctccacccgtgatgaaaacgtttaaggagtttctcctgtcactggacgatagtgtcgatgaaaccgaggctgtgaaaagatacaatgactacaaattggacttcaggcgacaacaaatgcaggacttcttcctcgctcacaaagacgaggagtggttcaggtctaagtatcatccggatgaagttgggaaaagacgccaggaagccagaggcgccttgcagaacagattacgcgtctttctgtcgttgatggaaactgggtggtttgacaatctcctgcttgatatagacaaagccgatgcaattgtgaagatgctggatgctgctgtgataaaaatggaagggggtaccgagaacgaccttcggatactggagcaggaggaggaagaggagcaggccggcaaaccgggcgagcccagtaaaaaagaagaggggagggccggagcaggattgggggatggcgaaagaaaaactaacgacaaagatgagaaaaaggaagacggtaaacaggccgaaaatgattcatcgaacgacgacaaaaccaaaaagtccgagggcgacggcgataaggaagaaaagaaggaggattccgaaaaagaagcaaaaaagtccagtaagaagcggaatcgaaagcatagcggagacgactctttcgacgagggaagcgtctccgaatctgagagtgaatccgaatcggggcaggccgaagaagagaaggaggaggctgaagaggccctcaaagagaaggagaagcccaaggaagaagagtgggagaaaccgaaggatgccgctgggctggaatgcaagccgcgccctctgcataagacctgctcactgttcatgagaaatattgccccaaacatttctcgggccgagatcattagcctctgtaagcgctatcccggttttatgcgtgtcgccctcagcgagccacaacctgagaggcgatttttccgtagaggctgggtgacttttgaccgttccgtgaacattaaggaaatctgctggaatctacagaatattcgacttagggagtgcgagctttctccaggggtcaacagggatcttacccgtcgggtgagaaacattaatggtataacacagcacaaacagattgtcaggaatgacatcaagttggcagctaagctgatccacaccctcgacgacagaacccagttgtgggcctctgagccgggaactcctccactgccaacttcattacccagccagaatccgatcttgaagaatatcacggattacctgattgaggaggtttccgcagaggaagaggagctcctgggaagcagtgggggcgctccccccgaggaacccccaaaggagggcaatcctgcagagatcaacgtggagcgggacgaaaagcttatcaaagtgctggacaagttgttactgtacctgcgcattgtacactctttggattattacaacacatgtgagtatcctaatgaagacgaaatgccaaataggtgtggcataattcatgtgcgcggacctatgcccccaaatcgaatatcacacggcgaggtgcttgagtggcagaagacattcgaagagaaactgactccgctcctcagcgtgagagaaagcctgtctgaggaagaggcccagaagatgggaaggaaagaccccgaacaggaggtggaaaagtttgttacatcaaatacgcaagaactcggaaaggacaaatggttatgtcctctgagtggaaagaaatttaaaggccctgagtttgtgagaaaacacatcttcaataaacatgccgagaaaatcgaggaggtgaaaaaagaagtggcctttttcaacaatttcttgacagacgctaagaggcccgccttgccagaaattaaacccgcccagcctccaggccctgcacagtccttaaccccaggccttccatacccccatcagacaccccaggggcttatgccctacggtcagcctaggccccctattctcggctacggcgctggggcagtgcgtccggctgttcccaccggcggtccaccttatccccacgccccgtacggcgcaggaaggggaaattatgacgccttccggggccaggggggatatcccggcaagccacgaaatcggatggtcaggggcgatcctagagctatcgtcgaatatcgcgatctggacgctcctgacgatgtcgattttttctag

SEQ ID NO: 270343 - DNA, 2619 bp, Artificial Sequence
  derived and/or modified sequence
atgggagacagtgatgatgaatatgacagaagaagaagagacaagttcagaagagagaggagtgactatgacaggagccgggagagagatgagaggagaagaggagatgactggaatgaccgggagtgggaccggggccgggagaggaggagcagaggagagtacagagattatgacaggaacagaagagagcgcttcagcccccccaggcatgagctgagccccccccagaagaggatgagaagagactgggatgagcacagcagtgacccctaccacagcggctatgagatgccctatgccggcggcggcggcggccccacctacggccccccccagccctggggccacccagatgtgcacatcatgcagcaccacgtgctgcccatccaggcccggctgggcagcattgctgagattgacctgggcgtgcccccacctgtgatgaagaccttcaaggagttcctgctgagcctggatgacagcgtggatgaaacagaggccgtgaagcgctacaatgactacaagctggacttccggcggcagcagatgcaggacttcttcctggcccacaaggatgaggagtggttccgcagcaagtaccacccagatgaggtgggcaagaggcggcaggaggcccggggggccctgcagaaccggctgcgggtcttcctgagcctgatggagaccggctggtttgacaacctgctgctggacatcgacaaggcagatgccatcgtgaagatgctggatgctgctgtgatcaagatggagggcggcacagaaaatgacctgcgcatcctggagcaggaggaggaggaggagcaggccggcaagccaggagagcccagcaagaaggaggagggccgggccggggccggcctgggagatggagagaggaagaccaatgacaaggatgagaagaaggaggatggcaagcaggccgagaatgacagcagcaatgatgacaagaccaagaagtcagaaggagatggagacaaggaggagaagaaggaggacagcgagaaggaggccaagaagagcagcaagaagaggaacaggaagcacagcggagatgacagctttgatgagggctctgtgtctgagagcgagagcgagagcgagagcggccaggccgaggaggagaaggaggaggccgaggaggccctgaaggagaaggagaagcccaaggaggaggagtgggagaagcccaaggatgctgctggcctggagtgcaagccccggcccctgcacaagacctgcagcctcttcatgaggaacatcgcccccaacatcagcagagctgagatcatcagcctgtgcaagcgctacccaggcttcatgagggtggccctgtctgagccccagcctgagcggcgcttcttcagaagaggctgggtgacctttgacagatctgtgaacatcaaggagatctgctggaacctgcagaacatccggctgagagaatgtgagctgagccctggggtgaacagagacctgacccggcgggtgaggaacatcaatggcatcacccagcacaagcagatcgtgagaaatgacatcaagctggccgccaagctgatccacaccctggatgacaggacccagctgtgggccagcgagcccggcaccccacccctgcccaccagcctgcccagccagaaccccatcctgaagaacatcacagactacctgattgaggaggtgtctgctgaggaggaggagctgctgggcagcagcggcggggcccctcctgaggagccccccaaggagggcaacccagctgagatcaacgtggagagagatgagaagctgatcaaggtgctggacaagctgctgctgtacctgcgcatcgtgcacagcctggactactacaacacctgtgagtacccaaatgaagatgagatgcccaacagatgtggcatcatccacgtgcggggccccatgccacccaaccgcatcagccacggggaggtgctggagtggcagaagacctttgaggagaagctgacccccctgctgtctgtgcgggagagcctgtctgaggaggaggcccagaagatgggcaggaaggaccctgagcaggaggtggagaagtttgtgaccagcaacacccaggagctgggcaaggacaagtggctgtgccccctgagcggcaagaagttcaagggccctgagtttgtgaggaagcacatcttcaacaagcatgctgagaagattgaggaggtgaagaaggaggtggccttcttcaacaacttcctgacagatgccaagaggcctgccctgcctgagatcaagccagcccagcccccaggccctgcccagagcctgaccccaggcctgccctacccccaccagaccccccagggcctgatgccctacggccagcccaggcctcccatcctgggctacggggccggggctgtgcggcctgctgtgcccactggaggccccccctacccccacgccccctatggagctggccggggcaactatgatgccttccggggccagggcggctacccaggcaagcccaggaacaggatggtgcggggggacccccgggccatcgtggagtacagagacctggatgccccagatgatgtggacttcttctag

SEQ ID NO: 270344 - DNA, 2619 bp, Artificial Sequence
  derived and/or modified sequence
atgggcgacagcgacgacgagtacgaccggcggcggcgggacaagttccggcgggagagaagcgactacgataggagccgcgaacgggacgaaagaaggcgcggggatgactggaacgatagagagtgggatcgaggtagagaacgccgcagtagaggagaataccgagattacgatcgcaacagaagagaaagatttagcccccctagacacgagctctcccctcctcagaaaaggatgaggcgagattgggacgagcatagctctgacccctaccactccggatacgagatgccttatgctgggggaggaggcggacccacctatggtcccccccaaccttggggccaccccgacgttcacattatgcagcaccacgtgttgccgatccaggcccgcttaggtagtatcgcagaaattgacctgggagtcccgcctcccgtgatgaaaacctttaaagagttcctactgtctttggatgactctgtagatgagacagaggccgtgaaacgctacaatgactacaaactcgacttcaggaggcagcaaatgcaagacttttttctcgctcataaagatgaggaatggtttcgttctaaatatcaccctgatgaagtcgggaagcgcaggcaggaggctcggggcgccttacagaaccgcctgagagttttcttgagcctgatggagactggctggtttgacaacctgctccttgatatagacaaagccgacgcgatcgtcaagatgctagacgcggcagtgatcaaaatggaaggggggacagagaacgatctgcgaatcctggaacaggaagaggaagaagagcaggccgggaagcccggcgagccgagcaagaaagaagagggccgcgccggcgctggcctgggcgacggcgagagaaaaaccaacgacaaagatgaaaagaaggaggacgggaagcaggctgagaacgacagctccaacgacgacaagacgaaaaagtctgaaggcgacggtgataaggaagagaagaaagaggactcagagaaggaagcaaagaaaagttctaaaaaaaggaatagaaaacacagcggcgacgacagcttcgacgagggatccgtgtccgaaagtgaatcagagagcgagtccggccaggcagaagaagagaaggaggaagcggaagaagcgctcaaagagaaggagaagccaaaagaagaggaatgggagaagcccaaggacgcggctggcctcgagtgcaagcccaggcccctgcacaaaacctgctccctgttcatgaggaatatcgcccctaatattagccgggccgagataatttcactgtgcaagcggtacccgggcttcatgagggtggcattgagtgagcctcagcccgagcggcggtttttcagacgagggtgggtgacgttcgatagaagtgtcaacatcaaggaaatctgctggaacttacagaacataaggctacgagaatgcgaactaagtcccggcgtgaatcgtgatttgactaggcgagtgagaaacattaacggaattacgcagcacaaacagattgtcaggaacgatatcaagctagccgctaaactcatccatacactagatgaccgaacgcagctgtgggcaagtgaacccggtaccccgccgctacccacatccttaccctctcagaaccccattctgaaaaacatcactgactacctcattgaggaggtttcagcagaggaggaggagcttctgggctcttccggcggagctcctcctgaggagcccccaaaagaagggaacccagccgagattaacgtcgagagggatgagaagctgataaaagtacttgacaagctcttattatacctccgcatcgtgcactctcttgattattacaacacttgcgagtatcctaatgaggatgaaatgcctaataggtgtggcataatccacgttagaggtcccatgcctccgaatcgaatctcccacggggaggtactggaatggcaaaagactttcgaagaaaaactgacccccctgctatccgtccgggaaagcctaagcgaagaagaggcccagaagatggggcgtaaggatccagagcaagaggtcgagaagttcgtcacttcaaatacccaggaactcggcaaagataagtggctgtgcccactctctggaaaaaaattcaaggggccagaatttgtgaggaagcatattttcaacaagcatgctgagaagatagaggaagttaaaaaagaagtcgccttttttaacaattttctcaccgacgctaagcgccccgctctgccagaaataaaaccggcccagcccccaggtcccgctcagtctctgacacccggtctgccctatccacaccagaccccacagggcttgatgccgtatggtcagccgagaccccctattctgggatacggagcgggagctgtgcggcctgccgtgcctactggaggccctccctaccctcacgcaccttacggagcaggaagagggaattatgatgctttcagaggccagggaggctaccccggcaagcctaggaaccgcatggtgagaggagatcctcgagccattgtggaataccgcgatttggatgctcccgacgatgtggactttttttag
